(19) United States
(12) Patent Application Publication
(10) Pub. No.: US 2022/0290142 A1
(43) Pub. Date: Sep. 15, 2022

(54) COMPOSITIONS AND METHODS FOR MODULATING SPLICING AND PROTEIN EXPRESSION

(71) Applicant: Stoke Therapeutics, Inc., Bedford, MA (US)

(72) Inventor: Isabel Aznarez, Boston, MA (US)

(21) Appl. No.: 17/673,226

(22) Filed: Feb. 16, 2022

Related U.S. Application Data
(63) Continuation of application No. PCT/US2020/047081, filed on Aug. 19, 2020.
(60) Provisional application No. 63/049,262, filed on Jul. 8, 2020.
(60) Provisional application No. 62/888,887, filed on Aug. 19, 2019.

(51) Int. Cl. C12N 15/113; A61K 31/7125

(52) U.S. Cl. CPC C12N 15/113; A61K 31/7125; C12N 2310/11; C12N 2310/315; C12N 2310/3233; C12N 2310/321; C12N 2320/30; C12N 2310/314; C12N 2310/346

(57) ABSTRACT

Alternative splicing events can lead to non-productive mRNA transcripts which in turn can lead to aberrant protein expression, and therapeutic agents which can target the alternative splicing events in genes can modulate the expression level of functional proteins in diseased patients and/or inhibit aberrant protein expression. Described herein are therapeutic agents and methods that can be used to treat a condition caused by these alternative splicing events.

### CROSS-REFERENCE

[0001] This application is a continuation of International Application No. PCT/US20/47081, filed Aug. 19, 2020 which claims the benefit of U.S. Provisional Application No. 62/888,887, filed Aug. 19, 2019, and U.S. Provisional Application No. 63/049,262, filed Jul. 8, 2020, each of which is incorporated herein by reference in its entirety.

### REFERENCE TO SEQUENCE LISTING

[0002] The instant application contains a “lengthy” Sequence Listing which has been submitted via CD-R in lieu of a printed paper copy, and is hereby incorporated by reference in its entirety. Said CD-R, recorded on Oct. 30, 2020, are labeled “CRF”, “Copy 1” and “Copy 2”, respectively, and each contains only one identical 107,372,032 bytes file (47991-727_601_SL.txt).

### BACKGROUND

[0003] Alternative splicing events in genes can lead to non-productive or less productive mRNA transcripts, and therapeutic agents which can target the alternative splicing events in genes can modulate the expression level of functional proteins in patients and/or inhibit aberrant protein expression. Such therapeutic agents can be used to treat a condition or disease caused by protein deficiency.

### SUMMARY

[0004] In some aspects, provided herein is a composition comprising a non-sense mediated RNA decay alternative exon (NSAE)-modulating agent that interacts with a target motif within a pre-processed mRNA transcript to modulate exclusion of an NSAE from a processed mRNA transcript and to modulate inclusion of a canonical exon in the processed mRNA transcript, wherein the target motif is located (i) in an intronic region between two canonical exons, (ii) in one of the two canonical exons, or (iii) in a region spanning both an intron and canonical exon; and wherein the NSAE comprises (i) only a portion of a canonical exon, or (ii) a canonical exon and at least a portion of an intron adjacent to the canonical exon; wherein the NSAE-modulating agent modulates exclusion of an NSAE from the processed mRNA transcript and modulates inclusion of a canonical exon in the processed mRNA transcript.

[0005] In some aspects, provided herein is a composition comprising a non-sense mediated RNA decay alternative exon (NSAE)-modulating agent that modulates expression of a target protein in a cell comprising a pre-processed mRNA transcript (pre-mRNA) that encodes the target protein and comprises: an alternative nonsense mediated RNA decay-inducing (NMD) exon comprising an alternative 5′ splice site downstream of the 5′ splice site of a canonical exon and within the canonical exon, or upstream of the 5′ splice site of the canonical exon and within an intron, wherein the NSAE-modulating agent modulates processing of an mRNA transcript from the pre-processed mRNA transcript by modulating splicing of the pre-mRNA at the 5′ alternative splice site, wherein the splicing of the pre-mRNA at the 5′ alternative splice site modulates the expression of the target protein in a cell.

[0006] In some aspects, provided herein is a composition comprising a non-sense mediated RNA decay alternative exon (NSAE)-modulating agent that modulates expression of a target protein in a cell comprising a pre-processed mRNA transcript (pre-mRNA) that encodes the target protein and comprises: an alternative nonsense mediated RNA decay-inducing (NMD) exon comprising an alternative 3′ splice site upstream of the 3′ splice site of a canonical exon and within the canonical exon, or downstream of the 3′ splice site of the canonical exon and within an intron, wherein the NSAE-modulating agent modulates processing of an mRNA transcript from the pre-processed mRNA transcript by modulating splicing of the pre-mRNA at the 3′ alternative splice site, and wherein the splicing of the pre-mRNA at the 3′ alternative splice site modulates the expression of the target protein in a cell.

[0007] In some aspects, provided herein is a composition comprising a non-sense mediated RNA decay alternative 5′ or 3′ splice site (NSASS)-modulating agent that interacts with a target motif within a pre-processed mRNA transcript to modulate splicing at an alternative 5′ or 3′ splice site of a pre-processed mRNA transcript and to modulate inclusion of a canonical exon in a processed mRNA transcript that is processed from the pre-processed mRNA transcript, wherein the target motif is located in an intronic region between two canonical exons, in one of the two canonical exons, or in a region spanning both an intron and canonical exon; wherein modulating splicing at the alternative 5′ or 3′ splice site of the pre-processed mRNA transcript modulates exclusion of an alternative exon from the processed mRNA transcript, wherein the alternative exon comprises only a portion of a canonical exon, or a canonical exon and at least a portion of an intron adjacent to the canonical exon; and wherein the NSASS-modulating agent modulates exclusion of the alternative exon from the processed mRNA transcript and modulates inclusion of a canonical exon in the processed mRNA transcript.

[0008] In some aspects, provided herein is a composition comprising a non-sense mediated RNA decay alternative 5′ or 3′ splice site (NSASS)-modulating agent that modulates expression of a target protein in a cell comprising a pre-processed mRNA transcript (pre-mRNA) that encodes the target protein, wherein the pre-mRNA comprises an alternative exon comprising an alternative 5′ splice site downstream of the 5′ splice site of a canonical exon and within the canonical exon, or upstream of the 5′ splice site of the canonical exon and within an intron; wherein the NSASS-modulating agent modulates processing of an mRNA transcript from the pre-processed mRNA transcript by modulating splicing of the pre-mRNA at the 5′ alternative splice site, wherein the splicing of the pre-mRNA at the 5′ alternative splice site modulates the expression of the target protein in a cell.

[0009] In some aspects, provided herein is a composition comprising a non-sense mediated RNA decay alternative exon (NSASS)-modulating agent that modulates expression of a target protein in a cell comprising a pre-processed mRNA transcript (pre-mRNA) that encodes the target protein, wherein the pre-mRNA comprises an alternative exon comprising an alternative 3′ splice site upstream of the 3′ splice site of a canonical exon and within the canonical exon, or downstream of the 3′ splice site of the canonical exon and within an intron, wherein the NSASS-modulating agent modulates processing of an mRNA transcript from the pre-processed mRNA transcript by modulating splicing of the pre-mRNA at the 3′ alternative splice site, and wherein the splicing of the pre-mRNA at the 3′ alternative splice site modulates the expression of the target protein in a cell.

[0010] In some embodiments, the agent is a small molecule. In some embodiments the agent is a polypeptide. In some embodiments, the polypeptide is a nucleic acid binding protein. In some embodiments, the nucleic acid binding protein contains a TAL-effector or zinc finger binding domain. In some embodiments, the nucleic acid binding protein is a Cas family protein. In some embodiments, the polypeptide is accompanied by or complexed with one or more nucleic acid molecules. In some embodiments, the Agent is an antisense oligomer (ASO) complementary to the targeted region of the pre-mRNA. In some embodiments, the Agent is at least 75%, at least 80%, at least 85%, at least 90%, at least 95%, at least 98%, at least 99%, or 100%, complementary to the targeted region of the pre-mRNA encoding the target protein. In some embodiments, the Agent is an antisense oligomer, and wherein the Agent comprises a backbone modification comprising a phosphorothioate linkage or a phosphorodiamidate linkage. In some embodiments, the Agent is an antisense oligomer, and wherein the Agent comprises a phosphorodiamidate morpholino. In some embodiments, the Agent is an antisense oligomer, and wherein the Agent comprises a locked nucleic acid. In some embodiments, the Agent is an antisense oligomer, and wherein the Agent comprises a peptide nucleic acid. In some embodiments, the Agent is an antisense oligomer, and wherein the Agent comprises a 2′-O-methyl. In some embodiments, the Agent is an antisense oligomer, and wherein the Agent comprises a 2′-Fluoro, or a 2′-O-methoxyethyl moiety. In some embodiments, the Agent is an antisense oligomer, and wherein the Agent comprises at least one modified sugar moiety. In some embodiments, each sugar moiety is a modified sugar moiety. In some embodiments, the Agent is an antisense oligomer, and wherein the Agent consists of from 8 to 50 nucleobases, 8 to 40 nucleobases, 8 to 35 nucleobases, 8 to 30 nucleobases, 8 to 25 nucleobases, 8 to 20 nucleobases, 8 to 15 nucleobases, 9 to 50 nucleobases, 9 to 40 nucleobases, 9 to 35 nucleobases, 9 to 30 nucleobases, 9 to 25 nucleobases, 9 to 20 nucleobases, 9 to 15 nucleobases, 10 to 50 nucleobases, 10 to 40 nucleobases, 10 to 35 nucleobases, 10 to 30 nucleobases, 10 to 25 nucleobases, 10 to 20 nucleobases, 10 to 15 nucleobases, 11 to 50 nucleobases, 11 to 40 nucleobases, 11 to 35 nucleobases, 11 to 30 nucleobases, 11 to 25 nucleobases, 11 to 20 nucleobases, 11 to 15 nucleobases, 12 to 50 nucleobases, 12 to 40 nucleobases, 12 to 35 nucleobases, 12 to 30 nucleobases, 12 to 25 nucleobases, 12 to 20 nucleobases, or 12 to 15 nucleobases. Described herein, in some aspects, is a composition of a nucleic acid molecule that encodes for the NSAE-modulating agent. In some embodiments, the nucleic acid molecule is incorporated into a viral delivery system. In some embodiments, the viral delivery system is an adenovirus-associated vector.

[0011] In some aspects, provided herein is a method of modulating protein expression, comprising: (a) contacting a non-sense mediated RNA decay alternative exon (NSAE)-modulating agent to a target motif within a pre-processed mRNA transcript, wherein the NSAE comprises (i) only a portion of a canonical exon, or (ii) a canonical exon and at least a portion of an intron adjacent to the canonical exon; (b) processing a mRNA transcript from the pre-processed mRNA transcript thereby forming a processed mRNA transcript, wherein the NSAE-modulating agent modulates exclusion of an NSAE from the processed mRNA transcript and modulates inclusion of the canonical exon in the processed mRNA transcript; and (c) translating the processed mRNA transcript wherein the exclusion of the NSAE and inclusion of the canonical exon modulates protein expression relative to the protein expression of an equivalent mRNA transcript comprising the NSAE instead of the canonical exon. In some embodiments, the target motif is located in an intronic region between two canonical exons. In some embodiments, the target motif is located in one of the two canonical exons. In some embodiments, the target motif is located in a region spanning both an intron and a canonical exon.

[0012] In some aspects, provided herein is a method of modulating expression of a target protein by a cell having a pre-processed mRNA transcript (pre-mRNA) that encodes the target protein and comprises: an alternative nonsense mediated RNA decay-inducing (NMD) exon comprising an alternative 3′ splice site upstream of the 3′ splice site of a canonical exon and within the canonical exon, or downstream of the 3′ splice site of the canonical exon and within an intron, the method comprising contacting a non-sense mediated RNA decay alternative exon (NSAE)-modulating agent to the cell, wherein the non-sense mediated RNA decay alternative exon (NSAE)-modulating agent modulates processing of an mRNA transcript from the pre-processed mRNA transcript by modulating splicing of the pre-mRNA at the 3′ alternative splice site, and wherein the splicing of the pre-mRNA at the 3′ alternative splice site modulates the expression of the target protein.

[0013] In some aspects, provided herein is a method of modulating expression of a target protein by a cell having a pre-processed mRNA transcript (pre-mRNA) that encodes the target protein and comprises: an alternative nonsense mediated RNA decay-inducing (NMD) exon comprising an alternative 5′ splice site downstream of the 5′ splice site of a canonical exon and within the canonical exon, or upstream of the 5′ splice site of the canonical exon and within an intron, the method comprising contacting a non-sense mediated RNA decay alternative exon (NSAE)-modulating agent to the cell, wherein the non-sense mediated RNA decay alternative exon (NSAE)-modulating agent modulates processing of an mRNA transcript from the pre-processed mRNA transcript by modulating splicing of the pre-mRNA at the 5′ alternative splice site, and wherein the splicing of the pre-mRNA at the 5′ alternative splice site modulates the expression of the target protein.

[0014] In some embodiments, the non-sense mediated RNA decay alternative exon (NSAE)-modulating agent binds to a targeted portion of the pre-processed mRNA transcript. In some embodiments, the wherein the non-sense mediated RNA decay alternative exon (NSAE)-modulating agent binds to a factor involved in splicing of the NSAE or NMD exon. In some embodiments, the wherein the non-sense mediated RNA decay alternative exon (NSAE)-modulating agent inhibits activity of a factor involved in splicing of the NMD exon. In some embodiments, the wherein the non-sense mediated RNA decay alternative exon (NSAE)-modulating agent interferes with binding of a factor involved in splicing of the NMD exon to a region of the targeted portion of the pre-processed mRNA transcript. In some embodiments, modulation of splicing of the pre-mRNA increases the expression of the target protein. In some embodiments, the level the target protein in the cell is increased about 1.1 to about 10-fold, about 1.5 to about 10-fold, about 2 to about 10-fold, about 3 to about 10-fold, about 4 to about 10-fold, about 1.1 to about 5-fold, about 1.1 to about 6-fold, about 1.1 to about 7-fold, about 1.1 to about 8-fold, about 1.1 to about 9-fold, about 2 to about 5-fold, about 2 to about 6-fold, about 2 to about 7-fold, about 2 to about 8-fold, about 2 to about 9-fold, about 3 to about 6-fold, about 3 to about 7-fold, about 3 to about 8-fold, about 3 to about 9-fold, about 4 to about 7-fold, about 4 to about 8-fold, about 4 to about 9-fold, at least about 1.1-fold, at least about 1.5-fold, at least about 2-fold, at least about 2.5-fold, at least about 3-fold, at least about 3.5-fold, at least about 4-fold, at least about 5-fold, or at least about 10-fold, compared to the level of processed mRNA encoding the target protein in a control cell. In some embodiments, modulation of splicing of the pre-mRNA increases production of the processed mRNA encoding the target protein. In some embodiments, the level of processed mRNA encoding the target protein in the cell contacted with the therapeutic agent is increased about 1.1 to about 10-fold, about 1.5 to about 10-fold, about 2 to about 10-fold, about 3 to about 10-fold, about 4 to about 10-fold, about 1.1 to about 5-fold, about 1.1 to about 6-fold, about 1.1 to about 7-fold, about 1.1 to about 8-fold, about 1.1 to about 9-fold, about 2 to about 5-fold, about 2 to about 6-fold, about 2 to about 7-fold, about 2 to about 8-fold, about 2 to about 9-fold, about 3 to about 6-fold, about 3 to about 7-fold, about 3 to about 8-fold, about 3 to about 9-fold, about 4 to about 7-fold, about 4 to about 8-fold, about 4 to about 9-fold, at least about 1.1-fold, at least about 1.5-fold, at least about 2-fold, at least about 2.5-fold, at least about 3-fold, at least about 3.5-fold, at least about 4-fold, at least about 5-fold, or at least about 10-fold, compared to the level of processed mRNA encoding the target protein in a control cell. In some embodiments, the target protein is the canonical isoform of the protein. In some embodiments, the target protein is SynGAP1. In some embodiments, the target protein is any one selected from the group consisting of ABCA5, ABCA7, ABCC3, ABCC5, ABCC8, ABCD1, ABR, ACAD9, ACAP1, ACOX2, ACSF3, ACTN4, ADAM17, ADAMTS13, AKR1E2, ALAD, ALG3, ANKRD29, ANKS3, ANO4, AP3B2, AP3M1, AP5Z1, ARNTL, ASAP3, ATRX, BBS2, BBS4, BRD9, CALM3, CARS1, CASP9, CATSPER1, CCDC40, CCDC88B, CD4, CD58, CES2, CHFR, CLCN2, CNOT3, CNTROB, COL5A3, CPSF1, CSPP1, CTF1, CTH, CYP3A5, DAB2IP, DBN1, DDX51, DEAF1, DGKE, DHDDS, DMKN, DNHD1, DOCK8, DOK5, EIF2B5, ELAC2, ELP1, ENTPD4, ESRRA, ESS2, ETAA1, ETHE1, FANCA, FASTK, FASTKD3, FPGS, FREM1, GAS8, GCK, GGA1, GGA3, GGT1, GLMN, GON4L, GRB14, HDAC3, HELQ, HP1BP3, HPS1, HPS4, IDUA, IFT122, IL17RC, IMPDH1, INVS, IRF3, KCTD3, KLKB1, KYAT1, LAMC3, LDAH, LIMS2, MALT1, MAP3K7, MAPK13, MCAT, MCEE, MPI, MSTO1, NBEAL2, NLE1, NLRC5, NOM1, NOP58, NPHP1, NPR1, NUP188, OSGEP, PABPC4, PCOLCE, PHKA2, PIDD1, PKD1, PLA2G6, PLD2, PLEKHG5, PNPO, POLE, PON2, PRMT7, PRODH, PRPF3, PRPF4, PYCR1, RAD52, REXO1, RFX5, RHBDF2, RMND1, ROBO3, RPGRIP1, RTTN, RUFY3, SEMA3B, SEMA3F, SH2D3A, SIK3, SIRT3, SKIV2L, SLC2A13, SLC12A7, SLC22A3, SLC25A13, SLC25A37, SLC27A5, SLC30A9, SLC30A10, SMPD1, SMTN, SNRPB, SP140, STAMBP, STXBP2, SULF2, SYNGAP1, SYNJ2, TAZ, TBL2, TDRD7, TECPR2, TFB1M, TM6SF1, TNK2, TOE1, TOR1B, TRAPPC6B, TRIP4, TRMT2A, TRMU, TRPV4, TTC19, TYMP, UMPS, UROD, WDR11, WDR62, WIPI1, WRAP53, XPO1, YY1AP1, and ZC3H14. In some embodiments, the non-sense mediated RNA decay alternative exon (NSAE)-modulating agent is a composition described herein.

[0015] In some aspects, provided herein is a pharmaceutical composition comprising: a therapeutic agent comprising a composition described herein; and a pharmaceutically acceptable excipient and/or a delivery vehicle.

[0016] In some aspects, provided herein is a method of treating or preventing a disease or condition in a subject in need thereof, the method comprising: administering to the subject a pharmaceutical composition described herein.

[0017] In some aspects, provided herein is a method of treating or preventing a disease or condition in a subject in need thereof, the method comprising: administering to the subject a pharmaceutical composition comprising: (a) a non-sense mediated RNA decay alternative exon (NSAE)-modulating agent that interacts with a target motif within a pre-processed mRNA transcript to modulate exclusion of an NSAE from a processed mRNA transcript and to modulate inclusion of a canonical exon in the processed mRNA transcript, wherein the NSAE comprises (i) only a portion of a canonical exon, or (ii) a canonical exon and at least a portion of an intron adjacent to the canonical exon; and (b) a pharmaceutically acceptable excipient and/or a delivery vehicle, wherein the disease or condition is treated or prevented in the subject by the administration of the NSAE-modulating agent by a modulation in expression of a protein translated from the processed mRNA transcript.

[0018] In some aspects, provided herein is a method of treating a disease or condition in a subject in need thereof by modulating expression of a target protein in a cell of the subject, wherein the cell of the subject has a pre-processed mRNA transcript (pre-mRNA) that encodes the target protein and comprises: (a) an exon followed by an intron flanking a 3′ splice site of the exon; and (b) an alternative nonsense mediated RNA decay-inducing (NMD) exon comprising an alternative 3′ splice site upstream of the 3′ splice site of the exon and within the exon, or downstream of the 3′ splice site of the exon and within the intron, the method comprising contacting a therapeutic agent to the cell, wherein the therapeutic agent modulates processing of an mRNA transcript from the pre-processed mRNA transcript by modulating splicing of the pre-mRNA at the 3′ alternative splice site, and wherein the splicing of the pre-mRNA at the 3′ alternative splice site modulates the expression of the target protein in the cell of the subject.

[0019] In some aspects, provided herein is a method of treating a disease or condition in a subject in need thereof by modulating expression of a target protein in a cell of the subject, wherein the cell of the subject has a pre-processed mRNA transcript (pre-mRNA) that encodes the target protein and comprises: (a) an exon preceded by an intron flanking a 5′ splice site of the exon; and (b) an alternative nonsense mediated RNA decay-inducing (NMD) exon comprising an alternative 5′ splice site downstream of the 5′ splice site of the exon and within the exon, or upstream of the 5′ splice site of the exon and within the intron, the method comprising contacting a therapeutic agent to the cell, wherein the therapeutic agent modulates processing of an mRNA transcript from the pre-processed mRNA transcript by modulating splicing of the pre-mRNA at the 5′ alternative splice site, and wherein the splicing of the pre-mRNA at the 5′ alternative splice site modulates the expression of the target protein in the cell of the subject.

[0020] In some embodiments the disease is autosomal dominant mental retardation, epileptic encephalopathy, or autism. In some embodiments, the disease or the condition is caused by a deficient amount or activity of the target protein. In some embodiments, the therapeutic agent increases the level of the processed mRNA encoding the target protein in the cell. In some embodiments, the therapeutic agent increases the expression of the target protein in the cell. In some embodiments, the level of processed mRNA encoding the target protein in the cell contacted with the therapeutic agent is increased about 1.1 to about 10-fold, about 1.5 to about 10-fold, about 2 to about 10-fold, about 3 to about 10-fold, about 4 to about 10-fold, about 1.1 to about 5-fold, about 1.1 to about 6-fold, about 1.1 to about 7-fold, about 1.1 to about 8-fold, about 1.1 to about 9-fold, about 2 to about 5-fold, about 2 to about 6-fold, about 2 to about 7-fold, about 2 to about 8-fold, about 2 to about 9-fold, about 3 to about 6-fold, about 3 to about 7-fold, about 3 to about 8-fold, about 3 to about 9-fold, about 4 to about 7-fold, about 4 to about 8-fold, about 4 to about 9-fold, at least about 1.1-fold, at least about 1.5-fold, at least about 2-fold, at least about 2.5-fold, at least about 3-fold, at least about 3.5-fold, at least about 4-fold, at least about 5-fold, or at least about 10-fold, compared to the level of processed mRNA encoding the target protein in a control cell. In some embodiments, the level the target protein in the cell is increased about 1.1 to about 10-fold, about 1.5 to about 10-fold, about 2 to about 10-fold, about 3 to about 10-fold, about 4 to about 10-fold, about 1.1 to about 5-fold, about 1.1 to about 6-fold, about 1.1 to about 7-fold, about 1.1 to about 8-fold, about 1.1 to about 9-fold, about 2 to about 5-fold, about 2 to about 6-fold, about 2 to about 7-fold, about 2 to about 8-fold, about 2 to about 9-fold, about 3 to about 6-fold, about 3 to about 7-fold, about 3 to about 8-fold, about 3 to about 9-fold, about 4 to about 7-fold, about 4 to about 8-fold, about 4 to about 9-fold, at least about 1.1-fold, at least about 1.5-fold, at least about 2-fold, at least about 2.5-fold, at least about 3-fold, at least about 3.5-fold, at least about 4-fold, at least about 5-fold, or at least about 10-fold, compared to the level of processed mRNA encoding the target protein in a control cell. In some embodiments, the method further comprises assessing mRNA levels or expression levels of the target protein. In some embodiments, the method further comprises assessing the subject's genome for at least one genetic mutation associated with the disease.

[0021] In some embodiments, the disease or the condition is caused by an excess amount or activity of the target protein. In some embodiments, the therapeutic agent decreases the level of the processed mRNA encoding the target protein in the cell. In some embodiments, the therapeutic agent decreases the expression of the target protein in the cell. In some embodiments, the level of processed mRNA encoding the target protein in the cell contacted with the therapeutic agent is decreased about 1.1 to about 10-fold, about 1.5 to about 10-fold, about 2 to about 10-fold, about 3 to about 10-fold, about 4 to about 10-fold, about 1.1 to about 5-fold, about 1.1 to about 6-fold, about 1.1 to about 7-fold, about 1.1 to about 8-fold, about 1.1 to about 9-fold, about 2 to about 5-fold, about 2 to about 6-fold, about 2 to about 7-fold, about 2 to about 8-fold, about 2 to about 9-fold, about 3 to about 6-fold, about 3 to about 7-fold, about 3 to about 8-fold, about 3 to about 9-fold, about 4 to about 7-fold, about 4 to about 8-fold, about 4 to about 9-fold, at least about 1.1-fold, at least about 1.5-fold, at least about 2-fold, at least about 2.5-fold, at least about 3-fold, at least about 3.5-fold, at least about 4-fold, at least about 5-fold, or at least about 10-fold, compared to the level of processed mRNA encoding the target protein in a control cell. In some embodiments, the level the target protein in the cell is decreased about 1.1 to about 10-fold, about 1.5 to about 10-fold, about 2 to about 10-fold, about 3 to about 10-fold, about 4 to about 10-fold, about 1.1 to about 5-fold, about 1.1 to about 6-fold, about 1.1 to about 7-fold, about 1.1 to about 8-fold, about 1.1 to about 9-fold, about 2 to about 5-fold, about 2 to about 6-fold, about 2 to about 7-fold, about 2 to about 8-fold, about 2 to about 9-fold, about 3 to about 6-fold, about 3 to about 7-fold, about 3 to about 8-fold, about 3 to about 9-fold, about 4 to about 7-fold, about 4 to about 8-fold, about 4 to about 9-fold, at least about 1.1-fold, at least about 1.5-fold, at least about 2-fold, at least about 2.5-fold, at least about 3-fold, at least about 3.5-fold, at least about 4-fold, at least about 5-fold, or at least about 10-fold, compared to the level of processed mRNA encoding the target protein in a control cell.

[0022] In some embodiments, at least one genetic mutation is within a locus of a gene associated with the disease. In some embodiments, at least one genetic mutation is within a locus associated with expression of a gene associated with the disease. In some embodiments, at least one genetic mutation is within the SYNGAP1 gene locus. In some embodiments, at least one genetic mutation is within a locus associated with SYNGAP1 gene expression. In some embodiments, at least one genetic mutation is within a target gene locus, wherein the target gene locus is any one selected from the group consisting of ABCA5, ABCA7, ABCC3, ABCC5, ABCC8, ABCD1, ABR, ACAD9, ACAP1, ACOX2, ACSF3, ACTN4, ADAM17, ADAMTS13, AKR1E2, ALAD, ALG3, ANKRD29, ANKS3, ANO4, AP3B2, AP3M1, AP5Z1, ARNTL, ASAP3, ATRX, BBS2, BBS4, BRD9, CALM3, CARS1, CASP9, CATSPER1, CCDC40, CCDC88B, CD4, CD58, CES2, CHFR, CLCN2, CNOT3, CNTROB, COL5A3, CPSF1, CSPP1, CTF1, CTH, CYP3A5, DAB2IP, DBN1, DDX51, DEAF1, DGKE, DHDDS, DMKN, DNHD1, DOCK8, DOK5, EIF2B5, ELAC2, ELP1, ENTPD4, ESRRA, ESS2, ETAA1, ETHE1, FANCA, FASTK, FASTKD3, FPGS, FREM1, GAS8, GCK, GGA1, GGA3, GGT1, GLMN, GON4L, GRB14, HDAC3, HELQ, HP1BP3, HPS1, HPS4, IDUA, IFT122, IL17RC, IMPDH1, INVS, IRF3, KCTD3, KLKB1, KYAT1, LAMC3, LDAH, LIMS2, MALT1, MAP3K7, MAPK13, MCAT, MCEE, MPI, MSTO1, NBEAL2, NLE1, NLRC5, NOM1, NOP58, NPHP1, NPR1, NUP188, OSGEP, PABPC4, PCOLCE, PHKA2, PIDD1, PKD1, PLA2G6, PLD2, PLEKHG5, PNPO, POLE, PON2, PRMT7, PRODH, PRPF3, PRPF4, PYCR1, RAD52, REXO1, RFX5, RHBDF2, RMND1, ROBO3, RPGRIP1, RTTN, RUFY3, SEMA3B, SEMA3F, SH2D3A, SIK3, SIRT3, SKIV2L, SLC2A13, SLC12A7, SLC22A3, SLC25A13, SLC25A37, SLC27A5, SLC30A9, SLC30A10, SMPD1, SMTN, SNRPB, SP140, STAMBP, STXBP2, SULF2, SYNGAP1, SYNJ2, TAZ, TBL2, TDRD7, TECPR2, TFB1M, TM6SF1, TNK2, TOE1, TOR1B, TRAPPC6B, TRIP4, TRMT2A, TRMU, TRPV4, TTC19, TYMP, UMPS, UROD, WDR11, WDR62, WIPI1, WRAP53, XPO1, YY1AP1, and ZC3H14 gene locus. In some embodiments, at least one genetic mutation is within a locus associated with a target gene expression, wherein the target gene is any one selected from the group consisting of ABCA5, ABCA7, ABCC3, ABCC5, ABCC8, ABCD1, ABR, ACAD9, ACAP1, ACOX2, ACSF3, ACTN4, ADAM17, ADAMTS13, AKR1E2, ALAD, ALG3, ANKRD29, ANKS3, ANO4, AP3B2, AP3M1, AP5Z1, ARNTL, ASAP3, ATRX, BBS2, BBS4, BRD9, CALM3, CARS1, CASP9, CATSPER1, CCDC40, CCDC88B, CD4, CD58, CES2, CHFR, CLCN2, CNOT3, CNTROB, COL5A3, CPSF1, CSPP1, CTF1, CTH, CYP3A5, DAB2IP, DBN1, DDX51, DEAF1, DGKE, DHDDS, DMKN, DNHD1, DOCK8, DOK5, EIF2B5, ELAC2, ELP1, ENTPD4, ESRRA, ESS2, ETAA1, ETHE1, FANCA, FASTK, FASTKD3, FPGS, FREM1, GAS8, GCK, GGA1, GGA3, GGT1, GLMN, GON4L, GRB14, HDAC3, HELQ, HP1BP3, HPS1, HPS4, IDUA, IFT122, IL17RC, IMPDH1, INVS, IRF3, KCTD3, KLKB1, KYAT1, LAMC3, LDAH, LIMS2, MALT1, MAP3K7, MAPK13, MCAT, MCEE, MPI, MSTO1, NBEAL2, NLE1, NLRC5, NOM1, NOP58, NPHP1, NPR1, NUP188, OSGEP, PABPC4, PCOLCE, PHKA2, PIDD1, PKD1, PLA2G6, PLD2, PLEKHG5, PNPO, POLE, PON2, PRMT7, PRODH, PRPF3, PRPF4, PYCR1, RAD52, REXO1, RFX5, RHBDF2, RMND1, ROBO3, RPGRIP1, RTTN, RUFY3, SEMA3B, SEMA3F, SH2D3A, SIK3, SIRT3, SKIV2L, SLC2A13, SLC12A7, SLC22A3, SLC25A13, SLC25A37, SLC27A5, SLC30A9, SLC30A10, SMPD1, SMTN, SNRPB, SP140, STAMBP, STXBP2, SULF2, SYNGAP1, SYNJ2, TAZ, TBL2, TDRD7, TECPR2, TFB1M, TM6SF1, TNK2, TOE1, TOR1B, TRAPPC6B, TRIP4, TRMT2A, TRMU, TRPV4, TTC19, TYMP, UMPS, UROD, WDR11, WDR62, WIPI1, WRAP53, XPO1, YY1AP1, and ZC3H14 genes. In some embodiments, the subject is a human. In some embodiments, the subject is a non-human animal. In some embodiments, the subject is a fetus, an embryo, or a child. In some embodiments, the cell or the cells is ex vivo, or in a tissue, or organ ex vivo. In some embodiments, the therapeutic agent is administered to the subject by intracerebroventricular injection, intraperitoneal injection, intramuscular injection, intrathecal injection, subcutaneous injection, oral administration, synovial injection, intravitreal administration, subretinal injection, topical application, implantation, or intravenous injection.

[0023] In some aspects, provided herein is a therapeutic agent for use in a method described herein.

[0024] In some aspects, provided herein is a pharmaceutical composition comprising a therapeutic agent described herein and a pharmaceutically acceptable excipient.

[0025] In some aspects, provided herein is a method of treating a subject in need thereof, comprising administering a pharmaceutical composition described herein by intracerebroventricular injection, intraperitoneal injection, intramuscular injection, intrathecal injection, subcutaneous injection, oral administration, synovial injection, intravitreal administration, subretinal injection, topical application, implantation, or intravenous injection to the subject.

### BRIEF DESCRIPTION OF THE DRAWINGS

[0026] FIG. 1A depicts an exemplary schematic depicting a wild type cell expressing a pre-mRNA that is alternatively spliced to generate a productive mRNA and a non-productive mRNA. While the non-productive mRNA is degraded by NMD, the productive mRNA is translated into normal protein levels.

[0027] FIG. 1B depicts an exemplary schematic depicting a wild type cell treated with a TANGO (Targeted Augmentation of Nuclear Gene Output) ASO targeting the non-productive AS event (e.g. exon inclusion) that prevents the inclusion of the non-productive exon and leads to an increase of the productive mRNA. Increased level of the productive mRNA results in increased protein level beyond 100%.

[0028] FIG. 1C depicts an exemplary schematic depicting an example of a haploinsufficient cell containing a wild-type allele (orange) and a mutant allele (red). Both alleles express a pre-mRNA that is alternatively spliced to generate a productive mRNA and a non-productive mRNA. While the non-productive mRNAs are degraded by NMD, the productive mRNA from the wild-type allele generates 50% of normal protein levels leading to disease.

[0029] FIG. 1D depicts an exemplary schematic depicting an example of a haploinsufficient cell treated with a TANGO ASO targeting the non-productive AS event (e.g. exon inclusion) that prevents the inclusion of the non-productive exon and leads to an increase of the productive mRNA from both alleles. While the mutant mRNA won't produce a functional protein, increased levels of the wild type productive mRNA restores the protein level back to normal.

[0030] FIG. 1E depicts an exemplary schematic depicting an alternative 5′ ss of an exon (Exon B) (which corresponds to an alternative 3′ ss of the intron preceding the exon (Intron A). In this example, the alternative exon is longer than the corresponding canonical exon and the alternative intron is shorter than the corresponding canonical intron.

[0031] FIG. 1F depicts an exemplary schematic depicting an alternative 5′ ss of an exon (Exon B) (which corresponds to an alternative 3′ ss of the intron preceding the exon (Intron A). In this example, the alternative exon is shorter than the corresponding canonical exon and the alternative intron is longer than the corresponding canonical intron.

[0032] FIG. 1G depicts an exemplary schematic depicting an alternative 3′ ss of an exon (Exon B) (which corresponds to an alternative 5′ ss of the intron following the exon (Intron B). In this example, the alternative exon is longer than the corresponding canonical exon and the alternative intron is shorter than the corresponding canonical intron.

[0033] FIG. 1H depicts an exemplary schematic depicting an alternative 3′ ss of an exon (Exon B) (which corresponds to an alternative 5′ ss of the intron following the exon (Intron B). In this example, the alternative exon is shorter than the corresponding canonical exon and the alternative intron is longer than the corresponding canonical intron.

[0034] FIG. 2 depicts examples of non-productive alternative splicing events that are predicted to lead to premature termination codons and undergo non-sense mediated decay of processed mRNA transcripts. The left panel depicts the types of alternative splicing events (cassette exons, alternative splice sites, and alternative intron) that are predicted to lead to the introduction of a premature termination codon (PTC) and transcript degradation. The horizontal bar graph summarizes the number of protein-coding genes containing each of the non-productive alternative splicing event type. Non-disease-associated genes are depicted by the top bars and disease-associated genes are depicted by bottom bars (based on Orphanet disease database). Exons are denoted by rectangles and introns by lines. Dark gray rectangles or lines denote a non-productive alternative splicing region.

[0035] FIG. 3 depicts an exemplary schematic representation of SYNGAP1 NMD-inducing alternative 3′ splice site of an intron (which corresponds to an alternative 5′ ss of the exon downstream of the alternative intron). NMD-inducing alt 3′ss event: UCSC Genome Browser snapshot of a region in the SYNGAP1 gene (exons are rectangles and introns are lines with arrowheads) that contains an NMD-inducing Alternative 3′ splice site event (chr6 3344055333440728) depicted by the shaded area and black bar on the top. RNA sequencing traces from human middle frontal gyrus samples from individuals at various ages and proliferating or differentiated RenCellVM cells treated with cycloheximide (CHX) or DMSO control are shown.

[0036] FIG. 4 depicts an exemplary ASO walk design. The shaded nucleotides correspond to the portion of the extended exon 11 of SYNGAP1 that results from the selection of the indicated Alt 3′ss of the intron (which corresponds to the alternative 5′ ss of the exon downstream of the alternative intron). Figure discloses SEQ ID NOs: 10226-10228, respectively, in order of appearance.

[0037] FIGS. 5A-5C depict graphs showing exemplary ASO walk Taqman qPCR results, e.g., ASO screening by Tagman qPCR.

[0038] FIG. 5A depicts exemplary Taqman qPCR results using RNA from HEK293 cells transfected for 24 hrs with 80 nM ASOs from region 1 depicted in FIG. 4. The exemplary Taqman probe spans exons 10 and 11 junction and measures productive mRNA.

[0039] FIG. 5B depicts exemplary Taqman qPCR results using RNA from HEK293 cells transfected for 24 hrs with 80 nM ASOs from region 2 depicted in FIG. 4. The exemplary Taqman probe spans exons 10 and 11 junction and measures productive mRNA.

[0040] FIG. 5C depicts exemplary Taqman qPCR results using RNA from HEK293 cells transfected for 24 hrs with 80 nM ASOs from region 3 depicted in FIG. 4. The exemplary Taqman probe spans exons 10 and 11 junction and measures productive mRNA.

[0041] FIG. 6 depicts the use of antisense oligomers to modulate non-productive alternative splicing events and increase mRNA and protein levels in a dose-dependent manner in vitro. A selected SYNGAP1 ASO targeting an alternative 3′ splice site event was transfected in HEK293 (human embryonic kidney cell) cells at increasing concentrations for 24h and RT-PCR (reverse transcription polymerase chain reaction) and TaqMan qPCR (quantitative polymerase chain reaction) was performed. The bar graph on the left shows a dose-dependent reduction of the non-productive mRNA and the bar graph on the right shows a dose-dependent increase of productive mRNA. A Western blot and protein quantification for SynGAP from HEK293 cells treated with the respective selected ASOs at increasing concentrations for 48 hrs is shown on the right. Equal protein loading was confirmed with Ponceau staining. Fc=fold change over control.

[0042] FIG. 7 depicts exemplary RT-PCR and densitometric quantifications of RT-PCR validation in cells treated with 50 pg/mL of cycloheximide (CHX) or equal volume of DMSO (Dimethyl sulfoxide) for 3 hours for SYNGAP1.

[0043] FIG. 8 depicts the dose-dependent effect of antisense oligomers that modulate non-productive alternative splicing events. A representative RT-PCR PAGE (polyacrylamide gel electrophoresis) of cells transfected with increasing concentrations of selected antisense oligomers targeting an alternative 3′ss in SYNGAP1 is depicted.

[0044] FIG. 9 depicts an exemplary Western blot of SynGAP following treatment with 100 nM siRNA against SYNGAP1 for 48 hours in HEK293 cells.

[0045] FIGS. 10A-10D depict an exemplary schematic representation, pictures and a graph showing validation of alternative 3′ splice site event of an intron (intron 10) (which corresponds to an alternative 5′ ss of the exon downstream of the alternative intron (exon 11)). *Mouse event has a different size than human event.

[0046] FIG. 10A depicts an exemplary schematic representation of an alternative 3′ splice site (Alt 3′ss) event of an intron in SYNGAP1 (intron 10) (which corresponds to an alternative 5′ ss of the exon downstream of the alternative intron (exon 11)).

[0047] FIG. 10B depicts exemplary results of RT-PCR to SYNGAP1 using RNA from RenCellsVM (Neural progenitor cells) or Neuro 2A (mouse neuroblastoma cells) treated with either DMSO (−) or cycloheximide (CHX) (+). Primers were positioned in exon 10 and 11.

[0048] FIG. 10C depicts exemplary results of RT-PCR to SYNGAP1 using RNA from total mouse brain. Primers were positioned in exon 10 and 11.

[0049] FIG. 10D depicts an exemplary quantification of the RT-PCR SYNGAP1 products using RNA from various non-human primates brain regions plotted as percentage of Alt intron 3′ss isoform (Alt downstream exon 5′ss isoform) (Alt intron 3′ss isoform/(Alt intron 3′ss isoform+productive mRNA)*100, i.e. Alt downstream exon 5′ss isoform/(Alt downstream exon 5′ss isoform+productive mRNA).

[0050] FIGS. 11A-11C depict graphs and pictures showing that an exemplary ASO prevents Alt 3′ss selection and increases SYNGAP1 mRNA and protein.

[0051] FIG. 11A and FIG. 11B depict exemplary RT-PCR results showing reduction of SYNGAP1 Alt 3′ss isoform and exemplary Tagman qPCR results showing increase of productive mRNA, respectively.

[0052] FIG. 11A shows quantification of the RT-PCR products using RNA from HEK293 cells transfected for 24 hrs with selected ASO #1 from region 2 plotted as percentage of Alt intron 3′ss isoform (Alt downstream exon 5′ss isoform) (Alt intron 3′ss isoform/(Alt intron 3′ss isoform+productive mRNA)*100, i.e. Alt downstream exon 5′ss isoform/(Alt downstream exon 5′ss isoform+productive mRNA). Primers were positioned in exons 10 and 11. N=2. NT=non-targeting ASO control.

[0053] FIG. 11B shows Taqman qPCR results using a probe that spans the exon 10-11 junction that measures productive mRNA plotted as fold change over no ASO control (−) using the same samples as in FIG. 11A. N=2. NT=non-targeting ASO control.

[0054] FIG. 11C depicts exemplary Western blot results showing increase of SynGAP protein. FIG. 11C shows Western blot analysis using whole cell lysate from HEK293 cells transfected for 48 hrs with a selected ASO. Quantification of bands corresponding to SynGAP were normalized to Ponceau loading control and fold change (fc) over control (−) is shown under the gel.

[0055] FIGS. 12A-12E depict pictures and graphs showing that exemplary selected MOE (2-methoxyethyl)) lengthmers and PMOs (phosphorodiamidate morpholinos) prevent Alt intron 3′ss selection (Alt downstream exon 5′ss selection) and increase SYNGAP1 mRNA and protein.

[0056] FIG. 12A and FIG. 12B depict exemplary RT-PCR results showing reduction of SYNGAP1 Alt intron 3′ss isoform (Alt downstream exon 5′ss isoform).

[0057] FIG. 12A shows RT-PCR results using RNA from MEF (mouse embryonic fibroblasts) nucleofected for 24 hrs with selected MOE #5 from region 1 and derivative MOE lengthmers and PMOs. Primers were positioned in exons 10 and 11.

[0058] FIG. 12B shows quantifications of RT-PCR products shown in FIG. 12A plotted as percentage of Alt intron 3′ss isoform (Alt downstream exon 5′ss isoform) (Alt intron 3′ss isoform/(Alt intron 3′ss isoform+productive mRNA)*100, i.e. Alt downstream exon 5′ss isoform/(Alt downstream exon 5′ss isoform+productive mRNA). N=2. −=no ASO control.

[0059] FIG. 12C depicts exemplary Tagman qPCR results showing increase of productive mRNA. FIG. 12C shows Taqman qPCR results using a probe that spans the exon 10-11 junction that measures productive mRNA plotted as fold change over no ASO control (−) using the same samples as in FIG. 12A. N=2. −=no ASO control.

[0060] FIG. 12D and FIG. 12E depict exemplary Western blot results showing increase of SynGAP protein.

[0061] FIG. 12D shows Western blot analysis using whole cell lysate from MEFs nucleofected for 48 hrs with selected ASO #5 (MOE) and #29 (PMO) I.

[0062] FIG. 12E shows quantification of bands corresponding to SynGAP normalized to Ponceau loading control and plotted as fold change (fc) over control (−). N=2. −=no ASO control.

### DETAILED DESCRIPTION

[0063] Certain specific details of this description are set forth in order to provide a thorough understanding of various embodiments. However, one skilled in the art will understand that the present disclosure may be practiced without these details. In other instances, well-known structures have not been shown or described in detail to avoid unnecessarily obscuring descriptions of the embodiments. Unless the context requires otherwise, throughout the specification and claims which follow, the word “comprise” and variations thereof, such as, “comprises” and “comprising” are to be construed in an open, inclusive sense, that is, as “including, but not limited to.” Further, headings provided herein are for convenience only and do not interpret the scope or meaning of the claimed disclosure.

[0064] As used in this specification and the appended claims, the singular forms “a,” “an,” and “the” include plural referents unless the content clearly dictates otherwise. It should also be noted that the term “or” is generally employed in its sense including “and/or” unless the content clearly dictates otherwise.

[0065] The coordinate as used herein refers to the coordinate of the genome reference assembly GRCh38 (Genome Research Consortium human build 38), also known as Hg38 (Human genome build 38).

[0066] Unless otherwise defined, all technical and scientific terms used herein have the same meaning as commonly understood by one of ordinary skill in the art to which this disclosure belongs. Although methods and materials similar or equivalent to those described herein can be used in the practice or testing of the present disclosure, suitable methods and materials are described below.

[0067] As used herein, an alternative 3′ splice site of an intron is equivalent to an alternative 5′ splice site of the exon immediately downstream of that intron.

[0068] As used herein, an alternative 5′ splice site of an intron is equivalent to an alternative 3′ splice site of the exon immediately upstream of that intron.

### Autosomal Dominant Mental Retardation and SYNGAP1 Gene

[0069] Autosomal dominant mental retardation is an autosomal dominant neurodevelopmental disorder characterized by significantly impaired intellectual functioning and adaptive behaviors, one cause of which is haploinsufficency of SYNGAP1 gene expression. SYNGAP1 codes for SYNGAP1 protein, which is a ras GTPase-activating protein involved in cognitive development and proper synapse function amongst neurons. SYNGAP1 is known to be involved in synaptic plasticity, axon formation, and AMPA receptor trafficking. Generally, SYNGAP1 activity is essential for development and survival. SYNGAP1 deficiencies may be caused by sporadic mutation or alternative splicing events. Deficient SYNGAP1 activity may result in mental retardation, or intellectual disability, epileptic encephalopathy, or autism.

[0070] The present disclosure provides compositions and methods for modulating alternative splicing of SYNGAP1 to modulate the production of functional protein-coding mature mRNA, and thus, translated functional SYNGAP1 protein. These compositions and methods include antisense oligomers (ASOs) that can promote canonical splicing of SYNGAP1 pre-mRNA. In various embodiments, functional SYNGAP1 protein can be increased using the methods of the disclosure to treat a condition caused by SYNGAP1 protein deficiency. In some embodiments, the condition is autosomal dominant mental retardation. In other embodiments, the condition is epileptic encephalopathy or autism.

[0071] In some embodiments, the methods of the invention are used to increase functional SYNGAP1 protein production to treat a condition in a subject in need thereof. In some embodiments, the subject has a condition in which SYNGAP1 is not necessarily deficient relative to wild-type, but where an increase in SYNGAP1 mitigates the condition nonetheless. In some embodiments, the condition is caused by sporadic mutation. In some embodiments, the methods of the invention are used to reduce functional SYNGAP1 protein production to treat a condition in a subject in need thereof. In some embodiments, the methods of the invention are used to modulate functional SYNGAP1 protein production to treat a condition in a subject in need thereof.

### Target Genes

[0072] The present disclosure provides compositions and methods for modulating alternative splicing of a target to modulate the production of functional protein-coding mature mRNA, and thus, translated functional the target protein, wherein the target is any one selected from the group consisting of ABCA5, ABCA7, ABCC3, ABCC5, ABCC8, ABCD1, ABR, ACAD9, ACAP1, ACOX2, ACSF3, ACTN4, ADAM17, ADAMTS13, AKR1E2, ALAD, ALG3, ANKRD29, ANKS3, ANO4, AP3B2, AP3M1, AP5Z1, ARNTL, ASAP3, ATRX, BBS2, BBS4, BRD9, CALM3, CARS1, CASP9, CATSPER1, CCDC40, CCDC88B, CD4, CD58, CES2, CHFR, CLCN2, CNOT3, CNTROB, COL5A3, CPSF1, CSPP1, CTF1, CTH, CYP3A5, DAB2IP, DBN1, DDX51, DEAF1, DGKE, DHDDS, DMKN, DNHD1, DOCK8, DOK5, EIF2B5, ELAC2, ELP1, ENTPD4, ESRRA, ESS2, ETAA1, ETHE1, FANCA, FASTK, FASTKD3, FPGS, FREM1, GAS8, GCK, GGA1, GGA3, GGT1, GLMN, GON4L, GRB14, HDAC3, HELQ, HP1BP3, HPS1, HPS4, IDUA, IFT122, IL17RC, IMPDH1, INVS, IRF3, KCTD3, KLKB1, KYAT1, LAMC3, LDAH, LIMS2, MALT1, MAP3K7, MAPK13, MCAT, MCEE, MPI, MSTO1, NBEAL2, NLE1, NLRC5, NOM1, NOP58, NPHP1, NPR1, NUP188, OSGEP, PABPC4, PCOLCE, PHKA2, PIDD1, PKD1, PLA2G6, PLD2, PLEKHG5, PNPO, POLE, PON2, PRMT7, PRODH, PRPF3, PRPF4, PYCR1, RAD52, REXO1, RFX5, RHBDF2, RMND1, ROBO3, RPGRIP1, RTTN, RUFY3, SEMA3B, SEMA3F, SH2D3A, SIK3, SIRT3, SKIV2L, SLC2A13, SLC12A7, SLC22A3, SLC25A13, SLC25A37, SLC27A5, SLC30A9, SLC30A10, SMPD1, SMTN, SNRPB, SP140, STAMBP, STXBP2, SULF2, SYNGAP1, SYNJ2, TAZ, TBL2, TDRD7, TECPR2, TFB1M, TM6SF1, TNK2, TOE1, TOR1B, TRAPPC6B, TRIP4, TRMT2A, TRMU, TRPV4, TTC19, TYMP, UMPS, UROD, WDR11, WDR62, WIPI1, WRAP53, XPO1, YY1AP1, and ZC3H14. These compositions and methods include antisense oligomers (ASOs) that can promote canonical splicing of the target pre-mRNA, wherein the target is any one selected from the group consisting of ABCA5, ABCA7, ABCC3, ABCC5, ABCC8, ABCD1, ABR, ACAD9, ACAP1, ACOX2, ACSF3, ACTN4, ADAM17, ADAMTS13, AKR1E2, ALAD, ALG3, ANKRD29, ANKS3, ANO4, AP3B2, AP3M1, AP5Z1, ARNTL, ASAP3, ATRX, BBS2, BBS4, BRD9, CALM3, CARS1, CASP9, CATSPER1, CCDC40, CCDC88B, CD4, CD58, CES2, CHFR, CLCN2, CNOT3, CNTROB, COL5A3, CPSF1, CSPP1, CTF1, CTH, CYP3A5, DAB2IP, DBN1, DDX51, DEAF1, DGKE, DHDDS, DMKN, DNHD1, DOCK8, DOK5, EIF2B5, ELAC2, ELP1, ENTPD4, ESRRA, ESS2, ETAA1, ETHE1, FANCA, FASTK, FASTKD3, FPGS, FREM1, GAS8, GCK, GGA1, GGA3, GGT1, GLMN, GON4L, GRB14, HDAC3, HELQ, HP1BP3, HPS1, HPS4, IDUA, IFT122, IL17RC, IMPDH1, INVS, IRF3, KCTD3, KLKB1, KYAT1, LAMC3, LDAH, LIMS2, MALT1, MAP3K7, MAPK13, MCAT, MCEE, MPI, MSTO1, NBEAL2, NLE1, NLRC5, NOM1, NOP58, NPHP1, NPR1, NUP188, OSGEP, PABPC4, PCOLCE, PHKA2, PIDD1, PKD1, PLA2G6, PLD2, PLEKHG5, PNPO, POLE, PON2, PRMT7, PRODH, PRPF3, PRPF4, PYCR1, RAD52, REXO1, RFX5, RHBDF2, RMND1, ROBO3, RPGRIP1, RTTN, RUFY3, SEMA3B, SEMA3F, SH2D3A, SIK3, SIRT3, SKIV2L, SLC2A13, SLC12A7, SLC22A3, SLC25A13, SLC25A37, SLC27A5, SLC30A9, SLC30A10, SMPD1, SMTN, SNRPB, SP140, STAMBP, STXBP2, SULF2, SYNGAP1, SYNJ2, TAZ, TBL2, TDRD7, TECPR2, TFB1M, TM6SF1, TNK2, TOE1, TOR1B, TRAPPC6B, TRIP4, TRMT2A, TRMU, TRPV4, TTC19, TYMP, UMPS, UROD, WDR11, WDR62, WIPI1, WRAP53, XPO1, YY1AP1, and ZC3H14. In various embodiments, functional target protein can be increased using the methods of the disclosure to treat a condition caused by target protein deficiency, wherein the target is any one selected from the group consisting of ABCA5, ABCA7, ABCC3, ABCC5, ABCC8, ABCD1, ABR, ACAD9, ACAP1, ACOX2, ACSF3, ACTN4, ADAM17, ADAMTS13, AKR1E2, ALAD, ALG3, ANKRD29, ANKS3, ANO4, AP3B2, AP3M1, AP5Z1, ARNTL, ASAP3, ATRX, BBS2, BBS4, BRD9, CALM3, CARS1, CASP9, CATSPER1, CCDC40, CCDC88B, CD4, CD58, CES2, CHFR, CLCN2, CNOT3, CNTROB, COL5A3, CPSF1, CSPP1, CTF1, CTH, CYP3A5, DAB2IP, DBN1, DDX51, DEAF1, DGKE, DHDDS, DMKN, DNHD1, DOCK8, DOK5, EIF2B5, ELAC2, ELP1, ENTPD4, ESRRA, ESS2, ETAA1, ETHE1, FANCA, FASTK, FASTKD3, FPGS, FREM1, GAS8, GCK, GGA1, GGA3, GGT1, GLMN, GON4L, GRB14, HDAC3, HELQ, HP1BP3, HPS1, HPS4, IDUA, IFT122, IL17RC, IMPDH1, INVS, IRF3, KCTD3, KLKB1, KYAT1, LAMC3, LDAH, LIMS2, MALT1, MAP3K7, MAPK13, MCAT, MCEE, MPI, MSTO1, NBEAL2, NLE1, NLRC5, NOM1, NOP58, NPHP1, NPR1, NUP188, OSGEP, PABPC4, PCOLCE, PHKA2, PIDD1, PKD1, PLA2G6, PLD2, PLEKHG5, PNPO, POLE, PON2, PRMT7, PRODH, PRPF3, PRPF4, PYCR1, RAD52, REXO1, RFX5, RHBDF2, RMND1, ROBO3, RPGRIP1, RTTN, RUFY3, SEMA3B, SEMA3F, SH2D3A, SIK3, SIRT3, SKIV2L, SLC2A13, SLC12A7, SLC22A3, SLC25A13, SLC25A37, SLC27A5, SLC30A9, SLC30A10, SMPD1, SMTN, SNRPB, SP140, STAMBP, STXBP2, SULF2, SYNGAP1, SYNJ2, TAZ, TBL2, TDRD7, TECPR2, TFB1M, TM6SF1, TNK2, TOE1, TOR1B, TRAPPC6B, TRIP4, TRMT2A, TRMU, TRPV4, TTC19, TYMP, UMPS, UROD, WDR11, WDR62, WIPI1, WRAP53, XPO1, YY1AP1, and ZC3H14. In some embodiments, the condition is autosomal dominant mental retardation. In other embodiments, the condition is epileptic encephalopathy or autism.

[0073] In some embodiments, the methods of the invention are used to increase functional the target protein production to treat a condition in a subject in need thereof, wherein the target is any one selected from the group consisting of ABCA5, ABCA7, ABCC3, ABCC5, ABCC8, ABCD1, ABR, ACAD9, ACAP1, ACOX2, ACSF3, ACTN4, ADAM17, ADAMTS13, AKR1E2, ALAD, ALG3, ANKRD29, ANKS3, ANO4, AP3B2, AP3M1, AP5Z1, ARNTL, ASAP3, ATRX, BBS2, BBS4, BRD9, CALM3, CARS1, CASP9, CATSPER1, CCDC40, CCDC88B, CD4, CD58, CES2, CHFR, CLCN2, CNOT3, CNTROB, COL5A3, CPSF1, CSPP1, CTF1, CTH, CYP3A5, DAB2IP, DBN1, DDX51, DEAF1, DGKE, DHDDS, DMKN, DNHD1, DOCK8, DOK5, EIF2B5, ELAC2, ELP1, ENTPD4, ESRRA, ESS2, ETAA1, ETHE1, FANCA, FASTK, FASTKD3, FPGS, FREM1, GAS8, GCK, GGA1, GGA3, GGT1, GLMN, GON4L, GRB14, HDAC3, HELQ, HP1BP3, HPS1, HPS4, IDUA, IFT122, IL17RC, IMPDH1, INVS, IRF3, KCTD3, KLKB1, KYAT1, LAMC3, LDAH, LIMS2, MALT1, MAP3K7, MAPK13, MCAT, MCEE, MPI, MSTO1, NBEAL2, NLE1, NLRC5, NOM1, NOP58, NPHP1, NPR1, NUP188, OSGEP, PABPC4, PCOLCE, PHKA2, PIDD1, PKD1, PLA2G6, PLD2, PLEKHG5, PNPO, POLE, PON2, PRMT7, PRODH, PRPF3, PRPF4, PYCR1, RAD52, REXO1, RFX5, RHBDF2, RMND1, ROBO3, RPGRIP1, RTTN, RUFY3, SEMA3B, SEMA3F, SH2D3A, SIK3, SIRT3, SKIV2L, SLC2A13, SLC12A7, SLC22A3, SLC25A13, SLC25A37, SLC27A5, SLC30A9, SLC30A10, SMPD1, SMTN, SNRPB, SP140, STAMBP, STXBP2, SULF2, SYNGAP1, SYNJ2, TAZ, TBL2, TDRD7, TECPR2, TFB1M, TM6SF1, TNK2, TOE1, TOR1B, TRAPPC6B, TRIP4, TRMT2A, TRMU, TRPV4, TTC19, TYMP, UMPS, UROD, WDR11, WDR62, WIPI1, WRAP53, XPO1, YY1AP1, and ZC3H14. In some embodiments, the subject has a condition in which the target protein is not necessarily deficient relative to wild-type, but where an increase in the target protein mitigates the condition nonetheless, wherein the target is any one selected from the group consisting of ABCA5, ABCA7, ABCC3, ABCC5, ABCC8, ABCD1, ABR, ACAD9, ACAP1, ACOX2, ACSF3, ACTN4, ADAM17, ADAMTS13, AKR1E2, ALAD, ALG3, ANKRD29, ANKS3, ANO4, AP3B2, AP3M1, AP5Z1, ARNTL, ASAP3, ATRX, BBS2, BBS4, BRD9, CALM3, CARS1, CASP9, CATSPER1, CCDC40, CCDC88B, CD4, CD58, CES2, CHFR, CLCN2, CNOT3, CNTROB, COL5A3, CPSF1, CSPP1, CTF1, CTH, CYP3A5, DAB2IP, DBN1, DDX51, DEAF1, DGKE, DHDDS, DMKN, DNHD1, DOCK8, DOK5, EIF2B5, ELAC2, ELP1, ENTPD4, ESRRA, ESS2, ETAA1, ETHE1, FANCA, FASTK, FASTKD3, FPGS, FREM1, GAS8, GCK, GGA1, GGA3, GGT1, GLMN, GON4L, GRB14, HDAC3, HELQ, HP1BP3, HPS1, HPS4, IDUA, IFT122, IL17RC, IMPDH1, INVS, IRF3, KCTD3, KLKB1, KYAT1, LAMC3, LDAH, LIMS2, MALT1, MAP3K7, MAPK13, MCAT, MCEE, MPI, MSTO1, NBEAL2, NLE1, NLRC5, NOM1, NOP58, NPHP1, NPR1, NUP188, OSGEP, PABPC4, PCOLCE, PHKA2, PIDD1, PKD1, PLA2G6, PLD2, PLEKHG5, PNPO, POLE, PON2, PRMT7, PRODH, PRPF3, PRPF4, PYCR1, RAD52, REXO1, RFX5, RHBDF2, RMND1, ROBO3, RPGRIP1, RTTN, RUFY3, SEMA3B, SEMA3F, SH2D3A, SIK3, SIRT3, SKIV2L, SLC2A13, SLC12A7, SLC22A3, SLC25A13, SLC25A37, SLC27A5, SLC30A9, SLC30A10, SMPD1, SMTN, SNRPB, SP140, STAMBP, STXBP2, SULF2, SYNGAP1, SYNJ2, TAZ, TBL2, TDRD7, TECPR2, TFB1M, TM6SF1, TNK2, TOE1, TOR1B, TRAPPC6B, TRIP4, TRMT2A, TRMU, TRPV4, TTC19, TYMP, UMPS, UROD, WDR11, WDR62, WIPI1, WRAP53, XPO1, YY1AP1, and ZC3H14. In some embodiments, the condition is caused by sporadic mutation. In some embodiments, the methods of the invention are used to reduce functional target protein production to treat a condition in a subject in need thereof, wherein the target is any one selected from the group consisting of ABCA5, ABCA7, ABCC3, ABCC5, ABCC8, ABCD1, ABR, ACAD9, ACAP1, ACOX2, ACSF3, ACTN4, ADAM17, ADAMTS13, AKR1E2, ALAD, ALG3, ANKRD29, ANKS3, ANO4, AP3B2, AP3M1, AP5Z1, ARNTL, ASAP3, ATRX, BBS2, BBS4, BRD9, CALM3, CARS1, CASP9, CATSPER1, CCDC40, CCDC88B, CD4, CD58, CES2, CHFR, CLCN2, CNOT3, CNTROB, COL5A3, CPSF1, CSPP1, CTF1, CTH, CYP3A5, DAB2IP, DBN1, DDX51, DEAF1, DGKE, DHDDS, DMKN, DNHD1, DOCK8, DOK5, EIF2B5, ELAC2, ELP1, ENTPD4, ESRRA, ESS2, ETAA1, ETHE1, FANCA, FASTK, FASTKD3, FPGS, FREM1, GAS8, GCK, GGA1, GGA3, GGT1, GLMN, GON4L, GRB14, HDAC3, HELQ, HP1BP3, HPS1, HPS4, IDUA, IFT122, IL17RC, IMPDH1, INVS, IRF3, KCTD3, KLKB1, KYAT1, LAMC3, LDAH, LIMS2, MALT1, MAP3K7, MAPK13, MCAT, MCEE, MPI, MSTO1, NBEAL2, NLE1, NLRC5, NOM1, NOP58, NPHP1, NPR1, NUP188, OSGEP, PABPC4, PCOLCE, PHKA2, PIDD1, PKD1, PLA2G6, PLD2, PLEKHG5, PNPO, POLE, PON2, PRMT7, PRODH, PRPF3, PRPF4, PYCR1, RAD52, REXO1, RFX5, RHBDF2, RMND1, ROBO3, RPGRIP1, RTTN, RUFY3, SEMA3B, SEMA3F, SH2D3A, SIK3, SIRT3, SKIV2L, SLC2A13, SLC12A7, SLC22A3, SLC25A13, SLC25A37, SLC27A5, SLC30A9, SLC30A10, SMPD1, SMTN, SNRPB, SP140, STAMBP, STXBP2, SULF2, SYNGAP1, SYNJ2, TAZ, TBL2, TDRD7, TECPR2, TFB1M, TM6SF1, TNK2, TOE1, TOR1B, TRAPPC6B, TRIP4, TRMT2A, TRMU, TRPV4, TTC19, TYMP, UMPS, UROD, WDR11, WDR62, WIPI1, WRAP53, XPO1, YY1AP1, and ZC3H14. In some embodiments, the methods of the invention are used to modulate functional target protein production to treat a condition in a subject in need thereof, wherein the target is any one selected from the group consisting of ABCA5, ABCA7, ABCC3, ABCC5, ABCC8, ABCD1, ABR, ACAD9, ACAP1, ACOX2, ACSF3, ACTN4, ADAM17, ADAMTS13, AKR1E2, ALAD, ALG3, ANKRD29, ANKS3, ANO4, AP3B2, AP3M1, AP5Z1, ARNTL, ASAP3, ATRX, BBS2, BBS4, BRD9, CALM3, CARS1, CASP9, CATSPER1, CCDC40, CCDC88B, CD4, CD58, CES2, CHFR, CLCN2, CNOT3, CNTROB, COL5A3, CPSF1, CSPP1, CTF1, CTH, CYP3A5, DAB2IP, DBN1, DDX51, DEAF1, DGKE, DHDDS, DMKN, DNHD1, DOCK8, DOK5, EIF2B5, ELAC2, ELP1, ENTPD4, ESRRA, ESS2, ETAA1, ETHE1, FANCA, FASTK, FASTKD3, FPGS, FREM1, GAS8, GCK, GGA1, GGA3, GGT1, GLMN, GON4L, GRB14, HDAC3, HELQ, HP1BP3, HPS1, HPS4, IDUA, IFT122, IL17RC, IMPDH1, INVS, IRF3, KCTD3, KLKB1, KYAT1, LAMC3, LDAH, LIMS2, MALT1, MAP3K7, MAPK13, MCAT, MCEE, MPI, MSTO1, NBEAL2, NLE1, NLRC5, NOM1, NOP58, NPHP1, NPR1, NUP188, OSGEP, PABPC4, PCOLCE, PHKA2, PIDD1, PKD1, PLA2G6, PLD2, PLEKHG5, PNPO, POLE, PON2, PRMT7, PRODH, PRPF3, PRPF4, PYCR1, RAD52, REXO1, RFX5, RHBDF2, RMND1, ROBO3, RPGRIP1, RTTN, RUFY3, SEMA3B, SEMA3F, SH2D3A, SIK3, SIRT3, SKIV2L, SLC2A13, SLC12A7, SLC22A3, SLC25A13, SLC25A37, SLC27A5, SLC30A9, SLC30A10, SMPD1, SMTN, SNRPB, SP140, STAMBP, STXBP2, SULF2, SYNGAP1, SYNJ2, TAZ, TBL2, TDRD7, TECPR2, TFB1M, TM6SF1, TNK2, TOE1, TOR1B, TRAPPC6B, TRIP4, TRMT2A, TRMU, TRPV4, TTC19, TYMP, UMPS, UROD, WDR11, WDR62, WIPI1, WRAP53, XPO1, YY1AP1, and ZC3H14.

### Splicing

[0074] Intervening sequences or introns are removed by a large and highly dynamic RNA-protein complex termed the spliceosome, which orchestrates complex interactions between primary transcripts, small nuclear RNAs (snRNAs) and a large number of proteins. Spliceosomes assemble ad hoc on each intron in an ordered manner, starting with recognition of the 5′ splice site (5′ss) by U1 snRNA or the 3′splice site (3′ss), which involves binding of the U2 auxiliary factor (U2AF) to the 3′ss region to facilitate U2 snRNA binding to the branch point sequence (BPS). U2AF is a stable heterodimer composed of a U2AF2-encoded 65-kD subunit (U2AF65), which binds the polypyrimidine tract (PPT), and a U2AF1-encoded 35-kD subunit (U2AF35), which interacts with highly conserved AG dinucleotides at 3′ss and stabilizes U2AF65 binding. In addition to the BPS/PPT unit and 3′ss/5′ss, accurate splicing requires auxiliary sequences or structures that activate or repress splice site recognition, known as intronic or exonic splicing enhancers or silencers. These elements allow genuine splice sites to be recognized among a vast excess of cryptic or pseudo-sites in the genome of higher eukaryotes, which have the same sequences but outnumber authentic sites by an order of magnitude. Although they often have a regulatory function, the exact mechanisms of their activation or repression are poorly understood.

[0075] The decision as to whether splicing occurs can be typically modeled as a stochastic rather than deterministic process, such that even the most defined splicing signals can sometimes splice incorrectly. However, under normal conditions, pre-mRNA splicing proceeds with surprisingly high accuracy. This may be attributed in part to the activity of adjacent cis-acting auxiliary exonic and intronic splicing regulatory elements (ESRs or ISRs). Typically, these functional elements are classified as either exonic or intronic splicing enhancers (ESEs or ISEs) or silencers (ESSs or ISSs) based on their ability to stimulate or inhibit splicing, respectively. Although there is now evidence to suggest that some auxiliary cis-acting elements may act by influencing the kinetics of spliceosome assembly, such as the arrangement of the complex between U1 snRNP and the 5′ss, it seems highly likely that multiple elements function in a coordinated manner with trans-acting RNA-binding proteins (RBPs). For example, the serine- and arginine-rich family of RBPs (SR proteins) is a conserved family of proteins that play a key role in defining exons. SR proteins promote exon recognition by recruiting components of the pre-spliceosome to adjacent splice sites or by antagonizing the effects of ESSs in the vicinity. The repressive effects of ESSs and ISSs can be mediated by members of the heterogeneous nuclear ribonucleoprotein (hnRNP) family and can alter recruitment of core splicing factors to adjacent splice sites. In addition to their roles in splicing regulation, silencer elements have been suggested to play a role in the repression of pseudo-exons, which are sets of decoy intronic splice sites with the typical spacing of an exon but without a functional open reading frame. ISEs, ISSs, ESEs and ESSs, in cooperation with their related trans-acting RBPs, represent important components in a set of splicing controls that specify how, where and when mRNAs are assembled from their precursors.

[0076] The sequences marking the exon-intron boundaries are degenerate signals of varying strengths that can occur at high frequency within human genes. In multi-exon genes, different pairs of splice sites can be linked together in many different combinations, creating a diverse array of transcripts from a single gene. This is commonly referred to as alternative pre-mRNA splicing. Although most mRNA isoforms produced by alternative splicing can be exported from the nucleus and translated into functional polypeptides, different mRNA isoforms from a single gene can vary greatly in their translation efficiency. Those mRNA isoforms with premature termination codons (PTCs) at least 50 bp upstream of an exon junction complex are likely to be targeted for degradation by the nonsense-mediated mRNA decay (NMD) pathway. Present in these mRNA isoforms are non-sense mediated RNA decay alternative exons (NSAE), which are alternatively spliced exons that lead to NMD. Mutations in traditional (BPS/PPT/3′ss/5′ss) and auxiliary splicing motifs may cause aberrant splicing, such as exon skipping or cryptic (or pseudo-) exon inclusion or splice-site activation, and contribute significantly to human morbidity and mortality. Both aberrant and alternative splicing patterns can be influenced by natural DNA variants in exons and introns.

### Target Transcripts

[0077] In some embodiments, the methods of the present disclosure exploit the presence of non-sense mediated RNA decay alternative exon-containing pre-mRNA (NSAE pre-mRNA) transcribed from a gene. In some embodiments, the methods of the present disclosure exploit the presence of non-sense mediated RNA decay alternative exon-containing pre-mRNA (NSAE pre-mRNA) transcribed from the SYNGAP1 gene. Canonical splicing of the identified SYNGAP1 NSAE pre-mRNA transcripts to produce functional, mature SYNGAP1 mRNA can be induced using a therapeutic agent, such as an ASO, that promotes constitutive splicing of SYNGAP1 NSAE pre-mRNA at the canonical splice sites. In some embodiments, the resulting functional, mature SYNGAP1 mRNA can be translated normally, thereby increasing the amount of functional SYNGAP1 protein in the patient's cells and preventing symptoms of SYNGAP1 associated disease. In some embodiments, canonical splicing of the identified SYNGAP1 NSAE pre-mRNA transcripts to produce functional, mature SYNGAP1 mRNA may be reduced using a therapeutic agent, such as an ASO, that inhibits constitutive splicing of SYNGAP1 NSAE pre-mRNA at the canonical splice sites. In some embodiments, the resulting functional, mature SYNGAP1 mRNA can be translated abnormally, thereby decreasing the amount of functional SYNGAP1 protein in the patient's cells and preventing symptoms of SYNGAP1 associated disease.

[0078] In some embodiments, the methods of the present disclosure exploit the presence of non-sense mediated RNA decay alternative exon-containing pre-mRNA (NSAE pre-mRNA) transcribed from the target gene, wherein the target is any one selected from the group consisting of ABCA5, ABCA7, ABCC3, ABCC5, ABCC8, ABCD1, ABR, ACAD9, ACAP1, ACOX2, ACSF3, ACTN4, ADAM17, ADAMTS13, AKR1E2, ALAD, ALG3, ANKRD29, ANKS3, ANO4, AP3B2, AP3M1, AP5Z1, ARNTL, ASAP3, ATRX, BBS2, BBS4, BRD9, CALM3, CARS1, CASP9, CATSPER1, CCDC40, CCDC88B, CD4, CD58, CES2, CHFR, CLCN2, CNOT3, CNTROB, COL5A3, CPSF1, CSPP1, CTF1, CTH, CYP3A5, DAB2IP, DBN1, DDX51, DEAF1, DGKE, DHDDS, DMKN, DNHD1, DOCK8, DOK5, EIF2B5, ELAC2, ELP1, ENTPD4, ESRRA, ESS2, ETAA1, ETHE1, FANCA, FASTK, FASTKD3, FPGS, FREM1, GAS8, GCK, GGA1, GGA3, GGT1, GLMN, GON4L, GRB14, HDAC3, HELQ, HP1BP3, HPS1, HPS4, IDUA, IFT122, IL17RC, IMPDH1, INVS, IRF3, KCTD3, KLKB1, KYAT1, LAMC3, LDAH, LIMS2, MALT1, MAP3K7, MAPK13, MCAT, MCEE, MPI, MSTO1, NBEAL2, NLE1, NLRC5, NOM1, NOP58, NPHP1, NPR1, NUP188, OSGEP, PABPC4, PCOLCE, PHKA2, PIDD1, PKD1, PLA2G6, PLD2, PLEKHG5, PNPO, POLE, PON2, PRMT7, PRODH, PRPF3, PRPF4, PYCR1, RAD52, REXO1, RFX5, RHBDF2, RMND1, ROBO3, RPGRIP1, RTTN, RUFY3, SEMA3B, SEMA3F, SH2D3A, SIK3, SIRT3, SKIV2L, SLC2A13, SLC12A7, SLC22A3, SLC25A13, SLC25A37, SLC27A5, SLC30A9, SLC30A10, SMPD1, SMTN, SNRPB, SP140, STAMBP, STXBP2, SULF2, SYNGAP1, SYNJ2, TAZ, TBL2, TDRD7, TECPR2, TFB1M, TM6SF1, TNK2, TOE1, TOR1B, TRAPPC6B, TRIP4, TRMT2A, TRMU, TRPV4, TTC19, TYMP, UMPS, UROD, WDR11, WDR62, WIPI1, WRAP53, XPO1, YY1AP1, and ZC3H14. Canonical splicing of the identified target NSAE pre-mRNA transcripts to produce the functional, mature target mRNA can be induced using a therapeutic agent, such as an ASO, that promotes constitutive splicing of the target NSAE pre-mRNA at the canonical splice sites. In some embodiments, the resulting functional, mature target mRNA can be translated normally, thereby increasing the amount of the functional target protein in the patient's cells and preventing symptoms of the target associated disease. In some embodiments, canonical splicing of the identified target NSAE pre-mRNA transcripts to produce functional, mature target mRNA may be reduced using a therapeutic agent, such as an ASO, that inhibits constitutive splicing of target NSAE pre-mRNA at the canonical splice sites. In some embodiments, the resulting functional, mature target mRNA can be translated abnormally, thereby decreasing the amount of functional target protein in the patient's cells and preventing symptoms of the target associated disease.

[0079] In various embodiments, the present disclosure provides a therapeutic agent that can target SYNGAP1 pre-mRNA to modulate splicing or protein expression level. The therapeutic agent can be a small molecule, nucleic acid oligomer, or polypeptide. In some embodiments, the therapeutic agent is an ASO. Various regions or sequences on the SYNGAP1 pre-mRNA can be targeted by a therapeutic agent, such as an ASO. In some embodiments, the ASO targets a SYNGAP1 NSAE pre-mRNA transcribed from the SYNGAP1 gene. In some embodiments, the ASO targets a SYNGAP1 NSAE pre-mRNA transcribed from the SYNGAP1 gene comprising non-sense mediated RNA decay alternative exons (NSAEs). In some embodiments, the NSAE is comprises a portion of canonical exon 11 or the entire canonical exon 11 of a SYNGAP1 pre-mRNA transcript. In some embodiments, the NSAE is comprises only a portion of canonical exon 11 of a SYNGAP1 pre-mRNA transcript, or canonical exon 11 of a SYNGAP1 pre-mRNA transcript and at least a portion of the intron upstream of exon 11 of the SYNGAP1 pre-mRNA transcript. In some embodiments, the NSAE is included in a SYNGAP1 pre-mRNA transcript due to aberrant splicing. In some embodiments, the aberrant splicing is caused by a mutation in the SYNGAP1 gene. In some embodiments, the mutation is a G→A mutation at position −1 of the exon 11 splice donor (E8SJM, Exon 11 Splice Junction Mutation, c.894G>A). In some embodiments, the ASO targets a sequence within a NSAE of a SYNGAP1 pre-mRNA transcript. In some embodiments, the NSAE is comprises a portion of canonical exon 11 or the entire canonical exon 11 of a SYNGAP1 pre-mRNA transcript. In some embodiments, the ASO targets a sequence within exon 10 or 11 of a SYNGAP1 pre-mRNA transcript. In some embodiments, the ASO targets an exon sequence upstream (or 5′) from the 5′ splice site of exon 11 of a SYNGAP1 pre-mRNA transcript. In some embodiments, the ASO targets an exon sequence downstream (or 3′) from the 3′ splice site of exon 11 of a SYNGAP1 pre-mRNA transcript. In some embodiments, the ASO targets a sequence within an intron flanking the 3′ splice site of a NSAE of a SYNGAP1 pre-mRNA transcript. In some embodiments, the ASO targets a sequence within intron 10 or 11 of a SYNGAP1 pre-mRNA transcript. In some embodiments, the ASO targets an intron sequence upstream (or 5′) from the 3′ splice site of intron 10 or 11 of a SYNGAP1 pre-mRNA transcript. In some embodiments, the ASO targets an intron sequence downstream (or 3′) from the 5′ splice site of intron 10 or 11 of a SYNGAP1 pre-mRNA transcript. In some embodiments, the ASO targets a sequence within an intron flanking the 5′ splice site of a NSAE of a SYNGAP1 pre-mRNA transcript. In some embodiments, the ASO targets a sequence within intron 10 of a SYNGAP1 pre-mRNA transcript. In some embodiments, the ASO targets a sequence within intron 11 of a SYNGAP1 pre-mRNA transcript. In some embodiments, the ASO targets an intron sequence upstream (or 5′) from the 3′ splice site of intron 10 or 11 of a SYNGAP1 pre-mRNA transcript. In some embodiments, the ASO targets an intron sequence downstream (or 3′) from the 5′ splice site of intron 10 or 11 of a SYNGAP1 pre-mRNA transcript. In some embodiments, the ASO targets a sequence comprising an exon-intron boundary of a SYNGAP1 pre-mRNA transcript. In some embodiments, the exon is a NSAE. An exon-intron boundary can refer to the junction of an exon sequence and an intron sequence. In some embodiments, the intron sequence can flank the 5′ end of the NSAE, or the 3′ end of the exon. In some embodiments, the ASO targets a sequence comprising an exon 10-intron 11 boundary of a SYNGAP1 pre-mRNA transcript. In some embodiments, the ASO targets a sequence comprising an intron 10-exon 11 boundary of a SYNGAP1 NSAE pre-mRNA transcript. In some embodiments, the ASO targets a sequence comprising both a portion of an intron and a portion of an exon.

[0080] In various embodiments, the present disclosure provides a therapeutic agent that can target a target pre-mRNA to modulate splicing or protein expression level, wherein the target is any one selected from the group consisting of ABCA5, ABCA7, ABCC3, ABCC5, ABCC8, ABCD1, ABR, ACAD9, ACAP1, ACOX2, ACSF3, ACTN4, ADAM17, ADAMTS13, AKR1E2, ALAD, ALG3, ANKRD29, ANKS3, ANO4, AP3B2, AP3M1, AP5Z1, ARNTL, ASAP3, ATRX, BBS2, BBS4, BRD9, CALM3, CARS1, CASP9, CATSPER1, CCDC40, CCDC88B, CD4, CD58, CES2, CHFR, CLCN2, CNOT3, CNTROB, COL5A3, CPSF1, CSPP1, CTF1, CTH, CYP3A5, DAB2IP, DBN1, DDX51, DEAF1, DGKE, DHDDS, DMKN, DNHD1, DOCK8, DOK5, EIF2B5, ELAC2, ELP1, ENTPD4, ESRRA, ESS2, ETAA1, ETHE1, FANCA, FASTK, FASTKD3, FPGS, FREM1, GAS8, GCK, GGA1, GGA3, GGT1, GLMN, GON4L, GRB14, HDAC3, HELQ, HP1BP3, HPS1, HPS4, IDUA, IFT122, IL17RC, IMPDH1, INVS, IRF3, KCTD3, KLKB1, KYAT1, LAMC3, LDAH, LIMS2, MALT1, MAP3K7, MAPK13, MCAT, MCEE, MPI, MSTO1, NBEAL2, NLE1, NLRC5, NOM1, NOP58, NPHP1, NPR1, NUP188, OSGEP, PABPC4, PCOLCE, PHKA2, PIDD1, PKD1, PLA2G6, PLD2, PLEKHG5, PNPO, POLE, PON2, PRMT7, PRODH, PRPF3, PRPF4, PYCR1, RAD52, REXO1, RFX5, RHBDF2, RMND1, ROBO3, RPGRIP1, RTTN, RUFY3, SEMA3B, SEMA3F, SH2D3A, SIK3, SIRT3, SKIV2L, SLC2A13, SLC12A7, SLC22A3, SLC25A13, SLC25A37, SLC27A5, SLC30A9, SLC30A10, SMPD1, SMTN, SNRPB, SP140, STAMBP, STXBP2, SULF2, SYNGAP1, SYNJ2, TAZ, TBL2, TDRD7, TECPR2, TFB1M, TM6SF1, TNK2, TOE1, TOR1B, TRAPPC6B, TRIP4, TRMT2A, TRMU, TRPV4, TTC19, TYMP, UMPS, UROD, WDR11, WDR62, WIPI1, WRAP53, XPO1, YY1AP1, and ZC3H14. The therapeutic agent can be a small molecule, nucleic acid oligomer, or polypeptide. In some embodiments, the therapeutic agent is an ASO. Various regions or sequences on the target pre-mRNA can be targeted by a therapeutic agent, such as an ASO. In some embodiments, the ASO targets a target NSAE pre-mRNA transcribed from the target gene. In some embodiments, the ASO targets a target NSAE pre-mRNA transcribed from the target gene comprising non-sense mediated RNA decay alternative exons (NSAEs). In some embodiments, the NSAE is comprises a portion of a canonical exon or the entire canonical exon of a target pre-mRNA transcript. In some embodiments, the NSAE is comprises only a portion of a canonical exon of a target pre-mRNA transcript, or a canonical exon of a target pre-mRNA transcript and at least a portion of the intron upstream of the exon of the target pre-mRNA transcript. In some embodiments, the NSAE is included in a target pre-mRNA transcript due to aberrant splicing. In some embodiments, the aberrant splicing is caused by a mutation in the target gene. In some embodiments, the ASO targets a sequence within a NSAE of a target pre-mRNA transcript. In some embodiments, the NSAE is comprises a portion of a canonical exon or the entire canonical exon of a target pre-mRNA transcript. In some embodiments, the ASO targets a sequence within a exon of a target pre-mRNA transcript. In some embodiments, the ASO targets an exon sequence upstream (or 5′) from the 5′ splice site of a exon of a target pre-mRNA transcript. In some embodiments, the ASO targets an exon sequence downstream (or 3′) from the 3′ splice site of a exon of a target pre-mRNA transcript. In some embodiments, the ASO targets a sequence within an intron flanking the 3′ splice site of a NSAE of a target pre-mRNA transcript. In some embodiments, the ASO targets a sequence within an intron of a target pre-mRNA transcript. In some embodiments, the ASO targets an intron sequence upstream (or 5′) from the 3′ splice site of an intron of a target pre-mRNA transcript. In some embodiments, the ASO targets an intron sequence downstream (or 3′) from the 5′ splice site of an intron of a target pre-mRNA transcript. In some embodiments, the ASO targets a sequence within an intron flanking the 5′ splice site of a NSAE of a target pre-mRNA transcript. In some embodiments, the ASO targets a sequence within an intron of a target pre-mRNA transcript. In some embodiments, the ASO targets an intron sequence upstream (or 5′) from the 3′ splice site of an intron of a target pre-mRNA transcript. In some embodiments, the ASO targets an intron sequence downstream (or 3′) from the 5′ splice site of an intron of a target pre-mRNA transcript. In some embodiments, the ASO targets a sequence comprising an exon-intron boundary of a target pre-mRNA transcript. In some embodiments, the exon is a NSAE. An exon-intron boundary can refer to the junction of an exon sequence and an intron sequence. In some embodiments, the intron sequence can flank the 5′ end of the NSAE, or the 3′ end of the exon. In some embodiments, the ASO targets a sequence comprising an exon-intron boundary of a target pre-mRNA transcript. In some embodiments, the ASO targets a sequence comprising an intron-exon boundary of a target NSAE pre-mRNA transcript. In some embodiments, the ASO targets a sequence comprising both a portion of an intron and a portion of an exon.

[0081] In some embodiments, the ASO targets a sequence about 4 to about 300 nucleotides upstream (or 5′) from the 3′ splice site of a NSAE of a SYNGAP1 pre-mRNA transcript. In some embodiments, the ASO targets a sequence about 1 to about 20 nucleotides, about 20 to about 50 nucleotides, about 50 to about 100 nucleotides, about 100 to about 150 nucleotides, about 150 to about 200 nucleotides, about 200 to about 250 nucleotides, or about 250 to about 300 nucleotides upstream (or 5′) from the 3′ splice site of the NSAE of a SYNGAP1 pre-mRNA transcript. In some embodiments, the ASO may target a sequence more than 300 nucleotides upstream from the 3′ splice site of the NSAE of a SYNGAP1pre-mRNA transcript. In some embodiments, the ASO targets a sequence about 4 to about 300 nucleotides downstream (or 3′) from the 3′ splice site of a NSAE of a SYNGAP1 pre-mRNA transcript. In some embodiments, the ASO targets a sequence about 1 to about 20 nucleotides, about 20 to about 50 nucleotides, about 50 to about 100 nucleotides, about 100 to about 150 nucleotides, about 150 to about 200 nucleotides, about 200 to about 250 nucleotides, or about 250 to about 300 nucleotides downstream (or 3′) from the 3′ splice site of the NSAE of a SYNGAP1 pre-mRNA transcript. In some embodiments, the ASO may target a sequence more than 300 nucleotides downstream from the 3′ splice site of the NSAE of a SYNGAP1 pre-mRNA transcript. In some embodiments, the ASO targets a sequence about 4 to about 300 nucleotides downstream (or 3′) from the 5′ splice site of the NSAE of a SYNGAP1 pre-mRNA transcript. In some embodiments, the ASO targets a sequence about 1 to about 20 nucleotides, about 20 to about 50 nucleotides, about 50 to about 100 nucleotides, about 100 to about 150 nucleotides, about 150 to about 200 nucleotides, about 200 to about 250 nucleotides, or about 250 to about 300 nucleotides downstream from the 5′ splice site of the NSAE of a SYNGAP1 pre-mRNA transcript. In some embodiments, the ASO targets a sequence more than 300 nucleotides downstream from the 5′ splice site of the NSAE of a SYNGAP1 pre-mRNA transcript. In some embodiments, the ASO targets a sequence about 4 to about 300 nucleotides upstream (or 5′) from the 5′ splice site of the NSAE of a SYNGAP1 pre-mRNA transcript. In some embodiments, the ASO targets a sequence about 1 to about 20 nucleotides, about 20 to about 50 nucleotides, about 50 to about 100 nucleotides, about 100 to about 150 nucleotides, about 150 to about 200 nucleotides, about 200 to about 250 nucleotides, or about 250 to about 300 nucleotides upstream from the 5′ splice site of the NSAE exon of a SYNGAP1 pre-mRNA transcript. In some embodiments, the ASO targets a sequence more than 300 nucleotides upstream from the 5′ splice site of the NSAE exon of a SYNGAP1 pre-mRNA transcript.

[0082] In some embodiments, the ASO targets a sequence about 4 to about 300 nucleotides upstream (or 5′) from the 3′ splice site of a NSAE of a target pre-mRNA transcript, wherein the target is any one selected from the group consisting of ABCA5, ABCA7, ABCC3, ABCC5, ABCC8, ABCD1, ABR, ACAD9, ACAP1, ACOX2, ACSF3, ACTN4, ADAM17, ADAMTS13, AKR1E2, ALAD, ALG3, ANKRD29, ANKS3, ANO4, AP3B2, AP3M1, AP5Z1, ARNTL, ASAP3, ATRX, BBS2, BBS4, BRD9, CALM3, CARS1, CASP9, CATSPER1, CCDC40, CCDC88B, CD4, CD58, CES2, CHFR, CLCN2, CNOT3, CNTROB, COL5A3, CPSF1, CSPP1, CTF1, CTH, CYP3A5, DAB2IP, DBN1, DDX51, DEAF1, DGKE, DHDDS, DMKN, DNHD1, DOCK8, DOK5, EIF2B5, ELAC2, ELP1, ENTPD4, ESRRA, ESS2, ETAA1, ETHE1, FANCA, FASTK, FASTKD3, FPGS, FREM1, GAS8, GCK, GGA1, GGA3, GGT1, GLMN, GON4L, GRB14, HDAC3, HELQ, HP1BP3, HPS1, HPS4, IDUA, IFT122, IL17RC, IMPDH1, INVS, IRF3, KCTD3, KLKB1, KYAT1, LAMC3, LDAH, LIMS2, MALT1, MAP3K7, MAPK13, MCAT, MCEE, MPI, MSTO1, NBEAL2, NLE1, NLRC5, NOM1, NOP58, NPHP1, NPR1, NUP188, OSGEP, PABPC4, PCOLCE, PHKA2, PIDD1, PKD1, PLA2G6, PLD2, PLEKHG5, PNPO, POLE, PON2, PRMT7, PRODH, PRPF3, PRPF4, PYCR1, RAD52, REXO1, RFX5, RHBDF2, RMND1, ROBO3, RPGRIP1, RTTN, RUFY3, SEMA3B, SEMA3F, SH2D3A, SIK3, SIRT3, SKIV2L, SLC2A13, SLC12A7, SLC22A3, SLC25A13, SLC25A37, SLC27A5, SLC30A9, SLC30A10, SMPD1, SMTN, SNRPB, SP140, STAMBP, STXBP2, SULF2, SYNGAP1, SYNJ2, TAZ, TBL2, TDRD7, TECPR2, TFB1M, TM6SF1, TNK2, TOE1, TOR1B, TRAPPC6B, TRIP4, TRMT2A, TRMU, TRPV4, TTC19, TYMP, UMPS, UROD, WDR11, WDR62, WIPI1, WRAP53, XPO1, YY1AP1, and ZC3H14. In some embodiments, the ASO targets a sequence about 1 to about 20 nucleotides, about 20 to about 50 nucleotides, about 50 to about 100 nucleotides, about 100 to about 150 nucleotides, about 150 to about 200 nucleotides, about 200 to about 250 nucleotides, or about 250 to about 300 nucleotides upstream (or 5′) from the 3′ splice site of the NSAE of a target pre-mRNA transcript. In some embodiments, the ASO may target a sequence more than 300 nucleotides upstream from the 3′ splice site of the NSAE of a target pre-mRNA transcript. In some embodiments, the ASO targets a sequence about 4 to about 300 nucleotides downstream (or 3′) from the 3′ splice site of a NSAE of a target pre-mRNA transcript. In some embodiments, the ASO targets a sequence about 1 to about 20 nucleotides, about 20 to about 50 nucleotides, about 50 to about 100 nucleotides, about 100 to about 150 nucleotides, about 150 to about 200 nucleotides, about 200 to about 250 nucleotides, or about 250 to about 300 nucleotides downstream (or 3′) from the 3′ splice site of the NSAE of a target pre-mRNA transcript. In some embodiments, the ASO may target a sequence more than 300 nucleotides downstream from the 3′ splice site of the NSAE of a target pre-mRNA transcript. In some embodiments, the ASO targets a sequence about 4 to about 300 nucleotides downstream (or 3′) from the 5′ splice site of the NSAE of a target pre-mRNA transcript. In some embodiments, the ASO targets a sequence about 1 to about 20 nucleotides, about 20 to about 50 nucleotides, about 50 to about 100 nucleotides, about 100 to about 150 nucleotides, about 150 to about 200 nucleotides, about 200 to about 250 nucleotides, or about 250 to about 300 nucleotides downstream from the 5′ splice site of the NSAE of a target pre-mRNA transcript. In some embodiments, the ASO targets a sequence more than 300 nucleotides downstream from the 5′ splice site of the NSAE of a target pre-mRNA transcript. In some embodiments, the ASO targets a sequence about 4 to about 300 nucleotides upstream (or 5′) from the 5′ splice site of the NSAE of a target pre-mRNA transcript. In some embodiments, the ASO targets a sequence about 1 to about 20 nucleotides, about 20 to about 50 nucleotides, about 50 to about 100 nucleotides, about 100 to about 150 nucleotides, about 150 to about 200 nucleotides, about 200 to about 250 nucleotides, or about 250 to about 300 nucleotides upstream from the 5′ splice site of the NSAE exon of a target pre-mRNA transcript. In some embodiments, the ASO targets a sequence more than 300 nucleotides upstream from the 5′ splice site of the NSAE exon of a target pre-mRNA transcript.

[0083] In some embodiments, the ASOs disclosed herein target a NSAE pre-mRNA transcribed from a genomic sequence selected from the group consisting of ABCA5, ABCA7, ABCC3, ABCC5, ABCC8, ABCD1, ABR, ACAD9, ACAP1, ACOX2, ACSF3, ACTN4, ADAM17, ADAMTS13, AKR1E2, ALAD, ALG3, ANKRD29, ANKS3, ANO4, AP3B2, AP3M1, AP5Z1, ARNTL, ASAP3, ATRX, BBS2, BBS4, BRD9, CALM3, CARS1, CASP9, CATSPER1, CCDC40, CCDC88B, CD4, CD58, CES2, CHFR, CLCN2, CNOT3, CNTROB, COL5A3, CPSF1, CSPP1, CTF1, CTH, CYP3A5, DAB2IP, DBN1, DDX51, DEAF1, DGKE, DHDDS, DMKN, DNHD1, DOCK8, DOK5, EIF2B5, ELAC2, ELP1, ENTPD4, ESRRA, ESS2, ETAA1, ETHE1, FANCA, FASTK, FASTKD3, FPGS, FREM1, GAS8, GCK, GGA1, GGA3, GGT1, GLMN, GON4L, GRB14, HDAC3, HELQ, HP1BP3, HPS1, HPS4, IDUA, IFT122, IL17RC, IMPDH1, INVS, IRF3, KCTD3, KLKB1, KYAT1, LAMC3, LDAH, LIMS2, MALT1, MAP3K7, MAPK13, MCAT, MCEE, MPI, MSTO1, NBEAL2, NLE1, NLRC5, NOM1, NOP58, NPHP1, NPR1, NUP188, OSGEP, PABPC4, PCOLCE, PHKA2, PIDD1, PKD1, PLA2G6, PLD2, PLEKHG5, PNPO, POLE, PON2, PRMT7, PRODH, PRPF3, PRPF4, PYCR1, RAD52, REXO1, RFX5, RHBDF2, RMND1, ROBO3, RPGRIP1, RTTN, RUFY3, SEMA3B, SEMA3F, SH2D3A, SIK3, SIRT3, SKIV2L, SLC2A13, SLC12A7, SLC22A3, SLC25A13, SLC25A37, SLC27A5, SLC30A9, SLC30A10, SMPD1, SMTN, SNRPB, SP140, STAMBP, STXBP2, SULF2, SYNGAP1, SYNJ2, TAZ, TBL2, TDRD7, TECPR2, TFB1M, TM6SF1, TNK2, TOE1, TOR1B, TRAPPC6B, TRIP4, TRMT2A, TRMU, TRPV4, TTC19, TYMP, UMPS, UROD, WDR11, WDR62, WIPI1, WRAP53, XPO1, YY1AP1, and ZC3H14 genomic sequences. In some embodiments, the ASO targets a NSAE pre-mRNA transcript from a genomic sequence comprising a NSAE exon selected from the group consisting of ABCA5, ABCA7, ABCC3, ABCC5, ABCC8, ABCD1, ABR, ACAD9, ACAP1, ACOX2, ACSF3, ACTN4, ADAM17, ADAMTS13, AKR1E2, ALAD, ALG3, ANKRD29, ANKS3, ANO4, AP3B2, AP3M1, AP5Z1, ARNTL, ASAP3, ATRX, BBS2, BBS4, BRD9, CALM3, CARS1, CASP9, CATSPER1, CCDC40, CCDC88B, CD4, CD58, CES2, CHFR, CLCN2, CNOT3, CNTROB, COL5A3, CPSF1, CSPP1, CTF1, CTH, CYP3A5, DAB2IP, DBN1, DDX51, DEAF1, DGKE, DHDDS, DMKN, DNHD1, DOCK8, DOK5, EIF2B5, ELAC2, ELP1, ENTPD4, ESRRA, ESS2, ETAA1, ETHE1, FANCA, FASTK, FASTKD3, FPGS, FREM1, GAS8, GCK, GGA1, GGA3, GGT1, GLMN, GON4L, GRB14, HDAC3, HELQ, HP1BP3, HPS1, HPS4, IDUA, IFT122, IL17RC, IMPDH1, INVS, IRF3, KCTD3, KLKB1, KYAT1, LAMC3, LDAH, LIMS2, MALT1, MAP3K7, MAPK13, MCAT, MCEE, MPI, MSTO1, NBEAL2, NLE1, NLRC5, NOM1, NOP58, NPHP1, NPR1, NUP188, OSGEP, PABPC4, PCOLCE, PHKA2, PIDD1, PKD1, PLA2G6, PLD2, PLEKHG5, PNPO, POLE, PON2, PRMT7, PRODH, PRPF3, PRPF4, PYCR1, RAD52, REXO1, RFX5, RHBDF2, RMND1, ROBO3, RPGRIP1, RTTN, RUFY3, SEMA3B, SEMA3F, SH2D3A, SIK3, SIRT3, SKIV2L, SLC2A13, SLC12A7, SLC22A3, SLC25A13, SLC25A37, SLC27A5, SLC30A9, SLC30A10, SMPD1, SMTN, SNRPB, SP140, STAMBP, STXBP2, SULF2, SYNGAP1, SYNJ2, TAZ, TBL2, TDRD7, TECPR2, TFB1M, TM6SF1, TNK2, TOE1, TOR1B, TRAPPC6B, TRIP4, TRMT2A, TRMU, TRPV4, TTC19, TYMP, UMPS, UROD, WDR11, WDR62, WIPI1, WRAP53, XPO1, YY1AP1, and ZC3H14 genomic sequences. In some embodiments, the ASO targets a NSAE pre-mRNA transcript from a genomic sequence comprising an intron flanking the 3′ splice site of the NSAE exon and an intron flanking the 5′ splice site of a NSAE exon selected from the group consisting of ABCA5, ABCA7, ABCC3, ABCC5, ABCC8, ABCD1, ABR, ACAD9, ACAP1, ACOX2, ACSF3, ACTN4, ADAM17, ADAMTS13, AKR1E2, ALAD, ALG3, ANKRD29, ANKS3, ANO4, AP3B2, AP3M1, AP5Z1, ARNTL, ASAP3, ATRX, BBS2, BBS4, BRD9, CALM3, CARS1, CASP9, CATSPER1, CCDC40, CCDC88B, CD4, CD58, CES2, CHFR, CLCN2, CNOT3, CNTROB, COL5A3, CPSF1, CSPP1, CTF1, CTH, CYP3A5, DAB2IP, DBN1, DDX51, DEAF1, DGKE, DHDDS, DMKN, DNHD1, DOCK8, DOK5, EIF2B5, ELAC2, ELP1, ENTPD4, ESRRA, ESS2, ETAA1, ETHE1, FANCA, FASTK, FASTKD3, FPGS, FREM1, GAS8, GCK, GGA1, GGA3, GGT1, GLMN, GON4L, GRB14, HDAC3, HELQ, HP1BP3, HPS1, HPS4, IDUA, IFT122, IL17RC, IMPDH1, INVS, IRF3, KCTD3, KLKB1, KYAT1, LAMC3, LDAH, LIMS2, MALT1, MAP3K7, MAPK13, MCAT, MCEE, MPI, MSTO1, NBEAL2, NLE1, NLRC5, NOM1, NOP58, NPHP1, NPR1, NUP188, OSGEP, PABPC4, PCOLCE, PHKA2, PIDD1, PKD1, PLA2G6, PLD2, PLEKHG5, PNPO, POLE, PON2, PRMT7, PRODH, PRPF3, PRPF4, PYCR1, RAD52, REXO1, RFX5, RHBDF2, RMND1, ROBO3, RPGRIP1, RTTN, RUFY3, SEMA3B, SEMA3F, SH2D3A, SIK3, SIRT3, SKIV2L, SLC2A13, SLC12A7, SLC22A3, SLC25A13, SLC25A37, SLC27A5, SLC30A9, SLC30A10, SMPD1, SMTN, SNRPB, SP140, STAMBP, STXBP2, SULF2, SYNGAP1, SYNJ2, TAZ, TBL2, TDRD7, TECPR2, TFB1M, TM6SF1, TNK2, TOE1, TOR1B, TRAPPC6B, TRIP4, TRMT2A, TRMU, TRPV4, TTC19, TYMP, UMPS, UROD, WDR11, WDR62, WIPI1, WRAP53, XPO1, YY1AP1, and ZC3H14 genomic sequences. In some embodiments, the ASO targets a NSAE pre-mRNA transcript comprising a sequence selected from the group consisting of the pre-mRNA transcripts of Table 4. In some embodiments, the ASO targets a pre-mRNA sequence comprising a NSAE exon selected from the group consisting of ABCA5, ABCA7, ABCC3, ABCC5, ABCC8, ABCD1, ABR, ACAD9, ACAP1, ACOX2, ACSF3, ACTN4, ADAM17, ADAMTS13, AKR1E2, ALAD, ALG3, ANKRD29, ANKS3, ANO4, AP3B2, AP3M1, AP5Z1, ARNTL, ASAP3, ATRX, BBS2, BBS4, BRD9, CALM3, CARS1, CASP9, CATSPER1, CCDC40, CCDC88B, CD4, CD58, CES2, CHFR, CLCN2, CNOT3, CNTROB, COL5A3, CPSF1, CSPP1, CTF1, CTH, CYP3A5, DAB2IP, DBN1, DDX51, DEAF1, DGKE, DHDDS, DMKN, DNHD1, DOCK8, DOK5, EIF2B5, ELAC2, ELP1, ENTPD4, ESRRA, ESS2, ETAA1, ETHE1, FANCA, FASTK, FASTKD3, FPGS, FREM1, GAS8, GCK, GGA1, GGA3, GGT1, GLMN, GON4L, GRB14, HDAC3, HELQ, HP1BP3, HPS1, HPS4, IDUA, IFT122, IL17RC, IMPDH1, INVS, IRF3, KCTD3, KLKB1, KYAT1, LAMC3, LDAH, LIMS2, MALT1, MAP3K7, MAPK13, MCAT, MCEE, MPI, MSTO1, NBEAL2, NLE1, NLRC5, NOM1, NOP58, NPHP1, NPR1, NUP188, OSGEP, PABPC4, PCOLCE, PHKA2, PIDD1, PKD1, PLA2G6, PLD2, PLEKHG5, PNPO, POLE, PON2, PRMT7, PRODH, PRPF3, PRPF4, PYCR1, RAD52, REXO1, RFX5, RHBDF2, RMND1, ROBO3, RPGRIP1, RTTN, RUFY3, SEMA3B, SEMA3F, SH2D3A, SIK3, SIRT3, SKIV2L, SLC2A13, SLC12A7, SLC22A3, SLC25A13, SLC25A37, SLC27A5, SLC30A9, SLC30A10, SMPD1, SMTN, SNRPB, SP140, STAMBP, STXBP2, SULF2, SYNGAP1, SYNJ2, TAZ, TBL2, TDRD7, TECPR2, TFB1M, TM6SF1, TNK2, TOE1, TOR1B, TRAPPC6B, TRIP4, TRMT2A, TRMU, TRPV4, TTC19, TYMP, UMPS, UROD, WDR11, WDR62, WIPI1, WRAP53, XPO1, YY1AP1, and ZC3H14 pre-mRNA sequences. In some embodiments, the ASO targets a pre-mRNA sequence comprising an intron flanking the 3′ splice site of the NSAE exon selected from the group consisting of ABCA5, ABCA7, ABCC3, ABCC5, ABCC8, ABCD1, ABR, ACAD9, ACAP1, ACOX2, ACSF3, ACTN4, ADAM17, ADAMTS13, AKR1E2, ALAD, ALG3, ANKRD29, ANKS3, ANO4, AP3B2, AP3M1, AP5Z1, ARNTL, ASAP3, ATRX, BBS2, BBS4, BRD9, CALM3, CARS1, CASP9, CATSPER1, CCDC40, CCDC88B, CD4, CD58, CES2, CHFR, CLCN2, CNOT3, CNTROB, COL5A3, CPSF1, CSPP1, CTF1, CTH, CYP3A5, DAB2IP, DBN1, DDX51, DEAF1, DGKE, DHDDS, DMKN, DNHD1, DOCK8, DOK5, EIF2B5, ELAC2, ELP1, ENTPD4, ESRRA, ESS2, ETAA1, ETHE1, FANCA, FASTK, FASTKD3, FPGS, FREM1, GAS8, GCK, GGA1, GGA3, GGT1, GLMN, GON4L, GRB14, HDAC3, HELQ, HP1BP3, HPS1, HPS4, IDUA, IFT122, IL17RC, IMPDH1, INVS, IRF3, KCTD3, KLKB1, KYAT1, LAMC3, LDAH, LIMS2, MALT1, MAP3K7, MAPK13, MCAT, MCEE, MPI, MSTO1, NBEAL2, NLE1, NLRC5, NOM1, NOP58, NPHP1, NPR1, NUP188, OSGEP, PABPC4, PCOLCE, PHKA2, PIDD1, PKD1, PLA2G6, PLD2, PLEKHG5, PNPO, POLE, PON2, PRMT7, PRODH, PRPF3, PRPF4, PYCR1, RAD52, REXO1, RFX5, RHBDF2, RMND1, ROBO3, RPGRIP1, RTTN, RUFY3, SEMA3B, SEMA3F, SH2D3A, SIK3, SIRT3, SKIV2L, SLC2A13, SLC12A7, SLC22A3, SLC25A13, SLC25A37, SLC27A5, SLC30A9, SLC30A10, SMPD1, SMTN, SNRPB, SP140, STAMBP, STXBP2, SULF2, SYNGAP1, SYNJ2, TAZ, TBL2, TDRD7, TECPR2, TFB1M, TM6SF1, TNK2, TOE1, TOR1B, TRAPPC6B, TRIP4, TRMT2A, TRMU, TRPV4, TTC19, TYMP, UMPS, UROD, WDR11, WDR62, WIPI1, WRAP53, XPO1, YY1AP1, and ZC3H14 pre-mRNA sequences. In some embodiments, the ASO targets a pre-mRNA sequence comprising an intron flanking the 5′ splice site of the NSAE exon selected from the group consisting of ABCA5, ABCA7, ABCC3, ABCC5, ABCC8, ABCD1, ABR, ACAD9, ACAP1, ACOX2, ACSF3, ACTN4, ADAM17, ADAMTS13, AKR1E2, ALAD, ALG3, ANKRD29, ANKS3, ANO4, AP3B2, AP3M1, AP5Z1, ARNTL, ASAP3, ATRX, BBS2, BBS4, BRD9, CALM3, CARS1, CASP9, CATSPER1, CCDC40, CCDC88B, CD4, CD58, CES2, CHFR, CLCN2, CNOT3, CNTROB, COL5A3, CPSF1, CSPP1, CTF1, CTH, CYP3A5, DAB2IP, DBN1, DDX51, DEAF1, DGKE, DHDDS, DMKN, DNHD1, DOCK8, DOK5, EIF2B5, ELAC2, ELP1, ENTPD4, ESRRA, ESS2, ETAA1, ETHE1, FANCA, FASTK, FASTKD3, FPGS, FREM1, GAS8, GCK, GGA1, GGA3, GGT1, GLMN, GON4L, GRB14, HDAC3, HELQ, HP1BP3, HPS1, HPS4, IDUA, IFT122, IL17RC, IMPDH1, INVS, IRF3, KCTD3, KLKB1, KYAT1, LAMC3, LDAH, LIMS2, MALT1, MAP3K7, MAPK13, MCAT, MCEE, MPI, MSTO1, NBEAL2, NLE1, NLRC5, NOM1, NOP58, NPHP1, NPR1, NUP188, OSGEP, PABPC4, PCOLCE, PHKA2, PIDD1, PKD1, PLA2G6, PLD2, PLEKHG5, PNPO, POLE, PON2, PRMT7, PRODH, PRPF3, PRPF4, PYCR1, RAD52, REXO1, RFX5, RHBDF2, RMND1, ROBO3, RPGRIP1, RTTN, RUFY3, SEMA3B, SEMA3F, SH2D3A, SIK3, SIRT3, SKIV2L, SLC2A13, SLC12A7, SLC22A3, SLC25A13, SLC25A37, SLC27A5, SLC30A9, SLC30A10, SMPD1, SMTN, SNRPB, SP140, STAMBP, STXBP2, SULF2, SYNGAP1, SYNJ2, TAZ, TBL2, TDRD7, TECPR2, TFB1M, TM6SF1, TNK2, TOE1, TOR1B, TRAPPC6B, TRIP4, TRMT2A, TRMU, TRPV4, TTC19, TYMP, UMPS, UROD, WDR11, WDR62, WIPI1, WRAP53, XPO1, YY1AP1, and ZC3H14 pre-mRNA sequences. In some embodiments, the transcript is selected from the group consisting of the transcripts of Table 4.

[0084] In some embodiments, the pre-mRNA transcript comprises a sequence with at least about 80%, 85%, 90%, 95%, 96%, 97%, 98%, 99% or 100% sequence identity to a pre-mRNA transcript selected from the group consisting of ABCA5, ABCA7, ABCC3, ABCC5, ABCC8, ABCD1, ABR, ACAD9, ACAP1, ACOX2, ACSF3, ACTN4, ADAM17, ADAMTS13, AKR1E2, ALAD, ALG3, ANKRD29, ANKS3, ANO4, AP3B2, AP3M1, AP5Z1, ARNTL, ASAP3, ATRX, BBS2, BBS4, BRD9, CALM3, CARS1, CASP9, CATSPER1, CCDC40, CCDC88B, CD4, CD58, CES2, CHFR, CLCN2, CNOT3, CNTROB, COL5A3, CPSF1, CSPP1, CTF1, CTH, CYP3A5, DAB2IP, DBN1, DDX51, DEAF1, DGKE, DHDDS, DMKN, DNHD1, DOCK8, DOK5, EIF2B5, ELAC2, ELP1, ENTPD4, ESRRA, ESS2, ETAA1, ETHE1, FANCA, FASTK, FASTKD3, FPGS, FREM1, GAS8, GCK, GGA1, GGA3, GGT1, GLMN, GON4L, GRB14, HDAC3, HELQ, HP1BP3, HPS1, HPS4, IDUA, IFT122, IL17RC, IMPDH1, INVS, IRF3, KCTD3, KLKB1, KYAT1, LAMC3, LDAH, LIMS2, MALT1, MAP3K7, MAPK13, MCAT, MCEE, MPI, MSTO1, NBEAL2, NLE1, NLRC5, NOM1, NOP58, NPHP1, NPR1, NUP188, OSGEP, PABPC4, PCOLCE, PHKA2, PIDD1, PKD1, PLA2G6, PLD2, PLEKHG5, PNPO, POLE, PON2, PRMT7, PRODH, PRPF3, PRPF4, PYCR1, RAD52, REXO1, RFX5, RHBDF2, RMND1, ROBO3, RPGRIP1, RTTN, RUFY3, SEMA3B, SEMA3F, SH2D3A, SIK3, SIRT3, SKIV2L, SLC2A13, SLC12A7, SLC22A3, SLC25A13, SLC25A37, SLC27A5, SLC30A9, SLC30A10, SMPD1, SMTN, SNRPB, SP140, STAMBP, STXBP2, SULF2, SYNGAP1, SYNJ2, TAZ, TBL2, TDRD7, TECPR2, TFB1M, TM6SF1, TNK2, TOE1, TOR1B, TRAPPC6B, TRIP4, TRMT2A, TRMU, TRPV4, TTC19, TYMP, UMPS, UROD, WDR11, WDR62, WIPI1, WRAP53, XPO1, YY1AP1, and ZC3H14 pre-mRNA transcripts or a complement thereof described herein.

[0085] In some embodiments, the targeted portion of the pre-mRNA selected from the group consisting of ABCA5, ABCA7, ABCC3, ABCC5, ABCC8, ABCD1, ABR, ACAD9, ACAP1, ACOX2, ACSF3, ACTN4, ADAM17, ADAMTS13, AKR1E2, ALAD, ALG3, ANKRD29, ANKS3, ANO4, AP3B2, AP3M1, AP5Z1, ARNTL, ASAP3, ATRX, BBS2, BBS4, BRD9, CALM3, CARS1, CASP9, CATSPER1, CCDC40, CCDC88B, CD4, CD58, CES2, CHFR, CLCN2, CNOT3, CNTROB, COL5A3, CPSF1, CSPP1, CTF1, CTH, CYP3A5, DAB2IP, DBN1, DDX51, DEAF1, DGKE, DHDDS, DMKN, DNHD1, DOCK8, DOK5, EIF2B5, ELAC2, ELP1, ENTPD4, ESRRA, ESS2, ETAA1, ETHE1, FANCA, FASTK, FASTKD3, FPGS, FREM1, GAS8, GCK, GGA1, GGA3, GGT1, GLMN, GON4L, GRB14, HDAC3, HELQ, HP1BP3, HPS1, HPS4, IDUA, IFT122, IL17RC, IMPDH1, INVS, IRF3, KCTD3, KLKB1, KYAT1, LAMC3, LDAH, LIMS2, MALT1, MAP3K7, MAPK13, MCAT, MCEE, MPI, MSTO1, NBEAL2, NLE1, NLRC5, NOM1, NOP58, NPHP1, NPR1, NUP188, OSGEP, PABPC4, PCOLCE, PHKA2, PIDD1, PKD1, PLA2G6, PLD2, PLEKHG5, PNPO, POLE, PON2, PRMT7, PRODH, PRPF3, PRPF4, PYCR1, RAD52, REXO1, RFX5, RHBDF2, RMND1, ROBO3, RPGRIP1, RTTN, RUFY3, SEMA3B, SEMA3F, SH2D3A, SIK3, SIRT3, SKIV2L, SLC2A13, SLC12A7, SLC22A3, SLC25A13, SLC25A37, SLC27A5, SLC30A9, SLC30A10, SMPD1, SMTN, SNRPB, SP140, STAMBP, STXBP2, SULF2, SYNGAP1, SYNJ2, TAZ, TBL2, TDRD7, TECPR2, TFB1M, TM6SF1, TNK2, TOE1, TOR1B, TRAPPC6B, TRIP4, TRMT2A, TRMU, TRPV4, TTC19, TYMP, UMPS, UROD, WDR11, WDR62, WIPI1, WRAP53, XPO1, YY1AP1, and ZC3H14 pre-mRNAs comprises a sequence with at least 80%, 85%, 90%, 95%, 97%, or 100% sequence identity to a region comprising at least 8 contiguous nucleic acids of a sequence of the pre-mRNA transcripts of Table 4 or a sequence of Table 3 or complements thereof. In some embodiments, the targeted portion of the pre-mRNA selected from the group consisting of ABCA5, ABCA7, ABCC3, ABCC5, ABCC8, ABCD1, ABR, ACAD9, ACAP1, ACOX2, ACSF3, ACTN4, ADAM17, ADAMTS13, AKR1E2, ALAD, ALG3, ANKRD29, ANKS3, ANO4, AP3B2, AP3M1, AP5Z1, ARNTL, ASAP3, ATRX, BBS2, BBS4, BRD9, CALM3, CARS1, CASP9, CATSPER1, CCDC40, CCDC88B, CD4, CD58, CES2, CHFR, CLCN2, CNOT3, CNTROB, COL5A3, CPSF1, CSPP1, CTF1, CTH, CYP3A5, DAB2IP, DBN1, DDX51, DEAF1, DGKE, DHDDS, DMKN, DNHD1, DOCK8, DOK5, EIF2B5, ELAC2, ELP1, ENTPD4, ESRRA, ESS2, ETAA1, ETHE1, FANCA, FASTK, FASTKD3, FPGS, FREM1, GAS8, GCK, GGA1, GGA3, GGT1, GLMN, GON4L, GRB14, HDAC3, HELQ, HP1BP3, HPS1, HPS4, IDUA, IFT122, IL17RC, IMPDH1, INVS, IRF3, KCTD3, KLKB1, KYAT1, LAMC3, LDAH, LIMS2, MALT1, MAP3K7, MAPK13, MCAT, MCEE, MPI, MSTO1, NBEAL2, NLE1, NLRC5, NOM1, NOP58, NPHP1, NPR1, NUP188, OSGEP, PABPC4, PCOLCE, PHKA2, PIDD1, PKD1, PLA2G6, PLD2, PLEKHG5, PNPO, POLE, PON2, PRMT7, PRODH, PRPF3, PRPF4, PYCR1, RAD52, REXO1, RFX5, RHBDF2, RMND1, ROBO3, RPGRIP1, RTTN, RUFY3, SEMA3B, SEMA3F, SH2D3A, SIK3, SIRT3, SKIV2L, SLC2A13, SLC12A7, SLC22A3, SLC25A13, SLC25A37, SLC27A5, SLC30A9, SLC30A10, SMPD1, SMTN, SNRPB, SP140, STAMBP, STXBP2, SULF2, SYNGAP1, SYNJ2, TAZ, TBL2, TDRD7, TECPR2, TFB1M, TM6SF1, TNK2, TOE1, TOR1B, TRAPPC6B, TRIP4, TRMT2A, TRMU, TRPV4, TTC19, TYMP, UMPS, UROD, WDR11, WDR62, WIPI1, WRAP53, XPO1, YY1AP1, and ZC3H14 pre-mRNAs comprises a sequence with at least 80%, 85%, 90%, 95%, 97%, or 100% sequence identity to a region comprising at least 8 contiguous nucleic acids of a sequence selected from the group consisting of SEQ ID NO: 170-SEQ ID NO: 1098 or complements thereof. In some embodiments, the targeted portion of the pre-mRNA selected from the group consisting of ABCA5, ABCA7, ABCC3, ABCC5, ABCC8, ABCD1, ABR, ACAD9, ACAP1, ACOX2, ACSF3, ACTN4, ADAM17, ADAMTS13, AKR1E2, ALAD, ALG3, ANKRD29, ANKS3, ANO4, AP3B2, AP3M1, AP5Z1, ARNTL, ASAP3, ATRX, BBS2, BBS4, BRD9, CALM3, CARS1, CASP9, CATSPER1, CCDC40, CCDC88B, CD4, CD58, CES2, CHFR, CLCN2, CNOT3, CNTROB, COL5A3, CPSF1, CSPP1, CTF1, CTH, CYP3A5, DAB2IP, DBN1, DDX51, DEAF1, DGKE, DHDDS, DMKN, DNHD1, DOCK8, DOK5, EIF2B5, ELAC2, ELP1, ENTPD4, ESRRA, ESS2, ETAA1, ETHE1, FANCA, FASTK, FASTKD3, FPGS, FREM1, GAS8, GCK, GGA1, GGA3, GGT1, GLMN, GON4L, GRB14, HDAC3, HELQ, HP1BP3, HPS1, HPS4, IDUA, IFT122, IL17RC, IMPDH1, INVS, IRF3, KCTD3, KLKB1, KYAT1, LAMC3, LDAH, LIMS2, MALT1, MAP3K7, MAPK13, MCAT, MCEE, MPI, MSTO1, NBEAL2, NLE1, NLRC5, NOM1, NOP58, NPHP1, NPR1, NUP188, OSGEP, PABPC4, PCOLCE, PHKA2, PIDD1, PKD1, PLA2G6, PLD2, PLEKHG5, PNPO, POLE, PON2, PRMT7, PRODH, PRPF3, PRPF4, PYCR1, RAD52, REXO1, RFX5, RHBDF2, RMND1, ROBO3, RPGRIP1, RTTN, RUFY3, SEMA3B, SEMA3F, SH2D3A, SIK3, SIRT3, SKIV2L, SLC2A13, SLC12A7, SLC22A3, SLC25A13, SLC25A37, SLC27A5, SLC30A9, SLC30A10, SMPD1, SMTN, SNRPB, SP140, STAMBP, STXBP2, SULF2, SYNGAP1, SYNJ2, TAZ, TBL2, TDRD7, TECPR2, TFB1M, TM6SF1, TNK2, TOE1, TOR1B, TRAPPC6B, TRIP4, TRMT2A, TRMU, TRPV4, TTC19, TYMP, UMPS, UROD, WDR11, WDR62, WIPI1, WRAP53, XPO1, YY1AP1, and ZC3H14 pre-mRNA comprises a sequence that is complementary to at least 8, 9, 10, 11, 12, 13, 14, 15, 16, 17, 18, 19 or 20 contiguous nucleic acids of a sequence of Table 6A or Table 6B or a complement thereof.

[0086] In some embodiments, the ASOs disclosed herein target a NSAE pre-mRNA transcribed from a SYNGAP1 genomic sequence. In some embodiments, the ASO targets a NSAE pre-mRNA transcript from a SYNGAP1 genomic sequence comprising a NSAE exon. In some embodiments the NSAE exon is exon 11. In some embodiments, the ASO targets a NSAE pre-mRNA transcript from a SYNGAP1 genomic sequence comprising exon 11. In some embodiments, the ASO targets a NSAE pre-mRNA transcript from a SYNGAP1 genomic sequence comprising an intron flanking the 3′ splice site of the NSAE exon and an intron flanking the 5′ splice site of a NSAE exon. In some embodiments, the intron flanking the 3′ splice site of the NSAE exon is intron 10 and the intron flanking the 5′ splice site of a NSAE exon is intron 11. In some embodiments, the ASO targets a NSAE pre-mRNA transcript from a SYNGAP1 genomic sequence comprising intron 10, exon 11 and intron 11. In some embodiments, the ASO targets a NSAE pre-mRNA transcript comprising a sequence selected from the group consisting of premrna_ENST00000293748.9, premrna_ENST00000418600.7, premrna_ENST00000428982.4, premrna_ENST00000449372.7, premrna_ENST00000470232.1, premrna_ENST00000479510.2, premrna_ENST00000628646.2, premrna_ENST00000629380.3, premrna_ENST00000635885.1, premrna_ENST00000636075.1, premrna_ENST00000636116.1, premrna_ENST00000636146.1, premrna_ENST00000636193.1, premrna_ENST00000636436.1, premrna_ENST00000636443.1, premrna_ENST00000636640.1, premrna_ENST00000636731.1, premrna_ENST00000636905.1, premrna_ENST00000637052.1, premrna_ENST00000637194.1, premrna_ENST00000637490.1, premrna_ENST00000637587.1, premrna_ENST00000637671.1, premrna_ENST00000637721.1, premrna_ENST00000637911.1, premrna_ENST00000638127.1, premrna_ENST00000638142.2, premrna_ENST00000644458.1, premrna_ENST00000645250.1, premrna_ENST00000646630.1. In some embodiments, the ASO targets a NSAE pre-mRNA transcript comprising exon 10 and exon 11. In some embodiments, the ASO targets a SYNGAP1 pre-mRNA sequence comprising a NSAE exon. In some embodiments, the ASO targets a SYNGAP1 pre-mRNA sequence comprising exon 11. In some embodiments, the ASO targets a SYNGAP1 pre-mRNA sequence comprising an intron flanking the 3′ splice site of the NSAE exon. In some embodiments, the ASO targets a SYNGAP1 pre-mRNA sequence comprising intron 10. In some embodiments, the ASO targets a SYNGAP1 pre-mRNA sequence comprising an intron flanking the 5′ splice site of the NSAE exon. In some embodiments, the transcript is selected from the group consisting of transcript_ENST00000293748.9, transcript_ENST00000418600.7, transcript_ENST00000428982.4, transcript_ENST00000449372.7, transcript_ENST00000470232.1, transcript_ENST00000479510.2, transcript_ENST00000628646.2, transcript_ENST00000629380.3, transcript_ENST00000635885.1, transcript_ENST00000636075.1, transcript_ENST00000636116.1, transcript_ENST00000636146.1, transcript_ENST00000636193.1, transcript_ENST00000636436.1, transcript_ENST00000636443.1, transcript_ENST00000636640.1, transcript_ENST00000636731.1, transcript_ENST00000636905.1, transcript_ENST00000637052.1, transcript_ENST00000637194.1, transcript_ENST00000637490.1, transcript_ENST00000637587.1, transcript_ENST00000637671.1, transcript_ENST00000637721.1, transcript_ENST00000637911.1, transcript_ENST00000638127.1, transcript_ENST00000638142.2, transcript_ENST00000644458.1, transcript_ENST00000645250.1 and transcript_ENST00000646630.1.

[0087] In some embodiments, the SYNGAP1 pre-mRNA transcript is encoded by a genetic sequence with at least about 80%, 85%, 90%, 95%, 96%, 97%, 98%, 99% or 100% sequence identity to the Ensembl reference number ENSG00000227460.8 or ENSG00000197283.17 or a complement thereof. In some embodiments, the SYNGAP1 pre-mRNA transcript comprises a sequence with at least about 80%, 85%, 90%, 95%, 96%, 97%, 98%, 99% or 100% sequence identity to a SYNGAP1 pre-mRNA transcript or a complement thereof described herein.

[0088] In some embodiments, the targeted portion of the SYNGAP1 pre-mRNA comprises a sequence with at least 80%, 85%, 90%, 95%, 97%, or 100% sequence identity to a region comprising at least 8 contiguous nucleic acids of a sequence of premrna_ENST00000293748.9, premrna_ENST00000418600.7, premrna_ENST00000428982.4, premrna_ENST00000449372.7, premrna_ENST00000470232.1, premrna_ENST00000479510.2, premrna_ENST00000628646.2, premrna_ENST00000629380.3, premrna_ENST00000635885.1, premrna_ENST00000636075.1, premrna_ENST00000636116.1, premrna_ENST00000636146.1, premrna_ENST00000636193.1, premrna_ENST00000636436.1, premrna_ENST00000636443.1, premrna_ENST00000636640.1, premrna_ENST00000636731.1, premrna_ENST00000636905.1, premrna_ENST00000637052.1, premrna_ENST00000637194.1, premrna_ENST00000637490.1, premrna_ENST00000637587.1, premrna_ENST00000637671.1, premrna_ENST00000637721.1, premrna_ENST00000637911.1, premrna_ENST00000638127.1, premrna_ENST00000638142.2, premrna_ENST00000644458.1, premrna_ENST00000645250.1, premrna_ENST00000646630.1 or a sequence of Table 2 or complements thereof. In some embodiments, the targeted portion of the SYNGAP1 pre-mRNA comprises a sequence with at least 80%, 85%, 90%, 95%, 97%, or 100% sequence identity to a region comprising at least 8 contiguous nucleic acids of a sequence selected from the group consisting of SEQ ID NO: 166-SEQ ID NO: 169 or complements thereof. In some embodiments, the ASO comprises a sequence that is at least about 80%, 85%, 90%, 95%, 97%, or 100% identical to any one the sequences of Table 1 or complements thereof.

[0089] In some embodiments, the ASOs disclosed herein target a NSAE pre-mRNA transcribed from a ABCA5 genomic sequence. In some embodiments, the ASO targets a NSAE pre-mRNA transcript from a ABCA5 genomic sequence comprising a NSAE exon. In some embodiments, the ASO targets a NSAE pre-mRNA transcript from a ABCA5 genomic sequence comprising an intron flanking the 3′ splice site of the NSAE exon and an intron flanking the 5′ splice site of a NSAE exon. In some embodiments, the ASO targets a NSAE pre-mRNA transcript comprising a sequence selected from the group consisting of premrna_ENST00000392676.8, premrna_ENST00000586601.1, premrna_ENST00000586811.1, premrna_ENST00000586995.5, premrna_ENST00000587607.5, premrna_ENST00000588106.1, premrna_ENST00000588665.5, premrna_ENST00000588877.5, premrna_ENST00000589609.1, premrna_ENST00000589975.5, premrna_ENST00000591234.5, premrna_ENST00000592568.1, premrna_ENST00000593153.5, and premrna_ENST00000593253.5. In some embodiments, the ASO targets a ABCA5 pre-mRNA sequence comprising a NSAE exon. In some embodiments, the ASO targets a ABCA5 pre-mRNA sequence comprising an intron flanking the 3′ splice site of the NSAE exon. In some embodiments, the ASO targets a ABCA5 pre-mRNA sequence comprising an intron flanking the 5′ splice site of the NSAE exon. In some embodiments, the transcript is selected from the group consisting of transcript_ENST00000392676.8, transcript_ENST00000586601.1, transcript_ENST00000586811.1, transcript_ENST00000586995.5, transcript_ENST00000587607.5, transcript_ENST00000588106.1, transcript_ENST00000588665.5, transcript_ENST00000588877.5, transcript_ENST00000589609.1, transcript_ENST00000589975.5, transcript_ENST00000591234.5, transcript_ENST00000592568.1, transcript_ENST00000593153.5, and transcript_ENST00000593253.5.

[0090] In some embodiments, the ABCA5 pre-mRNA transcript is encoded by a genetic sequence with at least about 80%, 85%, 90%, 95%, 96%, 97%, 98%, 99% or 100% sequence identity to the Ensembl reference number ENSG00000154265.16 or a complement thereof. In some embodiments, the ABCA5 pre-mRNA transcript comprises a sequence with at least about 80%, 85%, 90%, 95%, 96%, 97%, 98%, 99% or 100% sequence identity to a ABCA5 pre-mRNA transcript or a complement thereof described herein.

[0091] In some embodiments, the targeted portion of the ABCA5 pre-mRNA comprises a sequence with at least 80%, 85%, 90%, 95%, 97%, or 100% sequence identity to a region comprising at least 8 contiguous nucleic acids of a sequence of premrna_ENST00000392676.8, premrna_ENST00000586601.1, premrna_ENST00000586811.1, premrna_ENST00000586995.5, premrna_ENST00000587607.5, premrna_ENST00000588106.1, premrna_ENST00000588665.5, premrna_ENST00000588877.5, premrna_ENST00000589609.1, premrna_ENST00000589975.5, premrna_ENST00000591234.5, premrna_ENST00000592568.1, premrna_ENST00000593153.5, premrna_ENST00000593253.5, or a sequence of Table 3 or complements thereof. In some embodiments, the targeted portion of the ABCA5 pre-mRNA comprises a sequence with at least 80%, 85%, 90%, 95%, 97%, or 100% sequence identity to a region comprising at least 8 contiguous nucleic acids of a sequence selected from the group consisting of SEQ ID NO: 170-SEQ ID NO: 173 or complements thereof. In some embodiments, the targeted portion of the ABCA5 pre-mRNA comprises a sequence that is complementary to at least 8, 9, 10, 11, 12, 13, 14, 15, 16, 17, 18, 19 or 20 contiguous nucleic acids of a sequence of Table 6A or Table 6B or a complement thereof.

[0092] In some embodiments, the ASOs disclosed herein target a NSAE pre-mRNA transcribed from a ABCA7 genomic sequence. In some embodiments, the ASO targets a NSAE pre-mRNA transcript from a ABCA7 genomic sequence comprising a NSAE exon. In some embodiments, the ASO targets a NSAE pre-mRNA transcript from a ABCA7 genomic sequence comprising an intron flanking the 3′ splice site of the NSAE exon and an intron flanking the 5′ splice site of a NSAE exon. In some embodiments, the ASO targets a NSAE pre-mRNA transcript comprising a sequence selected from the group consisting of premrna_ENST00000263094.11, premrna_ENST00000433129.6, premrna_ENST00000435683.7, premrna_ENST00000524383.1, premrna_ENST00000524850.5, premrna_ENST00000525073.6, premrna_ENST00000525238.2, premrna_ENST00000526885.5, premrna_ENST00000527496.1, premrna_ENST00000529442.7, premrna_ENST00000530092.2, premrna_ENST00000530703.1, premrna_ENST00000531467.5, premrna_ENST00000531478.5, premrna_ENST00000532194.3, premrna_ENST00000533574.1, premrna_ENST00000612569.1, and premrna_ENST00000673773.1. In some embodiments, the ASO targets a ABCA7 pre-mRNA sequence comprising a NSAE exon. In some embodiments, the ASO targets a ABCA7 pre-mRNA sequence comprising an intron flanking the 3′ splice site of the NSAE exon. In some embodiments, the ASO targets a ABCA7 pre-mRNA sequence comprising an intron flanking the 5′ splice site of the NSAE exon. In some embodiments, the transcript is selected from the group consisting of transcript_ENST00000263094.11, transcript_ENST00000433129.6, transcript_ENST00000435683.7, transcript_ENST00000524383.1, transcript_ENST00000524850.5, transcript_ENST00000525073.6, transcript_ENST00000525238.2, transcript_ENST00000526885.5, transcript_ENST00000527496.1, transcript_ENST00000529442.7, transcript_ENST00000530092.2, transcript_ENST00000530703.1, transcript_ENST00000531467.5, transcript_ENST00000531478.5, transcript_ENST00000532194.3, transcript_ENST00000533574.1, transcript_ENST00000612569.1, and transcript_ENST00000673773.1.

[0093] In some embodiments, the ABCA7 pre-mRNA transcript is encoded by a genetic sequence with at least about 80%, 85%, 90%, 95%, 96%, 97%, 98%, 99% or 100% sequence identity to the Ensembl reference number ENSG00000064687.13 or a complement thereof. In some embodiments, the ABCA7 pre-mRNA transcript comprises a sequence with at least about 80%, 85%, 90%, 95%, 96%, 97%, 98%, 99% or 100% sequence identity to a ABCA7 pre-mRNA transcript or a complement thereof described herein.

[0094] In some embodiments, the targeted portion of the ABCA7 pre-mRNA comprises a sequence with at least 80%, 85%, 90%, 95%, 97%, or 100% sequence identity to a region comprising at least 8 contiguous nucleic acids of a sequence of premrna_ENST00000263094.11, premrna_ENST00000433129.6, premrna_ENST00000435683.7, premrna_ENST00000524383.1, premrna_ENST00000524850.5, premrna_ENST00000525073.6, premrna_ENST00000525238.2, premrna_ENST00000526885.5, premrna_ENST00000527496.1, premrna_ENST00000529442.7, premrna_ENST00000530092.2, premrna_ENST00000530703.1, premrna_ENST00000531467.5, premrna_ENST00000531478.5, premrna_ENST00000532194.3, premrna_ENST00000533574.1, premrna_ENST00000612569.1, premrna_ENST00000673773.1 or a sequence of Table 3 or complements thereof. In some embodiments, the targeted portion of the ABCA7 pre-mRNA comprises a sequence with at least 80%, 85%, 90%, 95%, 97%, or 100% sequence identity to a region comprising at least 8 contiguous nucleic acids of a sequence selected from the group consisting of SEQ ID NO: 174-SEQ ID NO: 177 or complements thereof. In some embodiments, the targeted portion of the ABCA7 pre-mRNA comprises a sequence that is complementary to at least 8, 9, 10, 11, 12, 13, 14, 15, 16, 17, 18, 19 or 20 contiguous nucleic acids of a sequence of Table 6A or Table 6B or a complement thereof.

[0095] In some embodiments, the ASOs disclosed herein target a NSAE pre-mRNA transcribed from a ABCC3 genomic sequence. In some embodiments, the ASO targets a NSAE pre-mRNA transcript from a ABCC3 genomic sequence comprising a NSAE exon. In some embodiments, the ASO targets a NSAE pre-mRNA transcript from a ABCC3 genomic sequence comprising an intron flanking the 3′ splice site of the NSAE exon and an intron flanking the 5′ splice site of a NSAE exon. In some embodiments, the ASO targets a NSAE pre-mRNA transcript comprising a sequence selected from the group consisting of premrna_ENST00000285238.13, premrna_ENST00000427699.5, premrna_ENST00000502426.5, premrna_ENST00000503304.1, premrna_ENST00000503337.1, premrna_ENST00000504586.1, premrna_ENST00000505699.5, premrna_ENST00000506464.5, premrna_ENST00000508929.1, premrna_ENST00000510633.5, premrna_ENST00000510891.1, premrna_ENST00000513511.5, premrna_ENST00000513589.1, premrna_ENST00000513745.1, premrna_ENST00000515070.1, premrna_ENST00000515585.1, premrna_ENST00000515707.1, and premrna_ENST00000571855.1 In some embodiments, the ASO targets a ABCC3 pre-mRNA sequence comprising a NSAE exon. In some embodiments, the ASO targets a ABCC3 pre-mRNA sequence comprising an intron flanking the 3′ splice site of the NSAE exon. In some embodiments, the ASO targets a ABCC3 pre-mRNA sequence comprising an intron flanking the 5′ splice site of the NSAE exon. In some embodiments, the transcript is selected from the group consisting of transcript_ENST00000285238.13, transcript_ENST00000427699.5, transcript_ENST00000502426.5, transcript_ENST00000503304.1, transcript_ENST00000503337.1, transcript_ENST00000504586.1, transcript_ENST00000505699.5, transcript_ENST00000506464.5, transcript_ENST00000508929.1, transcript_ENST00000510633.5, transcript_ENST00000510891.1, transcript_ENST00000513511.5, transcript_ENST00000513589.1, transcript_ENST00000513745.1, transcript_ENST00000515070.1, transcript_ENST00000515585.1, transcript_ENST00000515707.1, and transcript_ENST00000571855.1.

[0096] In some embodiments, the ABCC3 pre-mRNA transcript is encoded by a genetic sequence with at least about 80%, 85%, 90%, 95%, 96%, 97%, 98%, 99% or 100% sequence identity to the Ensembl reference number ENSG00000108846.16 or a complement thereof. In some embodiments, the ABCC3 pre-mRNA transcript comprises a sequence with at least about 80%, 85%, 90%, 95%, 96%, 97%, 98%, 99% or 100% sequence identity to a ABCC3 pre-mRNA transcript or a complement thereof described herein.

[0097] In some embodiments, the targeted portion of the ABCC3 pre-mRNA comprises a sequence with at least 80%, 85%, 90%, 95%, 97%, or 100% sequence identity to a region comprising at least 8 contiguous nucleic acids of a sequence of premrna_ENST00000285238.13, premrna_ENST00000427699.5, premrna_ENST00000502426.5, premrna_ENST00000503304.1, premrna_ENST00000503337.1, premrna_ENST00000504586.1, premrna_ENST00000505699.5, premrna_ENST00000506464.5, premrna_ENST00000508929.1, premrna_ENST00000510633.5, premrna_ENST00000510891.1, premrna_ENST00000513511.5, premrna_ENST00000513589.1, premrna_ENST00000513745.1, premrna_ENST00000515070.1, premrna_ENST00000515585.1, premrna_ENST00000515707.1, premrna_ENST00000571855.1 or a sequence of Table 3 or complements thereof. In some embodiments, the targeted portion of the ABCC3 pre-mRNA comprises a sequence with at least 80%, 85%, 90%, 95%, 97%, or 100% sequence identity to a region comprising at least 8 contiguous nucleic acids of a sequence selected from the group consisting of SEQ ID NO: 178-SEQ ID NO: 181 or complements thereof. In some embodiments, the targeted portion of the ABCC3 pre-mRNA comprises a sequence that is complementary to at least 8, 9, 10, 11, 12, 13, 14, 15, 16, 17, 18, 19 or 20 contiguous nucleic acids of a sequence of Table 6A or Table 6B or a complement thereof.

[0098] In some embodiments, the ASOs disclosed herein target a NSAE pre-mRNA transcribed from a ABCC5 genomic sequence. In some embodiments, the ASO targets a NSAE pre-mRNA transcript from a ABCC5 genomic sequence comprising a NSAE exon. In some embodiments, the ASO targets a NSAE pre-mRNA transcript from a ABCC5 genomic sequence comprising an intron flanking the 3′ splice site of the NSAE exon and an intron flanking the 5′ splice site of a NSAE exon. In some embodiments, the ASO targets a NSAE pre-mRNA transcript comprising a sequence selected from the group consisting of premrna_ENST00000265586.10, premrna_ENST00000334444.11, premrna_ENST00000382494.6, premrna_ENST00000392579.6, premrna_ENST00000427120.6, premrna_ENST00000437205.5, premrna_ENST00000437341.5, premrna_ENST00000438979.6, premrna_ENST00000443376.5, premrna_ENST00000443497.1, premrna_ENST00000446941.2, premrna_ENST00000476402.1, and premrna_ENST00000492216.1. In some embodiments, the ASO targets a ABCC5 pre-mRNA sequence comprising a NSAE exon. In some embodiments, the ASO targets a ABCC5 pre-mRNA sequence comprising an intron flanking the 3′ splice site of the NSAE exon. In some embodiments, the ASO targets a ABCC5 pre-mRNA sequence comprising an intron flanking the 5′ splice site of the NSAE exon. In some embodiments, the transcript is selected from the group consisting of transcript_ENST00000265586.10, transcript_ENST00000334444.11, transcript_ENST00000382494.6, transcript_ENST00000392579.6, transcript_ENST00000427120.6, transcript_ENST00000437205.5, transcript_ENST00000437341.5, transcript_ENST00000438979.6, transcript_ENST00000443376.5, transcript_ENST00000443497.1, transcript_ENST00000446941.2, transcript_ENST00000476402.1, and transcript_ENST00000492216.1.

[0099] In some embodiments, the ABCC5 pre-mRNA transcript is encoded by a genetic sequence with at least about 80%, 85%, 90%, 95%, 96%, 97%, 98%, 99% or 100% sequence identity to the Ensembl reference number ENSG00000114770.17 or a complement thereof. In some embodiments, the ABCC5 pre-mRNA transcript comprises a sequence with at least about 80%, 85%, 90%, 95%, 96%, 97%, 98%, 99% or 100% sequence identity to a ABCC5 pre-mRNA transcript or a complement thereof described herein.

[0100] In some embodiments, the targeted portion of the ABCC5 pre-mRNA comprises a sequence with at least 80%, 85%, 90%, 95%, 97%, or 100% sequence identity to a region comprising at least 8 contiguous nucleic acids of a sequence of premrna_ENST00000265586.10, premrna_ENST00000334444.11, premrna_ENST00000382494.6, premrna_ENST00000392579.6, premrna_ENST00000427120.6, premrna_ENST00000437205.5, premrna_ENST00000437341.5, premrna_ENST00000438979.6, premrna_ENST00000443376.5, premrna_ENST00000443497.1, premrna_ENST00000446941.2, premrna_ENST00000476402.1, premrna_ENST00000492216.1 or a sequence of Table 3 or complements thereof. In some embodiments, the targeted portion of the ABCC5 pre-mRNA comprises a sequence with at least 80%, 85%, 90%, 95%, 97%, or 100% sequence identity to a region comprising at least 8 contiguous nucleic acids of a sequence selected from the group consisting of SEQ ID NO: 182-SEQ ID NO: 185 or complements thereof. In some embodiments, the targeted portion of the ABCC5 pre-mRNA comprises a sequence that is complementary to at least 8, 9, 10, 11, 12, 13, 14, 15, 16, 17, 18, 19 or 20 contiguous nucleic acids of a sequence of Table 6A or Table 6B or a complement thereof.

[0101] In some embodiments, the ASOs disclosed herein target a NSAE pre-mRNA transcribed from a ABCC8 genomic sequence. In some embodiments, the ASO targets a NSAE pre-mRNA transcript from a ABCC8 genomic sequence comprising a NSAE exon. In some embodiments, the ASO targets a NSAE pre-mRNA transcript from a ABCC8 genomic sequence comprising an intron flanking the 3′ splice site of the NSAE exon and an intron flanking the 5′ splice site of a NSAE exon. In some embodiments, the ASO targets a NSAE pre-mRNA transcript comprising a sequence selected from the group consisting of premrna_ENST00000302539.9, premrna_ENST00000389817.7, premrna_ENST00000524561.1, premrna_ENST00000525022.1, premrna_ENST00000526002.1, premrna_ENST00000526037.5, premrna_ENST00000526168.5, premrna_ENST00000526921.5, premrna_ENST00000527905.5, premrna_ENST00000528202.5, premrna_ENST00000528374.1, premrna_ENST00000529967.5, premrna_ENST00000530147.5, premrna_ENST00000531137.1, premrna_ENST00000531642.5, premrna_ENST00000531891.1, premrna_ENST00000531911.1, premrna_ENST00000532220.1, premrna_ENST00000532728.6, premrna_ENST00000612903.1, premrna_ENST00000635881.1, premrna_ENST00000642271.1, premrna_ENST00000642579.1, premrna_ENST00000642611.1, premrna_ENST00000642902.1, premrna_ENST00000643260.1, premrna_ENST00000643562.1, premrna_ENST00000643925.1, premrna_ENST00000644057.1, premrna_ENST00000644447.1, premrna_ENST00000644472.1, premrna_ENST00000644484.1, premrna_ENST00000644542.1, premrna_ENST00000644649.1, premrna_ENST00000644675.1, premrna_ENST00000644757.1, premrna_ENST00000644772.1, premrna_ENST00000645004.1, premrna_ENST00000645076.1, premrna_ENST00000645417.1, premrna_ENST00000645744.1, premrna_ENST00000645760.1, premrna_ENST00000645884.1, premrna_ENST00000646003.1, premrna_ENST00000646207.1, premrna_ENST00000646276.1, premrna_ENST00000646592.1, premrna_ENST00000646737.1, premrna_ENST00000646902.1, premrna_ENST00000646993.1, premrna_ENST00000647013.1, premrna_ENST00000647015.1, premrna_ENST00000647086.1, and premrna_ENST00000647158.1. In some embodiments, the ASO targets a ABCC8 pre-mRNA sequence comprising a NSAE exon. In some embodiments, the ASO targets a ABCC8 pre-mRNA sequence comprising an intron flanking the 3′ splice site of the NSAE exon. In some embodiments, the ASO targets a ABCC8 pre-mRNA sequence comprising an intron flanking the 5′ splice site of the NSAE exon. In some embodiments, the transcript is selected from the group consisting of transcript_ENST00000302539.9, transcript_ENST00000389817.7, transcript_ENST00000524561.1, transcript_ENST00000525022.1, transcript_ENST00000526002.1, transcript_ENST00000526037.5, transcript_ENST00000526168.5, transcript_ENST00000526921.5, transcript_ENST00000527905.5, transcript_ENST00000528202.5, transcript_ENST00000528374.1, transcript_ENST00000529967.5, transcript_ENST00000530147.5, transcript_ENST00000531137.1, transcript_ENST00000531642.5, transcript_ENST00000531891.1, transcript_ENST00000531911.1, transcript_ENST00000532220.1, transcript_ENST00000532728.6, transcript_ENST00000612903.1, transcript_ENST00000635881.1, transcript_ENST00000642271.1, transcript_ENST00000642579.1, transcript_ENST00000642611.1, transcript_ENST00000642902.1, transcript_ENST00000643260.1, transcript_ENST00000643562.1, transcript_ENST00000643925.1, transcript_ENST00000644057.1, transcript_ENST00000644447.1, transcript_ENST00000644472.1, transcript_ENST00000644484.1, transcript_ENST00000644542.1, transcript_ENST00000644649.1, transcript_ENST00000644675.1, transcript_ENST00000644757.1, transcript_ENST00000644772.1, transcript_ENST00000645004.1, transcript_ENST00000645076.1, transcript_ENST00000645417.1, transcript_ENST00000645744.1, transcript_ENST00000645760.1, transcript_ENST00000645884.1, transcript_ENST00000646003.1, transcript_ENST00000646207.1, transcript_ENST00000646276.1, transcript_ENST00000646592.1, transcript_ENST00000646737.1, transcript_ENST00000646902.1, transcript_ENST00000646993.1, transcript_ENST00000647013.1, transcript_ENST00000647015.1, transcript_ENST00000647086.1, and transcript_ENST00000647158.1.

[0102] In some embodiments, the ABCC8 pre-mRNA transcript is encoded by a genetic sequence with at least about 80%, 85%, 90%, 95%, 96%, 97%, 98%, 99% or 100% sequence identity to the Ensembl reference number ENSG00000006071.15 or a complement thereof. In some embodiments, the ABCC8 pre-mRNA transcript comprises a sequence with at least about 80%, 85%, 90%, 95%, 96%, 97%, 98%, 99% or 100% sequence identity to a ABCC8 pre-mRNA transcript or a complement thereof described herein.

[0103] In some embodiments, the targeted portion of the ABCC8 pre-mRNA comprises a sequence with at least 80%, 85%, 90%, 95%, 97%, or 100% sequence identity to a region comprising at least 8 contiguous nucleic acids of a sequence of premrna_ENST00000302539.9, premrna_ENST00000389817.7, premrna_ENST00000524561.1, premrna_ENST00000525022.1, premrna_ENST00000526002.1, premrna_ENST00000526037.5, premrna_ENST00000526168.5, premrna_ENST00000526921.5, premrna_ENST00000527905.5, premrna_ENST00000528202.5, premrna_ENST00000528374.1, premrna_ENST00000529967.5, premrna_ENST00000530147.5, premrna_ENST00000531137.1, premrna_ENST00000531642.5, premrna_ENST00000531891.1, premrna_ENST00000531911.1, premrna_ENST00000532220.1, premrna_ENST00000532728.6, premrna_ENST00000612903.1, premrna_ENST00000635881.1, premrna_ENST00000642271.1, premrna_ENST00000642579.1, premrna_ENST00000642611.1, premrna_ENST00000642902.1, premrna_ENST00000643260.1, premrna_ENST00000643562.1, premrna_ENST00000643925.1, premrna_ENST00000644057.1, premrna_ENST00000644447.1, premrna_ENST00000644472.1, premrna_ENST00000644484.1, premrna_ENST00000644542.1, premrna_ENST00000644649.1, premrna_ENST00000644675.1, premrna_ENST00000644757.1, premrna_ENST00000644772.1, premrna_ENST00000645004.1, premrna_ENST00000645076.1, premrna_ENST00000645417.1, premrna_ENST00000645744.1, premrna_ENST00000645760.1, premrna_ENST00000645884.1, premrna_ENST00000646003.1, premrna_ENST00000646207.1, premrna_ENST00000646276.1, premrna_ENST00000646592.1, premrna_ENST00000646737.1, premrna_ENST00000646902.1, premrna_ENST00000646993.1, premrna_ENST00000647013.1, premrna_ENST00000647015.1, premrna_ENST00000647086.1, premrna_ENST00000647158.1 or a sequence of Table 3 or complements thereof. In some embodiments, the targeted portion of the ABCC8 pre-mRNA comprises a sequence with at least 80%, 85%, 90%, 95%, 97%, or 100% sequence identity to a region comprising at least 8 contiguous nucleic acids of a sequence selected from the group consisting of SEQ ID NO: 186-SEQ ID NO: 189 or complements thereof. In some embodiments, the targeted portion of the ABCC8 pre-mRNA comprises a sequence that is complementary to at least 8, 9, 10, 11, 12, 13, 14, 15, 16, 17, 18, 19 or 20 contiguous nucleic acids of a sequence of Table 6A or Table 6B or a complement thereof.

[0104] In some embodiments, the ASOs disclosed herein target a NSAE pre-mRNA transcribed from a ABCD1 genomic sequence. In some embodiments, the ASO targets a NSAE pre-mRNA transcript from a ABCD1 genomic sequence comprising a NSAE exon. In some embodiments, the ASO targets a NSAE pre-mRNA transcript from a ABCD1 genomic sequence comprising an intron flanking the 3′ splice site of the NSAE exon and an intron flanking the 5′ splice site of a NSAE exon. In some embodiments, the ASO targets a NSAE pre-mRNA transcript comprising a sequence selected from the group consisting of premrna_ENST00000218104.6, premrna_ENST00000370129.4, and premrna_ENST00000443684.2. In some embodiments, the ASO targets a ABCD1 pre-mRNA sequence comprising a NSAE exon. In some embodiments, the ASO targets a ABCD1 pre-mRNA sequence comprising an intron flanking the 3′ splice site of the NSAE exon. In some embodiments, the ASO targets a ABCD1 pre-mRNA sequence comprising an intron flanking the 5′ splice site of the NSAE exon. In some embodiments, the transcript is selected from the group consisting of transcript_ENST00000218104.6, transcript_ENST00000370129.4, and transcript_ENST00000443684.2.

[0105] In some embodiments, the ABCD1 pre-mRNA transcript is encoded by a genetic sequence with at least about 80%, 85%, 90%, 95%, 96%, 97%, 98%, 99% or 100% sequence identity to the Ensembl reference number ENSG00000101986.12 or a complement thereof. In some embodiments, the ABCD1 pre-mRNA transcript comprises a sequence with at least about 80%, 85%, 90%, 95%, 96%, 97%, 98%, 99% or 100% sequence identity to a ABCD1 pre-mRNA transcript or a complement thereof described herein.

[0106] In some embodiments, the targeted portion of the ABCD1 pre-mRNA comprises a sequence with at least 80%, 85%, 90%, 95%, 97%, or 100% sequence identity to a region comprising at least 8 contiguous nucleic acids of a sequence of premrna_ENST00000218104.6, premrna_ENST00000370129.4, premrna_ENST00000443684.2 or a sequence of Table 3 or complements thereof. In some embodiments, the targeted portion of the ABCD1 pre-mRNA comprises a sequence with at least 80%, 85%, 90%, 95%, 97%, or 100% sequence identity to a region comprising at least 8 contiguous nucleic acids of a sequence selected from the group consisting of SEQ ID NO: 190-SEQ ID NO: 193 or complements thereof. In some embodiments, the targeted portion of the ABCD1 pre-mRNA comprises a sequence that is complementary to at least 8, 9, 10, 11, 12, 13, 14, 15, 16, 17, 18, 19 or 20 contiguous nucleic acids of a sequence of Table 6A or Table 6B or a complement thereof.

[0107] In some embodiments, the ASOs disclosed herein target a NSAE pre-mRNA transcribed from a ABR genomic sequence. In some embodiments, the ASO targets a NSAE pre-mRNA transcript from a ABR genomic sequence comprising a NSAE exon. In some embodiments, the ASO targets a NSAE pre-mRNA transcript from a ABR genomic sequence comprising an intron flanking the 3′ splice site of the NSAE exon and an intron flanking the 5′ splice site of a NSAE exon. In some embodiments, the ASO targets a NSAE pre-mRNA transcript comprising a sequence selected from the group consisting of premrna_ENST00000291107.6, premrna_ENST00000302538.9, premrna_ENST00000536794.6, premrna_ENST00000543210.6, premrna_ENST00000544583.6, premrna_ENST00000570441.5, premrna_ENST00000570525.5, premrna_ENST00000570688.1, premrna_ENST00000571022.5, premrna_ENST00000571120.5, premrna_ENST00000571306.1, premrna_ENST00000571383.5, premrna_ENST00000571543.1, premrna_ENST00000571797.5, premrna_ENST00000571945.5, premrna_ENST00000572152.5, premrna_ENST00000572441.5, premrna_ENST00000572585.5, premrna_ENST00000572650.1, premrna_ENST00000573325.1, premrna_ENST00000573559.3, premrna_ENST00000573667.1, premrna_ENST00000573895.1, premrna_ENST00000574048.2, premrna_ENST00000574139.6, premrna_ENST00000574257.5, premrna_ENST00000574266.1, premrna_ENST00000574437.5, premrna_ENST00000574544.1, premrna_ENST00000574632.5, premrna_ENST00000574875.1, premrna_ENST00000575770.5, premrna_ENST00000575934.5, premrna_ENST00000576668.1, premrna_ENST00000576964.5, and premrna_ENST00000577052.5. In some embodiments, the ASO targets a ABR pre-mRNA sequence comprising a NSAE exon. In some embodiments, the ASO targets a ABR pre-mRNA sequence comprising an intron flanking the 3′ splice site of the NSAE exon. In some embodiments, the ASO targets a ABR pre-mRNA sequence comprising an intron flanking the 5′ splice site of the NSAE exon. In some embodiments, the transcript is selected from the group consisting of transcript_ENST00000291107.6, transcript_ENST00000302538.9, transcript_ENST00000536794.6, transcript_ENST00000543210.6, transcript_ENST00000544583.6, transcript_ENST00000570441.5, transcript_ENST00000570525.5, transcript_ENST00000570688.1, transcript_ENST00000571022.5, transcript_ENST00000571120.5, transcript_ENST00000571306.1, transcript_ENST00000571383.5, transcript_ENST00000571543.1, transcript_ENST00000571797.5, transcript_ENST00000571945.5, transcript_ENST00000572152.5, transcript_ENST00000572441.5, transcript_ENST00000572585.5, transcript_ENST00000572650.1, transcript_ENST00000573325.1, transcript_ENST00000573559.3, transcript_ENST00000573667.1, transcript_ENST00000573895.1, transcript_ENST00000574048.2, transcript_ENST00000574139.6, transcript_ENST00000574257.5, transcript_ENST00000574266.1, transcript_ENST00000574437.5, transcript_ENST00000574544.1, transcript_ENST00000574632.5, transcript_ENST00000574875.1, transcript_ENST00000575770.5, transcript_ENST00000575934.5, transcript_ENST00000576668.1, transcript_ENST00000576964.5, and transcript_ENST00000577052.5.

[0108] In some embodiments, the ABR pre-mRNA transcript is encoded by a genetic sequence with at least about 80%, 85%, 90%, 95%, 96%, 97%, 98%, 99% or 100% sequence identity to the Ensembl reference number ENSG00000276016.4, ENSG00000278741.4 or ENSG00000159842.15 or a complement thereof. In some embodiments, the ABR pre-mRNA transcript comprises a sequence with at least about 80%, 85%, 90%, 95%, 96%, 97%, 98%, 99% or 100% sequence identity to a ABR pre-mRNA transcript or a complement thereof described herein.

[0109] In some embodiments, the targeted portion of the ABR pre-mRNA comprises a sequence with at least 80%, 85%, 90%, 95%, 97%, or 100% sequence identity to a region comprising at least 8 contiguous nucleic acids of a sequence of premrna_ENST00000291107.6, premrna_ENST00000302538.9, premrna_ENST00000536794.6, premrna_ENST00000543210.6, premrna_ENST00000544583.6, premrna_ENST00000570441.5, premrna_ENST00000570525.5, premrna_ENST00000570688.1, premrna_ENST00000571022.5, premrna_ENST00000571120.5, premrna_ENST00000571306.1, premrna_ENST00000571383.5, premrna_ENST00000571543.1, premrna_ENST00000571797.5, premrna_ENST00000571945.5, premrna_ENST00000572152.5, premrna_ENST00000572441.5, premrna_ENST00000572585.5, premrna_ENST00000572650.1, premrna_ENST00000573325.1, premrna_ENST00000573559.3, premrna_ENST00000573667.1, premrna_ENST00000573895.1, premrna_ENST00000574048.2, premrna_ENST00000574139.6, premrna_ENST00000574257.5, premrna_ENST00000574266.1, premrna_ENST00000574437.5, premrna_ENST00000574544.1, premrna_ENST00000574632.5, premrna_ENST00000574875.1, premrna_ENST00000575770.5, premrna_ENST00000575934.5, premrna_ENST00000576668.1, premrna_ENST00000576964.5, premrna_ENST00000577052.5 or a sequence of Table 3 or complements thereof. In some embodiments, the targeted portion of the ABR pre-mRNA comprises a sequence with at least 80%, 85%, 90%, 95%, 97%, or 100% sequence identity to a region comprising at least 8 contiguous nucleic acids of a sequence selected from the group consisting of SEQ ID NO: 194-SEQ ID NO: 201 or complements thereof. In some embodiments, the targeted portion of the ABR pre-mRNA comprises a sequence that is complementary to at least 8, 9, 10, 11, 12, 13, 14, 15, 16, 17, 18, 19 or 20 contiguous nucleic acids of a sequence of Table 6A or Table 6B or a complement thereof.

[0110] In some embodiments, the ASOs disclosed herein target a NSAE pre-mRNA transcribed from a ACAD9 genomic sequence. In some embodiments, the ASO targets a NSAE pre-mRNA transcript from a ACAD9 genomic sequence comprising a NSAE exon. In some embodiments, the ASO targets a NSAE pre-mRNA transcript from a ACAD9 genomic sequence comprising an intron flanking the 3′ splice site of the NSAE exon and an intron flanking the 5′ splice site of a NSAE exon. In some embodiments, the ASO targets a NSAE pre-mRNA transcript comprising a sequence selected from the group consisting of premrna_ENST00000308982.12, premrna_ENST00000505192.5, premrna_ENST00000505602.1, premrna_ENST00000505867.5, premrna_ENST00000508971.1, premrna_ENST00000511227.5, premrna_ENST00000511325.1, premrna_ENST00000511526.5, premrna_ENST00000512801.5, premrna_ENST00000514336.1, premrna_ENST00000514643.5, and premrna_ENST00000515429.1. In some embodiments, the ASO targets a ACAD9 pre-mRNA sequence comprising a NSAE exon. In some embodiments, the ASO targets a ACAD9 pre-mRNA sequence comprising an intron flanking the 3′ splice site of the NSAE exon. In some embodiments, the ASO targets a ACAD9 pre-mRNA sequence comprising an intron flanking the 5′ splice site of the NSAE exon. In some embodiments, the transcript is selected from the group consisting of transcript_ENST00000308982.12, transcript_ENST00000505192.5, transcript_ENST00000505602.1, transcript_ENST00000505867.5, transcript_ENST00000508971.1, transcript_ENST00000511227.5, transcript_ENST00000511325.1, transcript_ENST00000511526.5, transcript_ENST00000512801.5, transcript_ENST00000514336.1, transcript_ENST00000514643.5, and transcript_ENST00000515429.1.

[0111] In some embodiments, the ACAD9 pre-mRNA transcript is encoded by a genetic sequence with at least about 80%, 85%, 90%, 95%, 96%, 97%, 98%, 99% or 100% sequence identity to the Ensembl reference number ENSG00000177646.19 or a complement thereof. In some embodiments, the ACAD9 pre-mRNA transcript comprises a sequence with at least about 80%, 85%, 90%, 95%, 96%, 97%, 98%, 99% or 100% sequence identity to a ACAD9 pre-mRNA transcript or a complement thereof described herein.

[0112] In some embodiments, the targeted portion of the ACAD9 pre-mRNA comprises a sequence with at least 80%, 85%, 90%, 95%, 97%, or 100% sequence identity to a region comprising at least 8 contiguous nucleic acids of a sequence of premrna_ENST00000308982.12, premrna_ENST00000505192.5, premrna_ENST00000505602.1, premrna_ENST00000505867.5, premrna_ENST00000508971.1, premrna_ENST00000511227.5, premrna_ENST00000511325.1, premrna_ENST00000511526.5, premrna_ENST00000512801.5, premrna_ENST00000514336.1, premrna_ENST00000514643.5, premrna_ENST00000515429.1 or a sequence of Table 3 or complements thereof. In some embodiments, the targeted portion of the ACAD9 pre-mRNA comprises a sequence with at least 80%, 85%, 90%, 95%, 97%, or 100% sequence identity to a region comprising at least 8 contiguous nucleic acids of a sequence selected from the group consisting of SEQ ID NO: 202-SEQ ID NO: 207 or complements thereof. In some embodiments, the targeted portion of the ACAD9 pre-mRNA comprises a sequence that is complementary to at least 8, 9, 10, 11, 12, 13, 14, 15, 16, 17, 18, 19 or 20 contiguous nucleic acids of a sequence of Table 6A or Table 6B or a complement thereof.

[0113] In some embodiments, the ASOs disclosed herein target a NSAE pre-mRNA transcribed from a ACAP1 genomic sequence. In some embodiments, the ASO targets a NSAE pre-mRNA transcript from a ACAP1 genomic sequence comprising a NSAE exon. In some embodiments, the ASO targets a NSAE pre-mRNA transcript from a ACAP1 genomic sequence comprising an intron flanking the 3′ splice site of the NSAE exon and an intron flanking the 5′ splice site of a NSAE exon. In some embodiments, the ASO targets a NSAE pre-mRNA transcript comprising a sequence selected from the group consisting of premrna_ENST00000308982.12, premrna_ENST00000505192.5, premr-na_ENST00000505602.1, premrna_ENST00000505867.5, premrna_ENST00000508971.1, premr-na_ENST00000511227.5, premrna_ENST00000511325.1, premrna_ENST00000511526.5, premr-na_ENST00000512801.5, premrna_ENST00000514336.1, premrna_ENST00000514643.5, and premrna_ENST00000515429.1. In some embodiments, the ASO targets a ACAP1 pre-mRNA sequence comprising a NSAE exon. In some embodiments, the ASO targets a ACAP1 pre-mRNA sequence comprising an intron flanking the 3′ splice site of the NSAE exon. In some embodiments, the ASO targets a ACAP1 pre-mRNA sequence comprising an intron flanking the 5′ splice site of the NSAE exon. In some embodiments, the transcript is selected from the group consisting of transcript_ENST00000308982.12, transcript_ENST00000505192.5, tran-script_ENST00000505602.1, transcript_ENST00000505867.5, transcript_ENST00000508971.1, transcript_ENST00000511227.5, transcript_ENST00000511325.1, tran-script_ENST00000511526.5, transcript_ENST00000512801.5, transcript_ENST00000514336.1, transcript_ENST00000514643.5, and transcript_ENST00000515429.1.

[0114] In some embodiments, the ACAP1 pre-mRNA transcript is encoded by a genetic sequence with at least about 80%, 85%, 90%, 95%, 96%, 97%, 98%, 99% or 100% sequence identity to the Ensembl reference number ENSG00000072818.12 or ENSG00000288169.1 or a complement thereof. In some embodiments, the ACAP1 pre-mRNA transcript comprises a sequence with at least about 80%, 85%, 90%, 95%, 96%, 97%, 98%, 99% or 100% sequence identity to a ACAP1 pre-mRNA transcript or a complement thereof described herein.

[0115] In some embodiments, the targeted portion of the ACAP1 pre-mRNA comprises a sequence with at least 80%, 85%, 90%, 95%, 97%, or 100% sequence identity to a region comprising at least 8 contiguous nucleic acids of a sequence of premrna_ENST00000308982.12, premrna_ENST00000505192.5, premr-na_ENST00000505602.1, premrna_ENST00000505867.5, premrna_ENST00000508971.1, premrna_ENST00000511227.5, premrna_ENST00000511325.1, premrna_ENST00000511526.5, premrna_ENST00000512801.5, premrna_ENST00000514336.1, premrna_ENST00000514643.5, premrna_ENST00000515429.1, or a sequence of Table 3 or complements thereof. In some embodiments, the targeted portion of the ACAP1 pre-mRNA comprises a sequence with at least 80%, 85%, 90%, 95%, 97%, or 100% sequence identity to a region comprising at least 8 contiguous nucleic acids of a sequence selected from the group consisting of SEQ ID NO: 208-SEQ ID NO: 211 or complements thereof. In some embodiments, the targeted portion of the ACAP1 pre-mRNA comprises a sequence that is complementary to at least 8, 9, 10, 11, 12, 13, 14, 15, 16, 17, 18, 19 or 20 contiguous nucleic acids of a sequence of Table 6A or Table 6B or a complement thereof.

[0116] In some embodiments, the ASOs disclosed herein target a NSAE pre-mRNA transcribed from a ACOX2 genomic sequence. In some embodiments, the ASO targets a NSAE pre-mRNA transcript from a ACOX2 genomic sequence comprising a NSAE exon. In some embodiments, the ASO targets a NSAE pre-mRNA transcript from a ACOX2 genomic sequence comprising an intron flanking the 3′ splice site of the NSAE exon and an intron flanking the 5′ splice site of a NSAE exon. In some embodiments, the ASO targets a NSAE pre-mRNA transcript comprising a sequence selected from the group consisting of premrna_ENST00000302819.10, premrna_ENST00000459701.6, premrna_ENST00000459888.1, premrna_ENST00000460921.1, premrna_ENST00000466689.1, premrna_ENST00000466810.5, premrna_ENST00000467738.1, premrna_ENST00000474098.1, premrna_ENST00000475143.5, premrna_ENST00000480791.1, premrna_ENST00000481527.5, premrna_ENST00000489472.1, and premrna_ENST00000492530.1. In some embodiments, the ASO targets a ACOX2 pre-mRNA sequence comprising a NSAE exon. In some embodiments, the ASO targets a ACOX2 pre-mRNA sequence comprising an intron flanking the 3′ splice site of the NSAE exon. In some embodiments, the ASO targets a ACOX2 pre-mRNA sequence comprising an intron flanking the 5′ splice site of the NSAE exon. In some embodiments, the transcript is selected from the group consisting of transcript_ENST00000302819.10, transcript_ENST00000459701.6, transcript_ENST00000459888.1, transcript_ENST00000460921.1, transcript_ENST00000466689.1, transcript_ENST00000466810.5, transcript_ENST00000467738.1, transcript_ENST00000474098.1, transcript_ENST00000475143.5, transcript_ENST00000480791.1, transcript_ENST00000481527.5, transcript_ENST00000489472.1, and transcript_ENST00000492530.1.

[0117] In some embodiments, the ACOX2 pre-mRNA transcript is encoded by a genetic sequence with at least about 80%, 85%, 90%, 95%, 96%, 97%, 98%, 99% or 100% sequence identity to the Ensembl reference number ENSG00000168306.13 or a complement thereof. In some embodiments, the ACOX2 pre-mRNA transcript comprises a sequence with at least about 80%, 85%, 90%, 95%, 96%, 97%, 98%, 99% or 100% sequence identity to a ACOX2 pre-mRNA transcript or a complement thereof described herein.

[0118] In some embodiments, the targeted portion of the ACOX2 pre-mRNA comprises a sequence with at least 80%, 85%, 90%, 95%, 97%, or 100% sequence identity to a region comprising at least 8 contiguous nucleic acids of a sequence of premrna_ENST00000302819.10, premrna_ENST00000459701.6, premrna_ENST00000459888.1, premrna_ENST00000460921.1, premrna_ENST00000466689.1, premrna_ENST00000466810.5, premrna_ENST00000467738.1, premrna_ENST00000474098.1, premrna_ENST00000475143.5, premrna_ENST00000480791.1, premrna_ENST00000481527.5, premrna_ENST00000489472.1, premrna_ENST00000492530.1 or a sequence of Table 3 or complements thereof. In some embodiments, the targeted portion of the ACOX2 pre-mRNA comprises a sequence with at least 80%, 85%, 90%, 95%, 97%, or 100% sequence identity to a region comprising at least 8 contiguous nucleic acids of a sequence selected from the group consisting of SEQ ID NO: 212-SEQ ID NO: 215 or complements thereof. In some embodiments, the targeted portion of the ACOX2 pre-mRNA comprises a sequence that is complementary to at least 8, 9, 10, 11, 12, 13, 14, 15, 16, 17, 18, 19 or 20 contiguous nucleic acids of a sequence of Table 6A or Table 6B or a complement thereof.

[0119] In some embodiments, the ASOs disclosed herein target a NSAE pre-mRNA transcribed from a ACSF3 genomic sequence. In some embodiments, the ASO targets a NSAE pre-mRNA transcript from a ACSF3 genomic sequence comprising a NSAE exon. In some embodiments, the ASO targets a NSAE pre-mRNA transcript from a ACSF3 genomic sequence comprising an intron flanking the 3′ splice site of the NSAE exon and an intron flanking the 5′ splice site of a NSAE exon. In some embodiments, the ASO targets a NSAE pre-mRNA transcript comprising a sequence selected from the group consisting of premrna_ENST00000317447.9, premrna_ENST00000378345.8, premrna_ENST00000393145.5, premrna_ENST00000406948.7, premrna_ENST00000535176.1, premrna_ENST00000537116.5, premrna_ENST00000537155.1, premrna_ENST00000537290.5, premrna_ENST00000537895.5, premrna_ENST00000538340.5, premrna_ENST00000540697.5, premrna_ENST00000541755.2, premrna_ENST00000542688.5, premrna_ENST00000543676.1, premrna_ENST00000544543.5, premrna_ENST00000562204.1, premrna_ENST00000562750.1, premma_ENST00000614302.5, and premrna_ENST00000649953.1. In some embodiments, the ASO targets a ACSF3 pre-mRNA sequence comprising a NSAE exon. In some embodiments, the ASO targets a ACSF3 pre-mRNA sequence comprising an intron flanking the 3′ splice site of the NSAE exon. In some embodiments, the ASO targets a ACSF3 pre-mRNA sequence comprising an intron flanking the 5′ splice site of the NSAE exon. In some embodiments, the transcript is selected from the group consisting of transcript_ENST00000317447.9, transcript_ENST00000378345.8, transcript_ENST00000393145.5, transcript_ENST00000406948.7, transcript_ENST00000535176.1, transcript_ENST00000537116.5, transcript_ENST00000537155.1, transcript_ENST00000537290.5, transcript_ENST00000537895.5, transcript_ENST00000538340.5, transcript_ENST00000540697.5, transcript_ENST00000541755.2, transcript_ENST00000542688.5, transcript_ENST00000543676.1, transcript_ENST00000544543.5, transcript_ENST00000562204.1, transcript_ENST00000562750.1, transcript_ENST00000614302.5, and transcript_ENST00000649953.1.

[0120] In some embodiments, the ACSF3 pre-mRNA transcript is encoded by a genetic sequence with at least about 80%, 85%, 90%, 95%, 96%, 97%, 98%, 99% or 100% sequence identity to the Ensembl reference number ENSG00000176715.17 or a complement thereof. In some embodiments, the ACSF3 pre-mRNA transcript comprises a sequence with at least about 80%, 85%, 90%, 95%, 96%, 97%, 98%, 99% or 100% sequence identity to a ACSF3 pre-mRNA transcript or a complement thereof described herein.

[0121] In some embodiments, the targeted portion of the ACSF3 pre-mRNA comprises a sequence with at least 80%, 85%, 90%, 95%, 97%, or 100% sequence identity to a region comprising at least 8 contiguous nucleic acids of a sequence of premrna_ENST00000317447.9, premrna_ENST00000378345.8, premrna_ENST00000393145.5, premrna_ENST00000406948.7, premrna_ENST00000535176.1, premrna_ENST00000537116.5, premrna_ENST00000537155.1, premrna_ENST00000537290.5, premrna_ENST00000537895.5, premrna_ENST00000538340.5, premrna_ENST00000540697.5, premrna_ENST00000541755.2, premrna_ENST00000542688.5, premrna_ENST00000543676.1, premrna_ENST00000544543.5, premrna_ENST00000562204.1, premrna_ENST00000562750.1, premrna_ENST00000614302.5, premrna_ENST00000649953.1 or a sequence of Table 3 or complements thereof. In some embodiments, the targeted portion of the ACSF3 pre-mRNA comprises a sequence with at least 80%, 85%, 90%, 95%, 97%, or 100% sequence identity to a region comprising at least 8 contiguous nucleic acids of a sequence selected from the group consisting of SEQ ID NO: 216-SEQ ID NO: 221 or complements thereof. In some embodiments, the targeted portion of the ACSF3 pre-mRNA comprises a sequence that is complementary to at least 8, 9, 10, 11, 12, 13, 14, 15, 16, 17, 18, 19 or 20 contiguous nucleic acids of a sequence of Table 6A or Table 6B or a complement thereof.

[0122] In some embodiments, the ASOs disclosed herein target a NSAE pre-mRNA transcribed from a ACTN4 genomic sequence. In some embodiments, the ASO targets a NSAE pre-mRNA transcript from a ACTN4 genomic sequence comprising a NSAE exon. In some embodiments, the ASO targets a NSAE pre-mRNA transcript from a ACTN4 genomic sequence comprising an intron flanking the 3′ splice site of the NSAE exon and an intron flanking the 5′ splice site of a NSAE exon. In some embodiments, the ASO targets a NSAE pre-mRNA transcript comprising a sequence selected from the group consisting of premrna_ENST00000252699.7, premrna_ENST00000390009.7, premrna_ENST00000424234.6, premrna_ENST00000440400.1, premrna_ENST00000477174.1, premrna_ENST00000489451.1, premrna_ENST00000495553.1, premrna_ENST00000497637.5, premrna_ENST00000586538.1, premrna_ENST00000588618.5, and premrna_ENST00000589528.1. In some embodiments, the ASO targets a ACTN4 pre-mRNA sequence comprising a NSAE exon. In some embodiments, the ASO targets a ACTN4 pre-mRNA sequence comprising an intron flanking the 3′ splice site of the NSAE exon. In some embodiments, the ASO targets a ACTN4 pre-mRNA sequence comprising an intron flanking the 5′ splice site of the NSAE exon. In some embodiments, the transcript is selected from the group consisting of transcript_ENST00000252699.7, transcript_ENST00000390009.7, transcript_ENST00000424234.6, transcript_ENST00000440400.1, transcript_ENST00000477174.1, transcript_ENST00000489451.1, transcript_ENST00000495553.1, transcript_ENST00000497637.5, transcript_ENST00000586538.1, transcript_ENST00000588618.5, and transcript_ENST00000589528.1.

[0123] In some embodiments, the ACTN4 pre-mRNA transcript is encoded by a genetic sequence with at least about 80%, 85%, 90%, 95%, 96%, 97%, 98%, 99% or 100% sequence identity to the Ensembl reference number ENSG00000130402.12 or ENSG00000282844.2 or a complement thereof. In some embodiments, the ACTN4 pre-mRNA transcript comprises a sequence with at least about 80%, 85%, 90%, 95%, 96%, 97%, 98%, 99% or 100% sequence identity to a ACTN4 pre-mRNA transcript or a complement thereof described herein.

[0124] In some embodiments, the targeted portion of the ACTN4 pre-mRNA comprises a sequence with at least 80%, 85%, 90%, 95%, 97%, or 100% sequence identity to a region comprising at least 8 contiguous nucleic acids of a sequence of premrna_ENST00000252699.7, premrna_ENST00000390009.7, premrna_ENST00000424234.6, premrna_ENST00000440400.1, premrna_ENST00000477174.1, premrna_ENST00000489451.1, premrna_ENST00000495553.1, premrna_ENST00000497637.5, premrna_ENST00000586538.1, premrna_ENST00000588618.5, premrna_ENST00000589528.1 or a sequence of Table 3 or complements thereof. In some embodiments, the targeted portion of the ACTN4 pre-mRNA comprises a sequence with at least 80%, 85%, 90%, 95%, 97%, or 100% sequence identity to a region comprising at least 8 contiguous nucleic acids of a sequence selected from the group consisting of SEQ ID NO: 222-SEQ ID NO: 225 or complements thereof. In some embodiments, the targeted portion of the ACTN4 pre-mRNA comprises a sequence that is complementary to at least 8, 9, 10, 11, 12, 13, 14, 15, 16, 17, 18, 19 or 20 contiguous nucleic acids of a sequence of Table 6A or Table 6B or a complement thereof.

[0125] In some embodiments, the ASOs disclosed herein target a NSAE pre-mRNA transcribed from a ADAM17 genomic sequence. In some embodiments, the ASO targets a NSAE pre-mRNA transcript from a ADAM17 genomic sequence comprising a NSAE exon. In some embodiments, the ASO targets a NSAE pre-mRNA transcript from a ADAM17 genomic sequence comprising an intron flanking the 3′ splice site of the NSAE exon and an intron flanking the 5′ splice site of a NSAE exon. In some embodiments, the ASO targets a NSAE pre-mRNA transcript comprising a sequence selected from the group consisting of premrna_ENST00000310823.8, premrna_ENST00000478059.1, premrna_ENST00000618923.2, premrna_ENST00000647610.1, premrna_ENST00000647622.1, premrna_ENST00000647979.1, premrna_ENST00000648002.1, premrna_ENST00000648548.1, premrna_ENST00000648857.1, premrna_ENST00000649068.1, premrna_ENST00000649227.1, premrna_ENST00000649686.1, premrna_ENST00000649798.1, premrna_ENST00000649972.1, premrna_ENST00000650116.1, and premrna_ENST00000650241.1 In some embodiments, the ASO targets a ADAM17 pre-mRNA sequence comprising a NSAE exon. In some embodiments, the ASO targets a ADAM17 pre-mRNA sequence comprising an intron flanking the 3′ splice site of the NSAE exon. In some embodiments, the ASO targets a ADAM17 pre-mRNA sequence comprising an intron flanking the 5′ splice site of the NSAE exon. In some embodiments, the transcript is selected from the group consisting of transcript_ENST00000310823.8, transcript_ENST00000478059.1, transcript_ENST00000618923.2, transcript_ENST00000647610.1, transcript_ENST00000647622.1, transcript_ENST00000647979.1, transcript_ENST00000648002.1, transcript_ENST00000648548.1, transcript_ENST00000648857.1, transcript_ENST00000649068.1, transcript_ENST00000649227.1, transcript_ENST00000649686.1, transcript_ENST00000649798.1, transcript_ENST00000649972.1, transcript_ENST00000650116.1, and transcript_ENST00000650241.1.

[0126] In some embodiments, the ADAM17 pre-mRNA transcript is encoded by a genetic sequence with at least about 80%, 85%, 90%, 95%, 96%, 97%, 98%, 99% or 100% sequence identity to the Ensembl reference number ENSG00000151694.14 or a complement thereof. In some embodiments, the ADAM17 pre-mRNA transcript comprises a sequence with at least about 80%, 85%, 90%, 95%, 96%, 97%, 98%, 99% or 100% sequence identity to a ADAM17 pre-mRNA transcript or a complement thereof described herein.

[0127] In some embodiments, the targeted portion of the ADAM17 pre-mRNA comprises a sequence with at least 80%, 85%, 90%, 95%, 97%, or 100% sequence identity to a region comprising at least 8 contiguous nucleic acids of a sequence of premrna_ENST00000310823.8, premrna_ENST00000478059.1, premrna_ENST00000618923.2, premrna_ENST00000647610.1, premrna_ENST00000647622.1, premrna_ENST00000647979.1, premrna_ENST00000648002.1, premrna_ENST00000648548.1, premrna_ENST00000648857.1, premrna_ENST00000649068.1, premrna_ENST00000649227.1, premrna_ENST00000649686.1, premrna_ENST00000649798.1, premrna_ENST00000649972.1, premrna_ENST00000650116.1, premrna_ENST00000650241.1 or a sequence of Table 3 or complements thereof. In some embodiments, the targeted portion of the ADAM17 pre-mRNA comprises a sequence with at least 80%, 85%, 90%, 95%, 97%, or 100% sequence identity to a region comprising at least 8 contiguous nucleic acids of a sequence selected from the group consisting of SEQ ID NO: 226-SEQ ID NO: 229 or complements thereof. In some embodiments, the targeted portion of the ADAM17 pre-mRNA comprises a sequence that is complementary to at least 8, 9, 10, 11, 12, 13, 14, 15, 16, 17, 18, 19 or 20 contiguous nucleic acids of a sequence of Table 6A or Table 6B or a complement thereof.

[0128] In some embodiments, the ASOs disclosed herein target a NSAE pre-mRNA transcribed from a ADAMTS13 genomic sequence. In some embodiments, the ASO targets a NSAE pre-mRNA transcript from a ADAMTS13 genomic sequence comprising a NSAE exon. In some embodiments, the ASO targets a NSAE pre-mRNA transcript from a ADAMTS13 genomic sequence comprising an intron flanking the 3′ splice site of the NSAE exon and an intron flanking the 5′ splice site of a NSAE exon. In some embodiments, the ASO targets a NSAE pre-mRNA transcript comprising a sequence selected from the group consisting of premrna_ENST00000355699.6, premrna_ENST00000356589.6, premrna_ENST00000371910.1, premrna_ENST00000371911.7, premrna_ENST00000371916.5, premrna_ENST00000371929.7, premrna_ENST00000474918.1, premrna_ENST00000485925.5, and premrna_ENST00000495234.5. In some embodiments, the ASO targets a ADAMTS13 pre-mRNA sequence comprising a NSAE exon. In some embodiments, the ASO targets a ADAMTS13 pre-mRNA sequence comprising an intron flanking the 3′ splice site of the NSAE exon. In some embodiments, the ASO targets a ADAMTS13 pre-mRNA sequence comprising an intron flanking the 5′ splice site of the NSAE exon. In some embodiments, the transcript is selected from the group consisting of transcript_ENST00000355699.6, transcript_ENST00000356589.6, transcript_ENST00000371910.1, transcript_ENST00000371911.7, transcript_ENST00000371916.5, transcript_ENST00000371929.7, transcript_ENST00000474918.1, transcript_ENST00000485925.5, and transcript_ENST00000495234.5.

[0129] In some embodiments, the ADAMTS13 pre-mRNA transcript is encoded by a genetic sequence with at least about 80%, 85%, 90%, 95%, 96%, 97%, 98%, 99% or 100% sequence identity to the Ensembl reference number ENSG00000160323.18 or ENSG00000281244.2 or a complement thereof. In some embodiments, the ADAMTS13 pre-mRNA transcript comprises a sequence with at least about 80%, 85%, 90%, 95%, 96%, 97%, 98%, 99% or 100% sequence identity to a ADAMTS13 pre-mRNA transcript or a complement thereof described herein.

[0130] In some embodiments, the targeted portion of the ADAMTS13 pre-mRNA comprises a sequence with at least 80%, 85%, 90%, 95%, 97%, or 100% sequence identity to a region comprising at least 8 contiguous nucleic acids of a sequence of premrna_ENST00000355699.6, premrna_ENST00000356589.6, premrna_ENST00000371910.1, premrna_ENST00000371911.7, premrna_ENST00000371916.5, premrna_ENST00000371929.7, premrna_ENST00000474918.1, premrna_ENST00000485925.5, premrna_ENST00000495234.5, or a sequence of Table 3 or complements thereof. In some embodiments, the targeted portion of the ADAMTS13 pre-mRNA comprises a sequence with at least 80%, 85%, 90%, 95%, 97%, or 100% sequence identity to a region comprising at least 8 contiguous nucleic acids of a sequence selected from the group consisting of SEQ ID NO: 230-SEQ ID NO: 238 or complements thereof. In some embodiments, the targeted portion of the ADAMTS13 pre-mRNA comprises a sequence that is complementary to at least 8, 9, 10, 11, 12, 13, 14, 15, 16, 17, 18, 19 or 20 contiguous nucleic acids of a sequence of Table 6A or Table 6B or a complement thereof.

[0131] In some embodiments, the ASOs disclosed herein target a NSAE pre-mRNA transcribed from a AKR1E2 genomic sequence. In some embodiments, the ASO targets a NSAE pre-mRNA transcript from a AKR1E2 genomic sequence comprising a NSAE exon. In some embodiments, the ASO targets a NSAE pre-mRNA transcript from a AKR1E2 genomic sequence comprising an intron flanking the 3′ splice site of the NSAE exon and an intron flanking the 5′ splice site of a NSAE exon. In some embodiments, the ASO targets a NSAE pre-mRNA transcript comprising a sequence selected from the group consisting of premrna_ENST00000298375.12, premrna_ENST00000334019.4, premrna_ENST00000345253.9, premrna_ENST00000441590.5, premrna_ENST00000462718.7, premrna_ENST00000463345.5, premrna_ENST00000474119.5, premrna_ENST00000487985.1, premrna_ENST00000525281.5, premrna_ENST00000525572.1, premrna_ENST00000525627.1, premrna_ENST00000532248.5, and premrna_ENST00000533295.5. In some embodiments, the ASO targets a AKR1E2 pre-mRNA sequence comprising a NSAE exon. In some embodiments, the ASO targets a AKR1E2 pre-mRNA sequence comprising an intron flanking the 3′ splice site of the NSAE exon. In some embodiments, the ASO targets a AKR1E2 pre-mRNA sequence comprising an intron flanking the 5′ splice site of the NSAE exon. In some embodiments, the transcript is selected from the group consisting of transcript_ENST00000298375.12, transcript_ENST00000334019.4, transcript_ENST00000345253.9, transcript_ENST00000441590.5, transcript_ENST00000462718.7, transcript_ENST00000463345.5, transcript_ENST00000474119.5, transcript_ENST00000487985.1, transcript_ENST00000525281.5, transcript_ENST00000525572.1, transcript_ENST00000525627.1, transcript_ENST00000532248.5, and transcript_ENST00000533295.5.

[0132] In some embodiments, the AKR1E2 pre-mRNA transcript is encoded by a genetic sequence with at least about 80%, 85%, 90%, 95%, 96%, 97%, 98%, 99% or 100% sequence identity to the Ensembl reference number ENSG00000165568.18 or a complement thereof. In some embodiments, the AKR1E2 pre-mRNA transcript comprises a sequence with at least about 80%, 85%, 90%, 95%, 96%, 97%, 98%, 99% or 100% sequence identity to a AKR1E2 pre-mRNA transcript or a complement thereof described herein.

[0133] In some embodiments, the targeted portion of the AKR1E2 pre-mRNA comprises a sequence with at least 80%, 85%, 90%, 95%, 97%, or 100% sequence identity to a region comprising at least 8 contiguous nucleic acids of a sequence of premrna_ENST00000298375.12, premrna_ENST00000334019.4, premrna_ENST00000345253.9, premrna_ENST00000441590.5, premrna_ENST00000462718.7, premrna_ENST00000463345.5, premrna_ENST00000474119.5, premrna_ENST00000487985.1, premrna_ENST00000525281.5, premrna_ENST00000525572.1, premrna_ENST00000525627.1, premrna_ENST00000532248.5, premrna_ENST00000533295.5 or a sequence of Table 3 or complements thereof. In some embodiments, the targeted portion of the AKR1E2 pre-mRNA comprises a sequence with at least 80%, 85%, 90%, 95%, 97%, or 100% sequence identity to a region comprising at least 8 contiguous nucleic acids of a sequence selected from the group consisting of SEQ ID NO: 239-SEQ ID NO: 242 or complements thereof. In some embodiments, the targeted portion of the AKR1E2 pre-mRNA comprises a sequence that is complementary to at least 8, 9, 10, 11, 12, 13, 14, 15, 16, 17, 18, 19 or 20 contiguous nucleic acids of a sequence of Table 6A or Table 6B or a complement thereof.

[0134] In some embodiments, the ASOs disclosed herein target a NSAE pre-mRNA transcribed from a ALAD genomic sequence. In some embodiments, the ASO targets a NSAE pre-mRNA transcript from a ALAD genomic sequence comprising a NSAE exon. In some embodiments, the ASO targets a NSAE pre-mRNA transcript from a ALAD genomic sequence comprising an intron flanking the 3′ splice site of the NSAE exon and an intron flanking the 5′ splice site of a NSAE exon. In some embodiments, the ASO targets a NSAE pre-mRNA transcript comprising a sequence selected from the group consisting of premrna_ENST00000409155.8, premrna_ENST00000445750.1, premrna_ENST00000448137.5, premrna_ENST00000452726.1, premrna_ENST00000464749.5, premrna_ENST00000468504.5, premrna_ENST00000482001.1, premrna_ENST00000482847.5, and premrna_ENST00000494848.1. In some embodiments, the ASO targets a ALAD pre-mRNA sequence comprising a NSAE exon. In some embodiments, the ASO targets a ALAD pre-mRNA sequence comprising an intron flanking the 3′ splice site of the NSAE exon. In some embodiments, the ASO targets a ALAD pre-mRNA sequence comprising an intron flanking the 5′ splice site of the NSAE exon. In some embodiments, the transcript is selected from the group consisting of transcript_ENST00000409155.8, transcript_ENST00000445750.1, transcript_ENST00000448137.5, transcript_ENST00000452726.1, transcript_ENST00000464749.5, transcript_ENST00000468504.5, transcript_ENST00000482001.1, transcript_ENST00000482847.5, and transcript_ENST00000494848.1.

[0135] In some embodiments, the ALAD pre-mRNA transcript is encoded by a genetic sequence with at least about 80%, 85%, 90%, 95%, 96%, 97%, 98%, 99% or 100% sequence identity to the Ensembl reference number ENSG00000148218.16 or a complement thereof. In some embodiments, the ALAD pre-mRNA transcript comprises a sequence with at least about 80%, 85%, 90%, 95%, 96%, 97%, 98%, 99% or 100% sequence identity to a ALAD pre-mRNA transcript or a complement thereof described herein.

[0136] In some embodiments, the targeted portion of the ALAD pre-mRNA comprises a sequence with at least 80%, 85%, 90%, 95%, 97%, or 100% sequence identity to a region comprising at least 8 contiguous nucleic acids of a sequence of premrna_ENST00000409155.8, premrna_ENST00000445750.1, premrna_ENST00000448137.5, premrna_ENST00000452726.1, premrna_ENST00000464749.5, premrna_ENST00000468504.5, premrna_ENST00000482001.1, premrna_ENST00000482847.5, premrna_ENST00000494848.1 or a sequence of Table 3 or complements thereof. In some embodiments, the targeted portion of the ALAD pre-mRNA comprises a sequence with at least 80%, 85%, 90%, 95%, 97%, or 100% sequence identity to a region comprising at least 8 contiguous nucleic acids of a sequence selected from the group consisting of SEQ ID NO: 243-SEQ ID NO: 248 or complements thereof. In some embodiments, the targeted portion of the ALAD pre-mRNA comprises a sequence that is complementary to at least 8, 9, 10, 11, 12, 13, 14, 15, 16, 17, 18, 19 or 20 contiguous nucleic acids of a sequence of Table 6A or Table 6B or a complement thereof.

[0137] In some embodiments, the ASOs disclosed herein target a NSAE pre-mRNA transcribed from a ALG3 genomic sequence. In some embodiments, the ASO targets a NSAE pre-mRNA transcript from a ALG3 genomic sequence comprising a NSAE exon. In some embodiments, the ASO targets a NSAE pre-mRNA transcript from a ALG3 genomic sequence comprising an intron flanking the 3′ splice site of the NSAE exon and an intron flanking the 5′ splice site of a NSAE exon. In some embodiments, the ASO targets a NSAE pre-mRNA transcript comprising a sequence selected from the group consisting of premrna_ENST00000397676.8, premrna_ENST00000411922.5, premrna_ENST00000414845.5, premrna_ENST00000423996.5, premrna_ENST00000445626.6, premrna_ENST00000446569.1, premrna_ENST00000455059.5, premrna_ENST00000461415.5, premrna_ENST00000462735.6, premrna_ENST00000463495.5, premrna_ENST00000477959.1, premrna_ENST00000482048.1, premrna_ENST00000485912.1, premrna_ENST00000488976.5. In some embodiments, the ASO targets a ALG3 pre-mRNA sequence comprising a NSAE exon. In some embodiments, the ASO targets a ALG3 pre-mRNA sequence comprising an intron flanking the 3′ splice site of the NSAE exon. In some embodiments, the ASO targets a ALG3 pre-mRNA sequence comprising an intron flanking the 5′ splice site of the NSAE exon. In some embodiments, the transcript is selected from the group consisting of transcript_ENST00000397676.8, transcript_ENST00000411922.5, transcript_ENST00000414845.5, transcript_ENST00000423996.5, transcript_ENST00000445626.6, transcript_ENST00000446569.1, transcript_ENST00000455059.5, transcript_ENST00000461415.5, transcript_ENST00000462735.6, transcript_ENST00000463495.5, transcript_ENST00000477959.1, transcript_ENST00000482048.1, transcript_ENST00000485912.1, and transcript_ENST00000488976.5.

[0138] In some embodiments, the ALG3 pre-mRNA transcript is encoded by a genetic sequence with at least about 80%, 85%, 90%, 95%, 96%, 97%, 98%, 99% or 100% sequence identity to the Ensembl reference number ENSG00000214160.10 or a complement thereof. In some embodiments, the ALG3 pre-mRNA transcript comprises a sequence with at least about 80%, 85%, 90%, 95%, 96%, 97%, 98%, 99% or 100% sequence identity to a ALG3 pre-mRNA transcript or a complement thereof described herein.

[0139] In some embodiments, the targeted portion of the ALG3 pre-mRNA comprises a sequence with at least 80%, 85%, 90%, 95%, 97%, or 100% sequence identity to a region comprising at least 8 contiguous nucleic acids of a sequence of premrna_ENST00000397676.8, premrna_ENST00000411922.5, premr-na_ENST00000414845.5, premrna_ENST00000423996.5, premrna_ENST00000445626.6, premrna_ENST00000446569.1, premrna_ENST00000455059.5, premrna_ENST00000461415.5, premrna_ENST00000462735.6, premrna_ENST00000463495.5, premrna_ENST00000477959.1, premrna_ENST00000482048.1, premrna_ENST00000485912.1, premrna_ENST00000488976.5, or a sequence of Table 3 or complements thereof. In some embodiments, the targeted portion of the ALG3 pre-mRNA comprises a sequence with at least 80%, 85%, 90%, 95%, 97%, or 100% sequence identity to a region comprising at least 8 contiguous nucleic acids of a sequence selected from the group consisting of SEQ ID NO: 249-SEQ ID NO: 255 or complements thereof. In some embodiments, the targeted portion of the ALG3 pre-mRNA comprises a sequence that is complementary to at least 8, 9, 10, 11, 12, 13, 14, 15, 16, 17, 18, 19 or 20 contiguous nucleic acids of a sequence of Table 6A or Table 6B or a complement thereof.

[0140] In some embodiments, the ASOs disclosed herein target a NSAE pre-mRNA transcribed from a ANKRD29 genomic sequence. In some embodiments, the ASO targets a NSAE pre-mRNA transcript from a ANKRD29 genomic sequence comprising a NSAE exon. In some embodiments, the ASO targets a NSAE pre-mRNA transcript from a ANKRD29 genomic sequence comprising an intron flanking the 3′ splice site of the NSAE exon and an intron flanking the 5′ splice site of a NSAE exon. In some embodiments, the ASO targets a NSAE pre-mRNA transcript comprising a sequence selected from the group consisting of premrna_ENST00000322980.13, premrna_ENST00000585908.2, premrna_ENST00000586087.1, premrna_ENST00000586511.1, premrna_ENST00000587763.1, premrna_ENST00000591280.5, premrna_ENST00000591617.1, and premrna_ENST00000592179.6. In some embodiments, the ASO targets a ANKRD29 pre-mRNA sequence comprising a NSAE exon. In some embodiments, the ASO targets a ANKRD29 pre-mRNA sequence comprising an intron flanking the 3′ splice site of the NSAE exon. In some embodiments, the ASO targets a ANKRD29 pre-mRNA sequence comprising an intron flanking the 5′ splice site of the NSAE exon. In some embodiments, the transcript is selected from the group consisting of transcript_ENST00000322980.13, transcript_ENST00000585908.2, transcript_ENST00000586087.1, transcript_ENST00000586511.1, transcript_ENST00000587763.1, transcript_ENST00000591280.5, transcript_ENST00000591617.1, and transcript_ENST00000592179.6.

[0141] In some embodiments, the ANKRD29 pre-mRNA transcript is encoded by a genetic sequence with at least about 80%, 85%, 90%, 95%, 96%, 97%, 98%, 99% or 100% sequence identity to the Ensembl reference number ENSG00000154065.17 or a complement thereof. In some embodiments, the ANKRD29 pre-mRNA transcript comprises a sequence with at least about 80%, 85%, 90%, 95%, 96%, 97%, 98%, 99% or 100% sequence identity to a ANKRD29 pre-mRNA transcript or a complement thereof described herein.

[0142] In some embodiments, the targeted portion of the ANKRD29 pre-mRNA comprises a sequence with at least 80%, 85%, 90%, 95%, 97%, or 100% sequence identity to a region comprising at least 8 contiguous nucleic acids of a sequence of premrna_ENST00000322980.13, premrna_ENST00000585908.2, premrna_ENST00000586087.1, premrna_ENST00000586511.1, premrna_ENST00000587763.1, premrna_ENST00000591280.5, premrna_ENST00000591617.1, premrna_ENST00000592179.6 or a sequence of Table 3 or complements thereof. In some embodiments, the targeted portion of the ANKRD29 pre-mRNA comprises a sequence with at least 80%, 85%, 90%, 95%, 97%, or 100% sequence identity to a region comprising at least 8 contiguous nucleic acids of a sequence selected from the group consisting of SEQ ID NO: 256-SEQ ID NO: 259 or complements thereof. In some embodiments, the targeted portion of the ANKRD29 pre-mRNA comprises a sequence that is complementary to at least 8, 9, 10, 11, 12, 13, 14, 15, 16, 17, 18, 19 or 20 contiguous nucleic acids of a sequence of Table 6A or Table 6B or a complement thereof.

[0143] In some embodiments, the ASOs disclosed herein target a NSAE pre-mRNA transcribed from a ANKS3 genomic sequence. In some embodiments, the ASO targets a NSAE pre-mRNA transcript from a ANKS3 genomic sequence comprising a NSAE exon. In some embodiments, the ASO targets a NSAE pre-mRNA transcript from a ANKS3 genomic sequence comprising an intron flanking the 3′ splice site of the NSAE exon and an intron flanking the 5′ splice site of a NSAE exon. In some embodiments, the ASO targets a NSAE pre-mRNA transcript comprising a sequence selected from the group consisting of premrna_ENST00000304283.9, premrna_ENST00000446014.6, premrna_ENST00000450067.6, premrna_ENST00000585773.5, premrna_ENST00000586159.5, premrna_ENST00000586166.5, premrna_ENST00000586605.5, premrna_ENST00000586632.1, premrna_ENST00000587005.5, premrna_ENST00000588398.1, premrna_ENST00000588513.1, premrna_ENST00000589035.5, premrna_ENST00000589065.5, premrna_ENST00000590147.5, premrna_ENST00000590193.5, premrna_ENST00000590689.1, premrna_ENST00000590730.5, premrna_ENST00000590803.5, premrna_ENST00000591185.5, premrna_ENST00000591281.5, premrna_ENST00000591653.5, premrna_ENST00000592068.5, premrna_ENST00000592077.5, premrna_ENST00000592190.1, premrna_ENST00000592421.5, premrna_ENST00000592698.5, premrna_ENST00000592711.5, premrna_ENST00000592840.1, premrna_ENST00000593120.5, and premrna_ENST00000614075.4. In some embodiments, the ASO targets a ANKS3 pre-mRNA sequence comprising a NSAE exon. In some embodiments, the ASO targets a ANKS3 pre-mRNA sequence comprising an intron flanking the 3′ splice site of the NSAE exon. In some embodiments, the ASO targets a ANKS3 pre-mRNA sequence comprising an intron flanking the 5′ splice site of the NSAE exon. In some embodiments, the transcript is selected from the group consisting of transcript_ENST00000304283.9, transcript_ENST00000446014.6, transcript_ENST00000450067.6, transcript_ENST00000585773.5, transcript_ENST00000586159.5, transcript_ENST00000586166.5, transcript_ENST00000586605.5, transcript_ENST00000586632.1, transcript_ENST00000587005.5, transcript_ENST00000588398.1, transcript_ENST00000588513.1, transcript_ENST00000589035.5, transcript_ENST00000589065.5, transcript_ENST00000590147.5, transcript_ENST00000590193.5, transcript_ENST00000590689.1, transcript_ENST00000590730.5, transcript_ENST00000590803.5, transcript_ENST00000591185.5, transcript_ENST00000591281.5, transcript_ENST00000591653.5, transcript_ENST00000592068.5, transcript_ENST00000592077.5, transcript_ENST00000592190.1, transcript_ENST00000592421.5, transcript_ENST00000592698.5, transcript_ENST00000592711.5, transcript_ENST00000592840.1, transcript_ENST00000593120.5, and transcript_ENST00000614075.4.

[0144] In some embodiments, the ANKS3 pre-mRNA transcript is encoded by a genetic sequence with at least about 80%, 85%, 90%, 95%, 96%, 97%, 98%, 99% or 100% sequence identity to the Ensembl reference number ENSG00000168096.15 or a complement thereof. In some embodiments, the ANKS3 pre-mRNA transcript comprises a sequence with at least about 80%, 85%, 90%, 95%, 96%, 97%, 98%, 99% or 100% sequence identity to a ANKS3 pre-mRNA transcript or a complement thereof described herein.

[0145] In some embodiments, the targeted portion of the ANKS3 pre-mRNA comprises a sequence with at least 80%, 85%, 90%, 95%, 97%, or 100% sequence identity to a region comprising at least 8 contiguous nucleic acids of a sequence of premrna_ENST00000304283.9, premrna_ENST00000446014.6, premrna_ENST00000450067.6, premrna_ENST00000585773.5, premrna_ENST00000586159.5, premrna_ENST00000586166.5, premrna_ENST00000586605.5, premrna_ENST00000586632.1, premrna_ENST00000587005.5, premrna_ENST00000588398.1, premrna_ENST00000588513.1, premrna_ENST00000589035.5, premrna_ENST00000589065.5, premrna_ENST00000590147.5, premrna_ENST00000590193.5, premrna_ENST00000590689.1, premrna_ENST00000590730.5, premrna_ENST00000590803.5, premrna_ENST00000591185.5, premrna_ENST00000591281.5, premrna_ENST00000591653.5, premrna_ENST00000592068.5, premrna_ENST00000592077.5, premrna_ENST00000592190.1, premrna_ENST00000592421.5, premrna_ENST00000592698.5, premrna_ENST00000592711.5, premrna_ENST00000592840.1, premrna_ENST00000593120.5, premrna_ENST00000614075.4, or a sequence of Table 3 or complements thereof. In some embodiments, the targeted portion of the ANKS3 pre-mRNA comprises a sequence with at least 80%, 85%, 90%, 95%, 97%, or 100% sequence identity to a region comprising at least 8 contiguous nucleic acids of a sequence selected from the group consisting of SEQ ID NO: 260-SEQ ID NO: 263 or complements thereof. In some embodiments, the targeted portion of the ANKS3 pre-mRNA comprises a sequence that is complementary to at least 8, 9, 10, 11, 12, 13, 14, 15, 16, 17, 18, 19 or 20 contiguous nucleic acids of a sequence of Table 6A or Table 6B or a complement thereof.

[0146] In some embodiments, the ASOs disclosed herein target a NSAE pre-mRNA transcribed from a ANO4 genomic sequence. In some embodiments, the ASO targets a NSAE pre-mRNA transcript from a ANO4 genomic sequence comprising a NSAE exon. In some embodiments, the ASO targets a NSAE pre-mRNA transcript from a ANO4 genomic sequence comprising an intron flanking the 3′ splice site of the NSAE exon and an intron flanking the 5′ splice site of a NSAE exon. In some embodiments, the ASO targets a NSAE pre-mRNA transcript comprising a sequence selected from the group consisting of premrna_ENST00000392977.8, premrna_ENST00000392979.7, premrna_ENST00000546991.1, premrna_ENST00000548940.1, premrna_ENST00000549155.6, premrna_ENST00000549234.1, premrna_ENST00000550015.1, premrna_ENST00000551148.1, and premrna_ENST00000644049.1. In some embodiments, the ASO targets a ANO4 pre-mRNA sequence comprising a NSAE exon. In some embodiments, the ASO targets a ANO4 pre-mRNA sequence comprising an intron flanking the 3′ splice site of the NSAE exon. In some embodiments, the ASO targets a ANO4 pre-mRNA sequence comprising an intron flanking the 5′ splice site of the NSAE exon. In some embodiments, the transcript is selected from the group consisting of transcript_ENST00000392977.8, transcript_ENST00000392979.7, transcript_ENST00000546991.1, transcript_ENST00000548940.1, transcript_ENST00000549155.6, transcript_ENST00000549234.1, transcript_ENST00000550015.1, transcript_ENST00000551148.1, and transcript_ENST00000644049.1.

[0147] In some embodiments, the ANO4 pre-mRNA transcript is encoded by a genetic sequence with at least about 80%, 85%, 90%, 95%, 96%, 97%, 98%, 99% or 100% sequence identity to the Ensembl reference number ENSG00000151572.18 or ENSG00000262139.9 or a complement thereof. In some embodiments, the ANO4 pre-mRNA transcript comprises a sequence with at least about 80%, 85%, 90%, 95%, 96%, 97%, 98%, 99% or 100% sequence identity to a ANO4 pre-mRNA transcript or a complement thereof described herein.

[0148] In some embodiments, the targeted portion of the ANO4 pre-mRNA comprises a sequence with at least 80%, 85%, 90%, 95%, 97%, or 100% sequence identity to a region comprising at least 8 contiguous nucleic acids of a sequence of premrna_ENST00000392977.8, premrna_ENST00000392979.7, premrna_ENST00000546991.1, premrna_ENST00000548940.1, premrna_ENST00000549155.6, premrna_ENST00000549234.1, premrna_ENST00000550015.1, premrna_ENST00000551148.1, premrna_ENST00000644049.1 or a sequence of Table 3 or complements thereof. In some embodiments, the targeted portion of the ANO4 pre-mRNA comprises a sequence with at least 80%, 85%, 90%, 95%, 97%, or 100% sequence identity to a region comprising at least 8 contiguous nucleic acids of a sequence selected from the group consisting of SEQ ID NO: 264-SEQ ID NO: 267 or complements thereof. In some embodiments, the targeted portion of the ANO4 pre-mRNA comprises a sequence that is complementary to at least 8, 9, 10, 11, 12, 13, 14, 15, 16, 17, 18, 19 or 20 contiguous nucleic acids of a sequence of Table 6A or Table 6B or a complement thereof.

[0149] In some embodiments, the ASOs disclosed herein target a NSAE pre-mRNA transcribed from a AP3B2 genomic sequence. In some embodiments, the ASO targets a NSAE pre-mRNA transcript from a AP3B2 genomic sequence comprising a NSAE exon. In some embodiments, the ASO targets a NSAE pre-mRNA transcript from a AP3B2 genomic sequence comprising an intron flanking the 3′ splice site of the NSAE exon and an intron flanking the 5′ splice site of a NSAE exon. In some embodiments, the ASO targets a NSAE pre-mRNA transcript comprising a sequence selected from the group consisting of premrna_ENST00000261722.8, premrna_ENST00000535348.5, premrna_ENST00000535359.6, premrna_ENST00000535385.6, premrna_ENST00000535513.2, premrna_ENST00000537735.2, premrna_ENST00000541693.5, premrna_ENST00000542200.2, premrna_ENST00000543938.6, premrna_ENST00000559888.1, premrna_ENST00000560529.1, premrna_ENST00000561455.5, premrna_ENST00000620652.4, premrna_ENST00000642989.2, premrna_ENST00000652847.1, premrna_ENST00000657321.1, premrna_ENST00000659252.1, premrna_ENST00000660624.1, premrna_ENST00000661532.1, premrna_ENST00000663651.1, premrna_ENST00000664460.1, premrna_ENST00000665513.1, premrna_ENST00000666055.1, premrna_ENST00000666672.1, premrna_ENST00000666894.1, premrna_ENST00000666973.1, premrna_ENST00000667758.1, premrna_ENST00000668385.1, premrna_ENST00000668458.1, premrna_ENST00000668990.2, premrna_ENST00000669880.1, and premrna_ENST00000669930.1. In some embodiments, the ASO targets a AP3B2 pre-mRNA sequence comprising a NSAE exon. In some embodiments, the ASO targets a AP3B2 pre-mRNA sequence comprising an intron flanking the 3′ splice site of the NSAE exon. In some embodiments, the ASO targets a AP3B2 pre-mRNA sequence comprising an intron flanking the 5′ splice site of the NSAE exon. In some embodiments, the transcript is selected from the group consisting of transcript_ENST00000261722.8, transcript_ENST00000535348.5, transcript_ENST00000535359.6, transcript_ENST00000535385.6, transcript_ENST00000535513.2, transcript_ENST00000537735.2, transcript_ENST00000541693.5, transcript_ENST00000542200.2, transcript_ENST00000543938.6, transcript_ENST00000559888.1, transcript_ENST00000560529.1, transcript_ENST00000561455.5, transcript_ENST00000620652.4, transcript_ENST00000642989.2, transcript_ENST00000652847.1, transcript_ENST00000657321.1, transcript_ENST00000659252.1, transcript_ENST00000660624.1, transcript_ENST00000661532.1, transcript_ENST00000663651.1, transcript_ENST00000664460.1, transcript_ENST00000665513.1, transcript_ENST00000666055.1, transcript_ENST00000666672.1, transcript_ENST00000666894.1, transcript_ENST00000666973.1, transcript_ENST00000667758.1, transcript_ENST00000668385.1, transcript_ENST00000668458.1, transcript_ENST00000668990.2, transcript_ENST00000669880.1, and transcript_ENST00000669930.1.

[0150] In some embodiments, the AP3B2 pre-mRNA transcript is encoded by a genetic sequence with at least about 80%, 85%, 90%, 95%, 96%, 97%, 98%, 99% or 100% sequence identity to the Ensembl reference number ENSG00000103723.15 or a complement thereof. In some embodiments, the AP3B2 pre-mRNA transcript comprises a sequence with at least about 80%, 85%, 90%, 95%, 96%, 97%, 98%, 99% or 100% sequence identity to a AP3B2 pre-mRNA transcript or a complement thereof described herein.

[0151] In some embodiments, the targeted portion of the AP3B2 pre-mRNA comprises a sequence with at least 80%, 85%, 90%, 95%, 97%, or 100% sequence identity to a region comprising at least 8 contiguous nucleic acids of a sequence of premrna_ENST00000261722.8, premrna_ENST00000535348.5, premrna_ENST00000535359.6, premrna_ENST00000535385.6, premrna_ENST00000535513.2, premrna_ENST00000537735.2, premrna_ENST00000541693.5, premrna_ENST00000542200.2, premrna_ENST00000543938.6, premrna_ENST00000559888.1, premrna_ENST00000560529.1, premrna_ENST00000561455.5, premrna_ENST00000620652.4, premrna_ENST00000642989.2, premrna_ENST00000652847.1, premrna_ENST00000657321.1, premrna_ENST00000659252.1, premrna_ENST00000660624.1, premrna_ENST00000661532.1, premrna_ENST00000663651.1, premrna_ENST00000664460.1, premrna_ENST00000665513.1, premrna_ENST00000666055.1, premrna_ENST00000666672.1, premrna_ENST00000666894.1, premrna_ENST00000666973.1, premrna_ENST00000667758.1, premrna_ENST00000668385.1, premrna_ENST00000668458.1, premrna_ENST00000668990.2, premrna_ENST00000669880.1, premrna_ENST00000669930.1 or a sequence of Table 3 or complements thereof. In some embodiments, the targeted portion of the AP3B2 pre-mRNA comprises a sequence with at least 80%, 85%, 90%, 95%, 97%, or 100% sequence identity to a region comprising at least 8 contiguous nucleic acids of a sequence selected from the group consisting of SEQ ID NO: 268-SEQ ID NO: 271 or complements thereof. In some embodiments, the targeted portion of the AP3B2 pre-mRNA comprises a sequence that is complementary to at least 8, 9, 10, 11, 12, 13, 14, 15, 16, 17, 18, 19 or 20 contiguous nucleic acids of a sequence of Table 6A or Table 6B or a complement thereof.

[0152] In some embodiments, the ASOs disclosed herein target a NSAE pre-mRNA transcribed from a AP3M1 genomic sequence. In some embodiments, the ASO targets a NSAE pre-mRNA transcript from a AP3M1 genomic sequence comprising a NSAE exon. In some embodiments, the ASO targets a NSAE pre-mRNA transcript from a AP3M1 genomic sequence comprising an intron flanking the 3′ splice site of the NSAE exon and an intron flanking the 5′ splice site of a NSAE exon. In some embodiments, the ASO targets a NSAE pre-mRNA transcript comprising a sequence selected from the group consisting of premrna_ENST00000355264.8, premrna_ENST00000372745.1, premrna_ENST00000480373.1, and premrna_ENST00000487653.1. In some embodiments, the ASO targets aAP3M1 pre-mRNA sequence comprising a NSAE exon. In some embodiments, the ASO targets a AP3M1 pre-mRNA sequence comprising an intron flanking the 3′ splice site of the NSAE exon. In some embodiments, the ASO targets a AP3M1 pre-mRNA sequence comprising an intron flanking the 5′ splice site of the NSAE exon. In some embodiments, the transcript is selected from the group consisting of transcript_ENST00000355264.8, transcript_ENST00000372745.1, transcript_ENST00000480373.1, and transcript_ENST00000487653.1.

[0153] In some embodiments, the AP3M1 pre-mRNA transcript is encoded by a genetic sequence with at least about 80%, 85%, 90%, 95%, 96%, 97%, 98%, 99% or 100% sequence identity to the Ensembl reference number ENSG00000185009.12 or a complement thereof. In some embodiments, the AP3M1 pre-mRNA transcript comprises a sequence with at least about 80%, 85%, 90%, 95%, 96%, 97%, 98%, 99% or 100% sequence identity to a AP3M1 pre-mRNA transcript or a complement thereof described herein.

[0154] In some embodiments, the targeted portion of the AP3M1 pre-mRNA comprises a sequence with at least 80%, 85%, 90%, 95%, 97%, or 100% sequence identity to a region comprising at least 8 contiguous nucleic acids of a sequence of premrna_ENST00000355264.8, premrna_ENST00000372745.1, premrna_ENST00000480373.1, premrna_ENST00000487653.1 or a sequence of Table 3 or complements thereof. In some embodiments, the targeted portion of the AP3M1 pre-mRNA comprises a sequence with at least 80%, 85%, 90%, 95%, 97%, or 100% sequence identity to a region comprising at least 8 contiguous nucleic acids of a sequence selected from the group consisting of SEQ ID NO: 272-SEQ ID NO: 275 or complements thereof. In some embodiments, the targeted portion of the AP3M1 pre-mRNA comprises a sequence that is complementary to at least 8, 9, 10, 11, 12, 13, 14, 15, 16, 17, 18, 19 or 20 contiguous nucleic acids of a sequence of Table 6A or Table 6B or a complement thereof.

[0155] In some embodiments, the ASOs disclosed herein target a NSAE pre-mRNA transcribed from a AP5Z1 genomic sequence. In some embodiments, the ASO targets a NSAE pre-mRNA transcript from a AP5Z1 genomic sequence comprising a NSAE exon. In some embodiments, the ASO targets a NSAE pre-mRNA transcript from a AP5Z1 genomic sequence comprising an intron flanking the 3′ splice site of the NSAE exon and an intron flanking the 5′ splice site of a NSAE exon. In some embodiments, the ASO targets a NSAE pre-mRNA transcript comprising a sequence selected from the group consisting of premrna_ENST00000469614.1, premrna_ENST00000477454.1, premrna_ENST00000477680.6, premrna_ENST00000490487.1, premrna_ENST00000491375.1, premrna_ENST00000496303.6, premrna_ENST00000647628.1, premrna_ENST00000647984.1, premrna_ENST00000648237.1, premrna_ENST00000648360.1, premrna_ENST00000648765.1, premrna_ENST00000648925.1, premrna_ENST00000649063.2, premrna_ENST00000649315.1, premrna_ENST00000649419.1, premrna_ENST00000649736.1, premrna_ENST00000650310.1, premrna_ENST00000650451.1, and premrna_ENST00000650581.1. In some embodiments, the ASO targets a AP5Z1 pre-mRNA sequence comprising a NSAE exon. In some embodiments, the ASO targets a AP5Z1 pre-mRNA sequence comprising an intron flanking the 3′ splice site of the NSAE exon. In some embodiments, the ASO targets a AP5Z1 pre-mRNA sequence comprising an intron flanking the 5′ splice site of the NSAE exon. In some embodiments, the transcript is selected from the group consisting of transcript_ENST00000469614.1, transcript_ENST00000477454.1, transcript_ENST00000477680.6, transcript_ENST00000490487.1, transcript_ENST00000491375.1, transcript_ENST00000496303.6, transcript_ENST00000647628.1, transcript_ENST00000647984.1, transcript_ENST00000648237.1, transcript_ENST00000648360.1, transcript_ENST00000648765.1, transcript_ENST00000648925.1, transcript_ENST00000649063.2, transcript_ENST00000649315.1, transcript_ENST00000649419.1, transcript_ENST00000649736.1, transcript_ENST00000650310.1, transcript_ENST00000650451.1, and transcript_ENST00000650581.1.

[0156] In some embodiments, the AP5Z1 pre-mRNA transcript is encoded by a genetic sequence with at least about 80%, 85%, 90%, 95%, 96%, 97%, 98%, 99% or 100% sequence identity to the Ensembl reference number ENSG00000242802.9 or a complement thereof. In some embodiments, the AP5Z1 pre-mRNA transcript comprises a sequence with at least about 80%, 85%, 90%, 95%, 96%, 97%, 98%, 99% or 100% sequence identity to a AP5Z1 pre-mRNA transcript or a complement thereof described herein.

[0157] In some embodiments, the targeted portion of the AP5Z1 pre-mRNA comprises a sequence with at least 80%, 85%, 90%, 95%, 97%, or 100% sequence identity to a region comprising at least 8 contiguous nucleic acids of a sequence of premrna_ENST00000469614.1, premrna_ENST00000477454.1, premrna_ENST00000477680.6, premrna_ENST00000490487.1, premrna_ENST00000491375.1, premrna_ENST00000496303.6, premrna_ENST00000647628.1, premrna_ENST00000647984.1, premrna_ENST00000648237.1, premrna_ENST00000648360.1, premrna_ENST00000648765.1, premrna_ENST00000648925.1, premrna_ENST00000649063.2, premrna_ENST00000649315.1, premrna_ENST00000649419.1, premrna_ENST00000649736.1, premrna_ENST00000650310.1, premrna_ENST00000650451.1, premrna_ENST00000650581.1 or a sequence of Table 3 or complements thereof. In some embodiments, the targeted portion of the AP5Z1 pre-mRNA comprises a sequence with at least 80%, 85%, 90%, 95%, 97%, or 100% sequence identity to a region comprising at least 8 contiguous nucleic acids of a sequence selected from the group consisting of SEQ ID NO: 276-SEQ ID NO: 279 or complements thereof. In some embodiments, the targeted portion of the AP5Z1 pre-mRNA comprises a sequence that is complementary to at least 8, 9, 10, 11, 12, 13, 14, 15, 16, 17, 18, 19 or 20 contiguous nucleic acids of a sequence of Table 6A or Table 6B or a complement thereof.

[0158] In some embodiments, the ASOs disclosed herein target a NSAE pre-mRNA transcribed from a ARNTL genomic sequence. In some embodiments, the ASO targets a NSAE pre-mRNA transcript from a ARNTL genomic sequence comprising a NSAE exon. In some embodiments, the ASO targets a NSAE pre-mRNA transcript from a ARNTL genomic sequence comprising an intron flanking the 3′ splice site of the NSAE exon and an intron flanking the 5′ splice site of a NSAE exon. In some embodiments, the ASO targets a NSAE pre-mRNA transcript comprising a sequence selected from the group consisting of premrna_ENST00000389707.8, premrna_ENST00000401424.6, premrna_ENST00000403290.5, premrna_ENST00000403482.7, premrna_ENST00000403510.8, premrna_ENST00000472842.1, premrna_ENST00000480685.5, premrna_ENST00000482049.6, premrna_ENST00000485918.2, premrna_ENST00000497429.5, premrna_ENST00000524392.5, premrna_ENST00000527998.5, premrna_ENST00000529050.5, premrna_ENST00000529388.6, premrna_ENST00000529390.1, premrna_ENST00000529825.6, premrna_ENST00000530357.6, premrna_ENST00000531665.5, premrna_ENST00000533520.5, premrna_ENST00000534102.1, premrna_ENST00000534544.5, premrna_ENST00000673626.1, premrna_ENST00000673817.1, premrna_ENST00000673834.1, premrna_ENST00000673837.1, premrna_ENST00000673868.1, premrna_ENST00000673888.1, premrna_ENST00000673892.1, and premrna_ENST00000674108.1. In some embodiments, the ASO targets a ARNTL pre-mRNA sequence comprising a NSAE exon. In some embodiments, the ASO targets a ARNTL pre-mRNA sequence comprising an intron flanking the 3′ splice site of the NSAE exon. In some embodiments, the ASO targets a ARNTL pre-mRNA sequence comprising an intron flanking the 5′ splice site of the NSAE exon. In some embodiments, the transcript is selected from the group consisting of transcript_ENST00000389707.8, transcript_ENST00000401424.6, transcript_ENST00000403290.5, transcript_ENST00000403482.7, transcript_ENST00000403510.8, transcript_ENST00000472842.1, transcript_ENST00000480685.5, transcript_ENST00000482049.6, transcript_ENST00000485918.2, transcript_ENST00000497429.5, transcript_ENST00000524392.5, transcript_ENST00000527998.5, transcript_ENST00000529050.5, transcript_ENST00000529388.6, transcript_ENST00000529390.1, transcript_ENST00000529825.6, transcript_ENST00000530357.6, transcript_ENST00000531665.5, transcript_ENST00000533520.5, transcript_ENST00000534102.1, transcript_ENST00000534544.5, transcript_ENST00000673626.1, transcript_ENST00000673817.1, transcript_ENST00000673834.1, transcript_ENST00000673837.1, transcript_ENST00000673868.1, transcript_ENST00000673888.1, transcript_ENST00000673892.1, and transcript_ENST00000674108.1.

[0159] In some embodiments, the ARNTL pre-mRNA transcript is encoded by a genetic sequence with at least about 80%, 85%, 90%, 95%, 96%, 97%, 98%, 99% or 100% sequence identity to the Ensembl reference number ENSG00000133794.19 or a complement thereof. In some embodiments, the ARNTL pre-mRNA transcript comprises a sequence with at least about 80%, 85%, 90%, 95%, 96%, 97%, 98%, 99% or 100% sequence identity to a ARNTL pre-mRNA transcript or a complement thereof described herein.

[0160] In some embodiments, the targeted portion of the ARNTL pre-mRNA comprises a sequence with at least 80%, 85%, 90%, 95%, 97%, or 100% sequence identity to a region comprising at least 8 contiguous nucleic acids of a sequence of premrna_ENST00000389707.8, premrna_ENST00000401424.6, premrna_ENST00000403290.5, premrna_ENST00000403482.7, premrna_ENST00000403510.8, premrna_ENST00000472842.1, premrna_ENST00000480685.5, premrna_ENST00000482049.6, premrna_ENST00000485918.2, premrna_ENST00000497429.5, premrna_ENST00000524392.5, premrna_ENST00000527998.5, premrna_ENST00000529050.5, premrna_ENST00000529388.6, premrna_ENST00000529390.1, premrna_ENST00000529825.6, premrna_ENST00000530357.6, premrna_ENST00000531665.5, premrna_ENST00000533520.5, premrna_ENST00000534102.1, premrna_ENST00000534544.5, premrna_ENST00000673626.1, premrna_ENST00000673817.1, premrna_ENST00000673834.1, premrna_ENST00000673837.1, premrna_ENST00000673868.1, premrna_ENST00000673888.1, premrna_ENST00000673892.1, premrna_ENST00000674108.1, or a sequence of Table 3 or complements thereof. In some embodiments, the targeted portion of the ARNTL pre-mRNA comprises a sequence with at least 80%, 85%, 90%, 95%, 97%, or 100% sequence identity to a region comprising at least 8 contiguous nucleic acids of a sequence selected from the group consisting of SEQ ID NO: 280-SEQ ID NO: 283 or complements thereof. In some embodiments, the targeted portion of the ARNTL pre-mRNA comprises a sequence that is complementary to at least 8, 9, 10, 11, 12, 13, 14, 15, 16, 17, 18, 19 or 20 contiguous nucleic acids of a sequence of Table 6A or Table 6B or a complement thereof.

[0161] In some embodiments, the ASOs disclosed herein target a NSAE pre-mRNA transcribed from a ASAP3 genomic sequence. In some embodiments, the ASO targets a NSAE pre-mRNA transcript from a ASAP3 genomic sequence comprising a NSAE exon. In some embodiments, the ASO targets a NSAE pre-mRNA transcript from a ASAP3 genomic sequence comprising an intron flanking the 3′ splice site of the NSAE exon and an intron flanking the 5′ splice site of a NSAE exon. In some embodiments, the ASO targets a NSAE pre-mRNA transcript comprising a sequence selected from the group consisting of premrna_ENST00000336689.8, premrna_ENST00000437606.6, premrna_ENST00000449467.2, premrna_ENST00000465372.5, premrna_ENST00000475814.5, premrna_ENST00000478858.5, premrna_ENST00000484418.1, premrna_ENST00000492982.6, premrna_ENST00000495646.5, premrna_ENST00000530874.1, premrna_ENST00000608765.1, and premrna_ENST00000618240.4. In some embodiments, the ASO targets a ASAP3 pre-mRNA sequence comprising a NSAE exon. In some embodiments, the ASO targets a ASAP3 pre-mRNA sequence comprising an intron flanking the 3′ splice site of the NSAE exon. In some embodiments, the ASO targets a ASAP3 pre-mRNA sequence comprising an intron flanking the 5′ splice site of the NSAE exon. In some embodiments, the transcript is selected from the group consisting of transcript_ENST00000336689.8, transcript_ENST00000437606.6, transcript_ENST00000449467.2, transcript_ENST00000465372.5, transcript_ENST00000475814.5, transcript_ENST00000478858.5, transcript_ENST00000484418.1, transcript_ENST00000492982.6, transcript_ENST00000495646.5, transcript_ENST00000530874.1, transcript_ENST00000608765.1, and transcript_ENST00000618240.4.

[0162] In some embodiments, the ASAP3 pre-mRNA transcript is encoded by a genetic sequence with at least about 80%, 85%, 90%, 95%, 96%, 97%, 98%, 99% or 100% sequence identity to the Ensembl reference number ENSG00000088280.19 or ENSG00000282854.2 a complement thereof. In some embodiments, the ASAP3 pre-mRNA transcript comprises a sequence with at least about 80%, 85%, 90%, 95%, 96%, 97%, 98%, 99% or 100% sequence identity to a ASAP3 pre-mRNA transcript or a complement thereof described herein.

[0163] In some embodiments, the targeted portion of the ASAP3 pre-mRNA comprises a sequence with at least 80%, 85%, 90%, 95%, 97%, or 100% sequence identity to a region comprising at least 8 contiguous nucleic acids of a sequence of premrna_ENST00000336689.8, premrna_ENST00000437606.6, premrna_ENST00000449467.2, premrna_ENST00000465372.5, premrna_ENST00000475814.5, premrna_ENST00000478858.5, premrna_ENST00000484418.1, premrna_ENST00000492982.6, premrna_ENST00000495646.5, premrna_ENST00000530874.1, premrna_ENST00000608765.1, premrna_ENST00000618240.4, or a sequence of Table 3 or complements thereof. In some embodiments, the targeted portion of the ASAP3 pre-mRNA comprises a sequence with at least 80%, 85%, 90%, 95%, 97%, or 100% sequence identity to a region comprising at least 8 contiguous nucleic acids of a sequence selected from the group consisting of SEQ ID NO: 284-SEQ ID NO: 287 or complements thereof. In some embodiments, the targeted portion of the ASAP3 pre-mRNA comprises a sequence that is complementary to at least 8, 9, 10, 11, 12, 13, 14, 15, 16, 17, 18, 19 or 20 contiguous nucleic acids of a sequence of Table 6A or Table 6B or a complement thereof.

[0164] In some embodiments, the ASOs disclosed herein target a NSAE pre-mRNA transcribed from a ATRX genomic sequence. In some embodiments, the ASO targets a NSAE pre-mRNA transcript from a ATRX genomic sequence comprising a NSAE exon. In some embodiments, the ASO targets a NSAE pre-mRNA transcript from a ATRX genomic sequence comprising an intron flanking the 3′ splice site of the NSAE exon and an intron flanking the 5′ splice site of a NSAE exon. In some embodiments, the ASO targets a NSAE pre-mRNA transcript comprising a sequence selected from the group consisting of premrna_ENST00000373344.10, premrna_ENST00000395603.7, premrna_ENST00000400866.4, premrna_ENST00000460639.2, premrna_ENST00000479487.1, premrna_ENST00000480283.5, premrna_ENST00000493470.2, premrna_ENST00000622960.1, premrna_ENST00000623242.3, premrna_ENST00000623316.1, premrna_ENST00000623321.3, premrna_ENST00000623706.3, premrna_ENST00000624032.3, premrna_ENST00000624166.3, premrna_ENST00000624193.1, premrna_ENST00000624403.1, premrna_ENST00000624668.3, premrna_ENST00000624766.1, premrna_ENST00000625063.3, premrna_ENST00000635865.1, premrna_ENST00000636152.1, premrna_ENST00000636868.1, premrna_ENST00000637175.1, and premrna_ENST00000637959.1. In some embodiments, the ASO targets a ATRX pre-mRNA sequence comprising a NSAE exon. In some embodiments, the ASO targets a ATRX pre-mRNA sequence comprising an intron flanking the 3′ splice site of the NSAE exon. In some embodiments, the ASO targets a ATRX pre-mRNA sequence comprising an intron flanking the 5′ splice site of the NSAE exon. In some embodiments, the transcript is selected from the group consisting of transcript_ENST00000373344.10, transcript_ENST00000395603.7, transcript_ENST00000400866.4, transcript_ENST00000460639.2, transcript_ENST00000479487.1, transcript_ENST00000480283.5, transcript_ENST00000493470.2, transcript_ENST00000622960.1, transcript_ENST00000623242.3, transcript_ENST00000623316.1, transcript_ENST00000623321.3, transcript_ENST00000623706.3, transcript_ENST00000624032.3, transcript_ENST00000624166.3, transcript_ENST00000624193.1, transcript_ENST00000624403.1, transcript_ENST00000624668.3, transcript_ENST00000624766.1, transcript_ENST00000625063.3, transcript_ENST00000635865.1, transcript_ENST00000636152.1, transcript_ENST00000636868.1, transcript_ENST00000637175.1, and transcript_ENST00000637959.1.

[0165] In some embodiments, the ATRX pre-mRNA transcript is encoded by a genetic sequence with at least about 80%, 85%, 90%, 95%, 96%, 97%, 98%, 99% or 100% sequence identity to the Ensembl reference number ENSG00000085224.22 or a complement thereof. In some embodiments, the ATRX pre-mRNA transcript comprises a sequence with at least about 80%, 85%, 90%, 95%, 96%, 97%, 98%, 99% or 100% sequence identity to a ATRX pre-mRNA transcript or a complement thereof described herein.

[0166] In some embodiments, the targeted portion of the ATRX pre-mRNA comprises a sequence with at least 80%, 85%, 90%, 95%, 97%, or 100% sequence identity to a region comprising at least 8 contiguous nucleic acids of a sequence of premrna_ENST00000373344.10, premrna_ENST00000395603.7, premrna_ENST00000400866.4, premrna_ENST00000460639.2, premrna_ENST00000479487.1, premrna_ENST00000480283.5, premrna_ENST00000493470.2, premrna_ENST00000622960.1, premrna_ENST00000623242.3, premrna_ENST00000623316.1, premrna_ENST00000623321.3, premrna_ENST00000623706.3, premrna_ENST00000624032.3, premrna_ENST00000624166.3, premrna_ENST00000624193.1, premrna_ENST00000624403.1, premrna_ENST00000624668.3, premrna_ENST00000624766.1, premrna_ENST00000625063.3, premrna_ENST00000635865.1, premrna_ENST00000636152.1, premrna_ENST00000636868.1, premrna_ENST00000637175.1, premrna_ENST00000637959.1 or a sequence of Table 3 or complements thereof. In some embodiments, the targeted portion of the ATRX pre-mRNA comprises a sequence with at least 80%, 85%, 90%, 95%, 97%, or 100% sequence identity to a region comprising at least 8 contiguous nucleic acids of a sequence selected from the group consisting of SEQ ID NO: 288-SEQ ID NO: 297 or complements thereof. In some embodiments, the targeted portion of the ATRX pre-mRNA comprises a sequence that is complementary to at least 8, 9, 10, 11, 12, 13, 14, 15, 16, 17, 18, 19 or 20 contiguous nucleic acids of a sequence of Table 6A or Table 6B or a complement thereof.

[0167] In some embodiments, the ASOs disclosed herein target a NSAE pre-mRNA transcribed from a BBS2 genomic sequence. In some embodiments, the ASO targets a NSAE pre-mRNA transcript from a BBS2 genomic sequence comprising a NSAE exon. In some embodiments, the ASO targets a NSAE pre-mRNA transcript from a BBS2 genomic sequence comprising an intron flanking the 3′ splice site of the NSAE exon and an intron flanking the 5′ splice site of a NSAE exon. In some embodiments, the ASO targets a NSAE pre-mRNA transcript comprising a sequence selected from the group consisting of premrna_ENST00000245157.10, premrna_ENST00000561853.1, premrna_ENST00000561877.1, premrna_ENST00000561951.5, premrna_ENST00000562012.1, premrna_ENST00000562059.1, premrna_ENST00000562813.1, premrna_ENST00000564123.6, premrna_ENST00000564459.5, premrna_ENST00000565378.1, premrna_ENST00000565781.5, premrna_ENST00000565859.1, premrna_ENST00000566210.1, premrna_ENST00000566410.1, premrna_ENST00000566452.1, premrna_ENST00000566495.1, premrna_ENST00000566689.5, premrna_ENST00000568104.5, premrna_ENST00000569192.5, premrna_ENST00000569342.5, and premrna_ENST00000569941.5. In some embodiments, the ASO targets a BBS2 pre-mRNA sequence comprising a NSAE exon. In some embodiments, the ASO targets a BBS2 pre-mRNA sequence comprising an intron flanking the 3′ splice site of the NSAE exon. In some embodiments, the ASO targets a BBS2 pre-mRNA sequence comprising an intron flanking the 5′ splice site of the NSAE exon. In some embodiments, the transcript is selected from the group consisting of transcript_ENST00000245157.10, transcript_ENST00000561853.1, transcript_ENST00000561877.1, transcript_ENST00000561951.5, transcript_ENST00000562012.1, transcript_ENST00000562059.1, transcript_ENST00000562813.1, transcript_ENST00000564123.6, transcript_ENST00000564459.5, transcript_ENST00000565378.1, transcript_ENST00000565781.5, transcript_ENST00000565859.1, transcript_ENST00000566210.1, transcript_ENST00000566410.1, transcript_ENST00000566452.1, transcript_ENST00000566495.1, transcript_ENST00000566689.5, transcript_ENST00000568104.5, transcript_ENST00000569192.5, transcript_ENST00000569342.5, and transcript_ENST00000569941.5.

[0168] In some embodiments, the BBS2 pre-mRNA transcript is encoded by a genetic sequence with at least about 80%, 85%, 90%, 95%, 96%, 97%, 98%, 99% or 100% sequence identity to the Ensembl reference number ENSG00000125124.12 or a complement thereof. In some embodiments, the BBS2 pre-mRNA transcript comprises a sequence with at least about 80%, 85%, 90%, 95%, 96%, 97%, 98%, 99% or 100% sequence identity to a BBS2 pre-mRNA transcript or a complement thereof described herein.

[0169] In some embodiments, the targeted portion of the BBS2 pre-mRNA comprises a sequence with at least 80%, 85%, 90%, 95%, 97%, or 100% sequence identity to a region comprising at least 8 contiguous nucleic acids of a sequence of premrna_ENST00000245157.10, premrna_ENST00000561853.1, premrna_ENST00000561877.1, premrna_ENST00000561951.5, premrna_ENST00000562012.1, premrna_ENST00000562059.1, premrna_ENST00000562813.1, premrna_ENST00000564123.6, premrna_ENST00000564459.5, premrna_ENST00000565378.1, premrna_ENST00000565781.5, premrna_ENST00000565859.1, premrna_ENST00000566210.1, premrna_ENST00000566410.1, premrna_ENST00000566452.1, premrna_ENST00000566495.1, premrna_ENST00000566689.5, premrna_ENST00000568104.5, premrna_ENST00000569192.5, premrna_ENST00000569342.5, premrna_ENST00000569941.5 or a sequence of Table 3 or complements thereof. In some embodiments, the targeted portion of the BBS2 pre-mRNA comprises a sequence with at least 80%, 85%, 90%, 95%, 97%, or 100% sequence identity to a region comprising at least 8 contiguous nucleic acids of a sequence selected from the group consisting of SEQ ID NO: 298-SEQ ID NO: 301 or complements thereof. In some embodiments, the targeted portion of the BBS2 pre-mRNA comprises a sequence that is complementary to at least 8, 9, 10, 11, 12, 13, 14, 15, 16, 17, 18, 19 or 20 contiguous nucleic acids of a sequence of Table 6A or Table 6B or a complement thereof.

[0170] In some embodiments, the ASOs disclosed herein target a NSAE pre-mRNA transcribed from a BBS4 genomic sequence. In some embodiments, the ASO targets a NSAE pre-mRNA transcript from a BBS4 genomic sequence comprising a NSAE exon. In some embodiments, the ASO targets a NSAE pre-mRNA transcript from a BBS4 genomic sequence comprising an intron flanking the 3′ splice site of the NSAE exon and an intron flanking the 5′ splice site of a NSAE exon. In some embodiments, the ASO targets a NSAE pre-mRNA transcript comprising a sequence selected from the group consisting of premrna_ENST00000268057.9, premrna_ENST00000395205.6, premrna_ENST00000561914.5, premrna_ENST00000562084.5, premrna_ENST00000562219.1, premrna_ENST00000563600.5, premrna_ENST00000564239.1, premrna_ENST00000565160.5, premrna_ENST00000566197.1, premrna_ENST00000566400.5, premrna_ENST00000566829.1, premrna_ENST00000566938.5, premrna_ENST00000567279.5, premrna_ENST00000568535.1, premrna_ENST00000569001.1, premrna_ENST00000569151.1, premrna_ENST00000569338.5, and premrna_ENST00000569440.5. In some embodiments, the ASO targets a BBS4 pre-mRNA sequence comprising a NSAE exon. In some embodiments, the ASO targets a BBS4 pre-mRNA sequence comprising an intron flanking the 3′ splice site of the NSAE exon. In some embodiments, the ASO targets a BBS4 pre-mRNA sequence comprising an intron flanking the 5′ splice site of the NSAE exon. In some embodiments, the transcript is selected from the group consisting of transcript_ENST00000268057.9, transcript_ENST00000395205.6, transcript_ENST00000561914.5, transcript_ENST00000562084.5, transcript_ENST00000562219.1, transcript_ENST00000563600.5, transcript_ENST00000564239.1, transcript_ENST00000565160.5, transcript_ENST00000566197.1, transcript_ENST00000566400.5, transcript_ENST00000566829.1, transcript_ENST00000566938.5, transcript_ENST00000567279.5, transcript_ENST00000568535.1, transcript_ENST00000569001.1, transcript_ENST00000569151.1, transcript_ENST00000569338.5, and transcript_ENST00000569440.5.

[0171] In some embodiments, the BBS4 pre-mRNA transcript is encoded by a genetic sequence with at least about 80%, 85%, 90%, 95%, 96%, 97%, 98%, 99% or 100% sequence identity to the Ensembl reference number ENSG00000140463.14 or a complement thereof. In some embodiments, the BBS4 pre-mRNA transcript comprises a sequence with at least about 80%, 85%, 90%, 95%, 96%, 97%, 98%, 99% or 100% sequence identity to a BBS4 pre-mRNA transcript or a complement thereof described herein.

[0172] In some embodiments, the targeted portion of the BBS4 pre-mRNA comprises a sequence with at least 80%, 85%, 90%, 95%, 97%, or 100% sequence identity to a region comprising at least 8 contiguous nucleic acids of a sequence of premrna_ENST00000268057.9, premrna_ENST00000395205.6, premrna_ENST00000561914.5, premrna_ENST00000562084.5, premrna_ENST00000562219.1, premrna_ENST00000563600.5, premrna_ENST00000564239.1, premrna_ENST00000565160.5, premrna_ENST00000566197.1, premrna_ENST00000566400.5, premrna_ENST00000566829.1, premrna_ENST00000566938.5, premrna_ENST00000567279.5, premrna_ENST00000568535.1, premrna_ENST00000569001.1, premrna_ENST00000569151.1, premrna_ENST00000569338.5, premrna_ENST00000569440.5 or a sequence of Table 3 or complements thereof. In some embodiments, the targeted portion of the BBS4 pre-mRNA comprises a sequence with at least 80%, 85%, 90%, 95%, 97%, or 100% sequence identity to a region comprising at least 8 contiguous nucleic acids of a sequence selected from the group consisting of SEQ ID NO: 302-SEQ ID NO: 309 or complements thereof. In some embodiments, the targeted portion of the BBS4 pre-mRNA comprises a sequence that is complementary to at least 8, 9, 10, 11, 12, 13, 14, 15, 16, 17, 18, 19 or 20 contiguous nucleic acids of a sequence of Table 6A or Table 6B or a complement thereof.

[0173] In some embodiments, the ASOs disclosed herein target a NSAE pre-mRNA transcribed from a BRD9 genomic sequence. In some embodiments, the ASO targets a NSAE pre-mRNA transcript from a BRD9 genomic sequence comprising a NSAE exon. In some embodiments, the ASO targets a NSAE pre-mRNA transcript from a BRD9 genomic sequence comprising an intron flanking the 3′ splice site of the NSAE exon and an intron flanking the 5′ splice site of a NSAE exon. In some embodiments, the ASO targets a NSAE pre-mRNA transcript comprising a sequence selected from the group consisting of premrna_ENST00000466684.5, premrna_ENST00000467963.6, premrna_ENST00000475706.5, premrna_ENST00000483173.5, premrna_ENST00000483234.5, premrna_ENST00000487688.1, premrna_ENST00000489093.1, premrna_ENST00000489816.5, premrna_ENST00000490814.6, premrna_ENST00000493082.5, premrna_ENST00000494422.1, premrna_ENST00000495265.5, premrna_ENST00000495794.5, premrna_ENST00000497410.5, premrna_ENST00000518250.5, premrna_ENST00000518251.1, premrna_ENST00000519112.5, premrna_ENST00000519838.5, and premrna_ENST00000523139.5. In some embodiments, the ASO targets a BRD9 pre-mRNA sequence comprising a NSAE exon. In some embodiments, the ASO targets a BRD9 pre-mRNA sequence comprising an intron flanking the 3′ splice site of the NSAE exon. In some embodiments, the ASO targets a BRD9 pre-mRNA sequence comprising an intron flanking the 5′ splice site of the NSAE exon. In some embodiments, the transcript is selected from the group consisting of transcript_ENST00000466684.5, transcript_ENST00000467963.6, transcript_ENST00000475706.5, transcript_ENST00000483173.5, transcript_ENST00000483234.5, transcript_ENST00000487688.1, transcript_ENST00000489093.1, transcript_ENST00000489816.5, transcript_ENST00000490814.6, transcript_ENST00000493082.5, transcript_ENST00000494422.1, transcript_ENST00000495265.5, transcript_ENST00000495794.5, transcript_ENST00000497410.5, transcript_ENST00000518250.5, transcript_ENST00000518251.1, transcript_ENST00000519112.5, transcript_ENST00000519838.5, and transcript_ENST00000523139.5.

[0174] In some embodiments, the BRD9 pre-mRNA transcript is encoded by a genetic sequence with at least about 80%, 85%, 90%, 95%, 96%, 97%, 98%, 99% or 100% sequence identity to the Ensembl reference number ENSG00000028310.18 or a complement thereof. In some embodiments, the BRD9 pre-mRNA transcript comprises a sequence with at least about 80%, 85%, 90%, 95%, 96%, 97%, 98%, 99% or 100% sequence identity to a BRD9 pre-mRNA transcript or a complement thereof described herein.

[0175] In some embodiments, the targeted portion of the BRD9 pre-mRNA comprises a sequence with at least 80%, 85%, 90%, 95%, 97%, or 100% sequence identity to a region comprising at least 8 contiguous nucleic acids of a sequence of premrna_ENST00000466684.5, premrna_ENST00000467963.6, premrna_ENST00000475706.5, premrna_ENST00000483173.5, premrna_ENST00000483234.5, premrna_ENST00000487688.1, premrna_ENST00000489093.1, premrna_ENST00000489816.5, premrna_ENST00000490814.6, premrna_ENST00000493082.5, premrna_ENST00000494422.1, premrna_ENST00000495265.5, premrna_ENST00000495794.5, premrna_ENST00000497410.5, premrna_ENST00000518250.5, premrna_ENST00000518251.1, premrna_ENST00000519112.5, premrna_ENST00000519838.5, premrna_ENST00000523139.5 or a sequence of Table 3 or complements thereof. In some embodiments, the targeted portion of the BRD9 pre-mRNA comprises a sequence with at least 80%, 85%, 90%, 95%, 97%, or 100% sequence identity to a region comprising at least 8 contiguous nucleic acids of a sequence selected from the group consisting of SEQ ID NO: 310-SEQ ID NO: 313 or complements thereof. In some embodiments, the targeted portion of the BRD9 pre-mRNA comprises a sequence that is complementary to at least 8, 9, 10, 11, 12, 13, 14, 15, 16, 17, 18, 19 or 20 contiguous nucleic acids of a sequence of Table 6A or Table 6B or a complement thereof.

[0176] In some embodiments, the ASOs disclosed herein target a NSAE pre-mRNA transcribed from a CALM3 genomic sequence. In some embodiments, the ASO targets a NSAE pre-mRNA transcript from a CALM3 genomic sequence comprising a NSAE exon. In some embodiments, the ASO targets a NSAE pre-mRNA transcript from a CALM3 genomic sequence comprising an intron flanking the 3′ splice site of the NSAE exon and an intron flanking the 5′ splice site of a NSAE exon. In some embodiments, the ASO targets a NSAE pre-mRNA transcript comprising a sequence selected from the group consisting of premrna_ENST00000291295.14, premrna_ENST00000391918.6, premrna_ENST00000477244.5, premrna_ENST00000482455.5, premrna_ENST00000486500.1, premrna_ENST00000594523.5, premrna_ENST00000595072.2, premrna_ENST00000596362.1, premrna_ENST00000597743.5, premrna_ENST00000597868.5, premrna_ENST00000598871.5, premrna_ENST00000599839.5, and premrna_ENST00000602169.2. In some embodiments, the ASO targets a CALM3 pre-mRNA sequence comprising a NSAE exon. In some embodiments, the ASO targets a CALM3 pre-mRNA sequence comprising an intron flanking the 3′ splice site of the NSAE exon. In some embodiments, the ASO targets a CALM3 pre-mRNA sequence comprising an intron flanking the 5′ splice site of the NSAE exon. In some embodiments, the transcript is selected from the group consisting of transcript_ENST00000291295.14, transcript_ENST00000391918.6, transcript_ENST00000477244.5, transcript_ENST00000482455.5, transcript_ENST00000486500.1, transcript_ENST00000594523.5, transcript_ENST00000595072.2, transcript_ENST00000596362.1, transcript_ENST00000597743.5, transcript_ENST00000597868.5, transcript_ENST00000598871.5, transcript_ENST00000599839.5, and transcript_ENST00000602169.2.

[0177] In some embodiments, the CALM3 pre-mRNA transcript is encoded by a genetic sequence with at least about 80%, 85%, 90%, 95%, 96%, 97%, 98%, 99% or 100% sequence identity to the Ensembl reference number ENSG00000160014.17 or a complement thereof. In some embodiments, the CALM3 pre-mRNA transcript comprises a sequence with at least about 80%, 85%, 90%, 95%, 96%, 97%, 98%, 99% or 100% sequence identity to a CALM3 pre-mRNA transcript or a complement thereof described herein.

[0178] In some embodiments, the targeted portion of the CALM3 pre-mRNA comprises a sequence with at least 80%, 85%, 90%, 95%, 97%, or 100% sequence identity to a region comprising at least 8 contiguous nucleic acids of a sequence of premrna_ENST00000291295.14, premrna_ENST00000391918.6, premrna_ENST00000477244.5, premrna_ENST00000482455.5, premrna_ENST00000486500.1, premrna_ENST00000594523.5, premrna_ENST00000595072.2, premrna_ENST00000596362.1, premrna_ENST00000597743.5, premrna_ENST00000597868.5, premrna_ENST00000598871.5, premrna_ENST00000599839.5, premrna_ENST00000602169.2 or a sequence of Table 3 or complements thereof. In some embodiments, the targeted portion of the CALM3 pre-mRNA comprises a sequence with at least 80%, 85%, 90%, 95%, 97%, or 100% sequence identity to a region comprising at least 8 contiguous nucleic acids of a sequence selected from the group consisting of SEQ ID NO: 314-SEQ ID NO: 317 or complements thereof. In some embodiments, the targeted portion of the CALM3 pre-mRNA comprises a sequence that is complementary to at least 8, 9, 10, 11, 12, 13, 14, 15, 16, 17, 18, 19 or 20 contiguous nucleic acids of a sequence of Table 6A or Table 6B or a complement thereof.

[0179] In some embodiments, the ASOs disclosed herein target a NSAE pre-mRNA transcribed from a CARS1 genomic sequence. In some embodiments, the ASO targets a NSAE pre-mRNA transcript from a CARS1 genomic sequence comprising a NSAE exon. In some embodiments, the ASO targets a NSAE pre-mRNA transcript from a CARS1 genomic sequence comprising an intron flanking the 3′ splice site of the NSAE exon and an intron flanking the 5′ splice site of a NSAE exon. In some embodiments, the ASO targets a NSAE pre-mRNA transcript comprising a sequence selected from the group consisting of premrna_ENST00000278224.13, premrna_ENST00000380525.8, premrna_ENST00000397111.9, premrna_ENST00000439280.6, premrna_ENST00000465207.5, premrna_ENST00000465240.1, premrna_ENST00000465331.1, premrna_ENST00000466442.6, premrna_ENST00000470221.6, premrna_ENST00000484484.5, premrna_ENST00000524825.5, premrna_ENST00000526890.5, premrna_ENST00000527330.2, premrna_ENST00000529772.5, premrna_ENST00000531387.5, and premrna_ENST00000639317.1. In some embodiments, the ASO targets a CARS1 pre-mRNA sequence comprising a NSAE exon. In some embodiments, the ASO targets a CARS1 pre-mRNA sequence comprising an intron flanking the 3′ splice site of the NSAE exon. In some embodiments, the ASO targets a CARS1 pre-mRNA sequence comprising an intron flanking the 5′ splice site of the NSAE exon. In some embodiments, the transcript is selected from the group consisting of transcript_ENST00000278224.13, transcript_ENST00000380525.8, transcript_ENST00000397111.9, transcript_ENST00000439280.6, transcript_ENST00000465207.5, transcript_ENST00000465240.1, transcript_ENST00000465331.1, transcript_ENST00000466442.6, transcript_ENST00000470221.6, transcript_ENST00000484484.5, transcript_ENST00000524825.5, transcript_ENST00000526890.5, transcript_ENST00000527330.2, transcript_ENST00000529772.5, transcript_ENST00000531387.5, and transcript_ENST00000639317.1.

[0180] In some embodiments, the CARS1 pre-mRNA transcript is encoded by a genetic sequence with at least about 80%, 85%, 90%, 95%, 96%, 97%, 98%, 99% or 100% sequence identity to the Ensembl reference number ENSG00000110619.17 or ENSG00000278191.4 or a complement thereof. In some embodiments, the CARS1 pre-mRNA transcript comprises a sequence with at least about 80%, 85%, 90%, 95%, 96%, 97%, 98%, 99% or 100% sequence identity to a CARS1 pre-mRNA transcript or a complement thereof described herein.

[0181] In some embodiments, the targeted portion of the CARS1 pre-mRNA comprises a sequence with at least 80%, 85%, 90%, 95%, 97%, or 100% sequence identity to a region comprising at least 8 contiguous nucleic acids of a sequence of premrna_ENST00000278224.13, premrna_ENST00000380525.8, premrna_ENST00000397111.9, premrna_ENST00000439280.6, premrna_ENST00000465207.5, premrna_ENST00000465240.1, premrna_ENST00000465331.1, premrna_ENST00000466442.6, premrna_ENST00000470221.6, premrna_ENST00000484484.5, premrna_ENST00000524825.5, premrna_ENST00000526890.5, premrna_ENST00000527330.2, premrna_ENST00000529772.5, premrna_ENST00000531387.5, premrna_ENST00000639317.1, or a sequence of Table 3 or complements thereof. In some embodiments, the targeted portion of the CARS1 pre-mRNA comprises a sequence with at least 80%, 85%, 90%, 95%, 97%, or 100% sequence identity to a region comprising at least 8 contiguous nucleic acids of a sequence selected from the group consisting of SEQ ID NO: 318-SEQ ID NO: 321 or complements thereof. In some embodiments, the targeted portion of the CARS1 pre-mRNA comprises a sequence that is complementary to at least 8, 9, 10, 11, 12, 13, 14, 15, 16, 17, 18, 19 or 20 contiguous nucleic acids of a sequence of Table 6A or Table 6B or a complement thereof.

[0182] In some embodiments, the ASOs disclosed herein target a NSAE pre-mRNA transcribed from a CASP9 genomic sequence. In some embodiments, the ASO targets a NSAE pre-mRNA transcript from a CASP9 genomic sequence comprising a NSAE exon. In some embodiments, the ASO targets a NSAE pre-mRNA transcript from a CASP9 genomic sequence comprising an intron flanking the 3′ splice site of the NSAE exon and an intron flanking the 5′ splice site of a NSAE exon. In some embodiments, the ASO targets a NSAE pre-mRNA transcript comprising a sequence selected from the group consisting of premrna_ENST00000333868.10, premrna_ENST00000348549.9, premrna_ENST00000375890.8, premrna_ENST00000400777.7, premrna_ENST00000424908.5, premrna_ENST00000440484.1, premrna_ENST00000447522.5, premrna_ENST00000469637.1, premrna_ENST00000474305.2, premrna_ENST00000546424.5, and premrna_ENST00000546969.1. In some embodiments, the ASO targets a CASP9 pre-mRNA sequence comprising a NSAE exon. In some embodiments, the ASO targets a CASP9 pre-mRNA sequence comprising an intron flanking the 3′ splice site of the NSAE exon. In some embodiments, the ASO targets a CASP9 pre-mRNA sequence comprising an intron flanking the 5′ splice site of the NSAE exon. In some embodiments, the transcript is selected from the group consisting of transcript_ENST00000333868.10, transcript_ENST00000348549.9, transcript_ENST00000375890.8, transcript_ENST00000400777.7, transcript_ENST00000424908.5, transcript_ENST00000440484.1, transcript_ENST00000447522.5, transcript_ENST00000469637.1, transcript_ENST00000474305.2, transcript_ENST00000546424.5, and transcript_ENST00000546969.1.

[0183] In some embodiments, the CASP9 pre-mRNA transcript is encoded by a genetic sequence with at least about 80%, 85%, 90%, 95%, 96%, 97%, 98%, 99% or 100% sequence identity to the Ensembl reference number ENSG00000132906.18 or a complement thereof. In some embodiments, the CASP9 pre-mRNA transcript comprises a sequence with at least about 80%, 85%, 90%, 95%, 96%, 97%, 98%, 99% or 100% sequence identity to a CASP9 pre-mRNA transcript or a complement thereof described herein.

[0184] In some embodiments, the targeted portion of the CASP9 pre-mRNA comprises a sequence with at least 80%, 85%, 90%, 95%, 97%, or 100% sequence identity to a region comprising at least 8 contiguous nucleic acids of a sequence of premrna_ENST00000333868.10, premrna_ENST00000348549.9, premrna_ENST00000375890.8, premrna_ENST00000400777.7, premrna_ENST00000424908.5, premrna_ENST00000440484.1, premrna_ENST00000447522.5, premrna_ENST00000469637.1, premrna_ENST00000474305.2, premrna_ENST00000546424.5, premrna_ENST00000546969.1 or a sequence of Table 3 or complements thereof. In some embodiments, the targeted portion of the CASP9 pre-mRNA comprises a sequence with at least 80%, 85%, 90%, 95%, 97%, or 100% sequence identity to a region comprising at least 8 contiguous nucleic acids of a sequence selected from the group consisting of SEQ ID NO: 322-SEQ ID NO: 325 or complements thereof. In some embodiments, the targeted portion of the CASP9 pre-mRNA comprises a sequence that is complementary to at least 8, 9, 10, 11, 12, 13, 14, 15, 16, 17, 18, 19 or 20 contiguous nucleic acids of a sequence of Table 6A or Table 6B or a complement thereof.

[0185] In some embodiments, the ASOs disclosed herein target a NSAE pre-mRNA transcribed from a CATSPER1 genomic sequence. In some embodiments, the ASO targets a NSAE pre-mRNA transcript from a CATSPER1 genomic sequence comprising a NSAE exon. In some embodiments, the ASO targets a NSAE pre-mRNA transcript from a CATSPER1 genomic sequence comprising an intron flanking the 3′ splice site of the NSAE exon and an intron flanking the 5′ splice site of a NSAE exon. In some embodiments, the ASO targets a NSAE pre-mRNA transcript comprising a sequence selected from the group consisting of premrna_ENST00000312106.6 and premrna_ENST00000529244.1. In some embodiments, the ASO targets a CATSPER1 pre-mRNA sequence comprising a NSAE exon. In some embodiments, the ASO targets a CATSPER1 pre-mRNA sequence comprising an intron flanking the 3′ splice site of the NSAE exon. In some embodiments, the ASO targets a CATSPER1 pre-mRNA sequence comprising an intron flanking the 5′ splice site of the NSAE exon. In some embodiments, the transcript is selected from the group consisting of transcript_ENST00000312106.6 and transcript_ENST00000529244.1.

[0186] In some embodiments, the CATSPER1 pre-mRNA transcript is encoded by a genetic sequence with at least about 80%, 85%, 90%, 95%, 96%, 97%, 98%, 99% or 100% sequence identity to the Ensembl reference number ENSG00000175294.6 or a complement thereof. In some embodiments, the CATSPER1 pre-mRNA transcript comprises a sequence with at least about 80%, 85%, 90%, 95%, 96%, 97%, 98%, 99% or 100% sequence identity to a CATSPER1 pre-mRNA transcript or a complement thereof described herein.

[0187] In some embodiments, the targeted portion of the CATSPER1 pre-mRNA comprises a sequence with at least 80%, 85%, 90%, 95%, 97%, or 100% sequence identity to a region comprising at least 8 contiguous nucleic acids of a sequence of premrna_ENST00000312106.6, premrna_ENST00000529244.1, or a sequence of Table 3 or complements thereof. In some embodiments, the targeted portion of the CATSPER1 pre-mRNA comprises a sequence with at least 80%, 85%, 90%, 95%, 97%, or 100% sequence identity to a region comprising at least 8 contiguous nucleic acids of a sequence selected from the group consisting of SEQ ID NO: 326-SEQ ID NO: 329 or complements thereof. In some embodiments, the targeted portion of the CATSPER1 pre-mRNA comprises a sequence that is complementary to at least 8, 9, 10, 11, 12, 13, 14, 15, 16, 17, 18, 19 or 20 contiguous nucleic acids of a sequence of Table 6A or Table 6B or a complement thereof.

[0188] In some embodiments, the ASOs disclosed herein target a NSAE pre-mRNA transcribed from a CCDC40 genomic sequence. In some embodiments, the ASO targets a NSAE pre-mRNA transcript from a CCDC40 genomic sequence comprising a NSAE exon. In some embodiments, the ASO targets a NSAE pre-mRNA transcript from a CCDC40 genomic sequence comprising an intron flanking the 3′ splice site of the NSAE exon and an intron flanking the 5′ splice site of a NSAE exon. In some embodiments, the ASO targets a NSAE pre-mRNA transcript comprising a sequence selected from the group consisting of premrna_ENST00000269318.9, premrna_ENST00000374876.4, premrna_ENST00000374877.7, premrna_ENST00000397545.9, premrna_ENST00000571028.1, premrna_ENST00000572083.5, premrna_ENST00000572253.5, premrna_ENST00000572270.1, premrna_ENST00000573474.5, premrna_ENST00000573903.1, premrna_ENST00000574099.1, premrna_ENST00000574799.5, premrna_ENST00000574933.1, premrna_ENST00000575431.1, premrna_ENST00000576033.5, and premrna_ENST00000576241.1. In some embodiments, the ASO targets a CCDC40 pre-mRNA sequence comprising a NSAE exon. In some embodiments, the ASO targets a CCDC40 pre-mRNA sequence comprising an intron flanking the 3′ splice site of the NSAE exon. In some embodiments, the ASO targets a CCDC40 pre-mRNA sequence comprising an intron flanking the 5′ splice site of the NSAE exon. In some embodiments, the transcript is selected from the group consisting of transcript_ENST00000269318.9, transcript_ENST00000374876.4, transcript_ENST00000374877.7, transcript_ENST00000397545.9, transcript_ENST00000571028.1, transcript_ENST00000572083.5, transcript_ENST00000572253.5, transcript_ENST00000572270.1, transcript_ENST00000573474.5, transcript_ENST00000573903.1, transcript_ENST00000574099.1, transcript_ENST00000574799.5, transcript_ENST00000574933.1, transcript_ENST00000575431.1, transcript_ENST00000576033.5, and transcript_ENST00000576241.1.

[0189] In some embodiments, the CCDC40 pre-mRNA transcript is encoded by a genetic sequence with at least about 80%, 85%, 90%, 95%, 96%, 97%, 98%, 99% or 100% sequence identity to the Ensembl reference number ENSG00000141519.15 or a complement thereof. In some embodiments, the CCDC40 pre-mRNA transcript comprises a sequence with at least about 80%, 85%, 90%, 95%, 96%, 97%, 98%, 99% or 100% sequence identity to a CCDC40 pre-mRNA transcript or a complement thereof described herein.

[0190] In some embodiments, the targeted portion of the CCDC40 pre-mRNA comprises a sequence with at least 80%, 85%, 90%, 95%, 97%, or 100% sequence identity to a region comprising at least 8 contiguous nucleic acids of a sequence of premrna_ENST00000269318.9, premrna_ENST00000374876.4, premrna_ENST00000374877.7, premrna_ENST00000397545.9, premrna_ENST00000571028.1, premrna_ENST00000572083.5, premrna_ENST00000572253.5, premrna_ENST00000572270.1, premrna_ENST00000573474.5, premrna_ENST00000573903.1, premrna_ENST00000574099.1, premrna_ENST00000574799.5, premrna_ENST00000574933.1, premrna_ENST00000575431.1, premrna_ENST00000576033.5, premrna_ENST00000576241.1, or a sequence of Table 3 or complements thereof. In some embodiments, the targeted portion of the CCDC40 pre-mRNA comprises a sequence with at least 80%, 85%, 90%, 95%, 97%, or 100% sequence identity to a region comprising at least 8 contiguous nucleic acids of a sequence selected from the group consisting of SEQ ID NO: 330-SEQ ID NO: 333 or complements thereof. In some embodiments, the targeted portion of the CCDC40 pre-mRNA comprises a sequence that is complementary to at least 8, 9, 10, 11, 12, 13, 14, 15, 16, 17, 18, 19 or 20 contiguous nucleic acids of a sequence of Table 6A or Table 6B or a complement thereof.

[0191] In some embodiments, the ASOs disclosed herein target a NSAE pre-mRNA transcribed from a CCDC88B genomic sequence. In some embodiments, the ASO targets a NSAE pre-mRNA transcript from a CCDC88B genomic sequence comprising a NSAE exon. In some embodiments, the ASO targets a NSAE pre-mRNA transcript from a CCDC88B genomic sequence comprising an intron flanking the 3′ splice site of the NSAE exon and an intron flanking the 5′ splice site of a NSAE exon. In some embodiments, the ASO targets a NSAE pre-mRNA transcript comprising a sequence selected from the group consisting of premrna_ENST00000301897.5, premrna_ENST00000356786.10, premrna_ENST00000359902.2, premrna_ENST00000463837.5, premrna_ENST00000472524.1, premrna_ENST00000473405.1, premrna_ENST00000479965.5, premrna_ENST00000492980.1, premma_ENST00000494080.5, and premrna_ENST00000494566.5. In some embodiments, the ASO targets a CCDC88B pre-mRNA sequence comprising a NSAE exon. In some embodiments, the ASO targets a CCDC88B pre-mRNA sequence comprising an intron flanking the 3′ splice site of the NSAE exon. In some embodiments, the ASO targets a CCDC88B pre-mRNA sequence comprising an intron flanking the 5′ splice site of the NSAE exon. In some embodiments, the transcript is selected from the group consisting of transcript_ENST00000301897.5, transcript_ENST00000356786.10, transcript_ENST00000359902.2, transcript_ENST00000463837.5, transcript_ENST00000472524.1, transcript_ENST00000473405.1, transcript_ENST00000479965.5, transcript_ENST00000492980.1, transcript_ENST00000494080.5, and transcript_ENST00000494566.5.

[0192] In some embodiments, the CCDC88B pre-mRNA transcript is encoded by a genetic sequence with at least about 80%, 85%, 90%, 95%, 96%, 97%, 98%, 99% or 100% sequence identity to the Ensembl reference number ENSG00000168071.22 or a complement thereof. In some embodiments, the CCDC88B pre-mRNA transcript comprises a sequence with at least about 80%, 85%, 90%, 95%, 96%, 97%, 98%, 99% or 100% sequence identity to a CCDC88B pre-mRNA transcript or a complement thereof described herein.

[0193] In some embodiments, the targeted portion of the CCDC88B pre-mRNA comprises a sequence with at least 80%, 85%, 90%, 95%, 97%, or 100% sequence identity to a region comprising at least 8 contiguous nucleic acids of a sequence of premrna_ENST00000301897.5, premrna_ENST00000356786.10, premrna_ENST00000359902.2, premrna_ENST00000463837.5, premma_ENST00000472524.1, premrna_ENST00000473405.1, premrna_ENST00000479965.5, premma_ENST00000492980.1, premrna_ENST00000494080.5, premrna_ENST00000494566.5 or a sequence of Table 3 or complements thereof. In some embodiments, the targeted portion of the CCDC88B pre-mRNA comprises a sequence with at least 80%, 85%, 90%, 95%, 97%, or 100% sequence identity to a region comprising at least 8 contiguous nucleic acids of a sequence selected from the group consisting of SEQ ID NO: 334-SEQ ID NO: 337 or complements thereof. In some embodiments, the targeted portion of the CCDC88B pre-mRNA comprises a sequence that is complementary to at least 8, 9, 10, 11, 12, 13, 14, 15, 16, 17, 18, 19 or 20 contiguous nucleic acids of a sequence of Table 6A or Table 6B or a complement thereof.

[0194] In some embodiments, the ASOs disclosed herein target a NSAE pre-mRNA transcribed from a CD4 genomic sequence. In some embodiments, the ASO targets a NSAE pre-mRNA transcript from a CD4 genomic sequence comprising a NSAE exon. In some embodiments, the ASO targets a NSAE pre-mRNA transcript from a CD4 genomic sequence comprising an intron flanking the 3′ splice site of the NSAE exon and an intron flanking the 5′ splice site of a NSAE exon. In some embodiments, the ASO targets a NSAE pre-mRNA transcript comprising a sequence selected from the group consisting of premrna_ENST00000011653.9, premrna_ENST00000437800.6, premma_ENST00000535466.5, premrna_ENST00000535707.5, premrna_ENST00000536563.1, premma_ENST00000536590.1, premrna_ENST00000536610.5, premrna_ENST00000538827.5, premma_ENST00000539492.1, premrna_ENST00000541982.5, premrna_ENST00000543755.1, and premma_ENST00000544344.5. In some embodiments, the ASO targets a CD4 pre-mRNA sequence comprising a NSAE exon. In some embodiments, the ASO targets a CD4 pre-mRNA sequence comprising an intron flanking the 3′ splice site of the NSAE exon. In some embodiments, the ASO targets a CD4 pre-mRNA sequence comprising an intron flanking the 5′ splice site of the NSAE exon. In some embodiments, the transcript is selected from the group consisting of transcript_ENST00000011653.9, transcript_ENST00000437800.6, transcript_ENST00000535466.5, transcript_ENST00000535707.5, transcript_ENST00000536563.1, transcript_ENST00000536590.1, transcript_ENST00000536610.5, transcript_ENST00000538827.5, transcript_ENST00000539492.1, transcript_ENST00000541982.5, transcript_ENST00000543755.1, and transcript_ENST00000544344.5.

[0195] In some embodiments, the CD4 pre-mRNA transcript is encoded by a genetic sequence with at least about 80%, 85%, 90%, 95%, 96%, 97%, 98%, 99% or 100% sequence identity to the Ensembl reference number ENSG00000010610.10 or a complement thereof. In some embodiments, the CD4 pre-mRNA transcript comprises a sequence with at least about 80%, 85%, 90%, 95%, 96%, 97%, 98%, 99% or 100% sequence identity to a CD4 pre-mRNA transcript or a complement thereof described herein.

[0196] In some embodiments, the targeted portion of the CD4 pre-mRNA comprises a sequence with at least 80%, 85%, 90%, 95%, 97%, or 100% sequence identity to a region comprising at least 8 contiguous nucleic acids of a sequence of premrna_ENST00000011653.9, premma_ENST00000437800.6, premrna_ENST00000535466.5, premrna_ENST00000535707.5, premma_ENST00000536563.1, premrna_ENST00000536590.1, premrna_ENST00000536610.5, premma_ENST00000538827.5, premrna_ENST00000539492.1, premrna_ENST00000541982.5, premma_ENST00000543755.1, premrna_ENST00000544344.5 or a sequence of Table 3 or complements thereof. In some embodiments, the targeted portion of the CD4 pre-mRNA comprises a sequence with at least 80%, 85%, 90%, 95%, 97%, or 100% sequence identity to a region comprising at least 8 contiguous nucleic acids of a sequence selected from the group consisting of SEQ ID NO: 338-SEQ ID NO: 341 or complements thereof. In some embodiments, the targeted portion of the CD4 pre-mRNA comprises a sequence that is complementary to at least 8, 9, 10, 11, 12, 13, 14, 15, 16, 17, 18, 19 or 20 contiguous nucleic acids of a sequence of Table 6A or Table 6B or a complement thereof.

[0197] In some embodiments, the ASOs disclosed herein target a NSAE pre-mRNA transcribed from a CD58 genomic sequence. In some embodiments, the ASO targets a NSAE pre-mRNA transcript from a CD58 genomic sequence comprising a NSAE exon. In some embodiments, the ASO targets a NSAE pre-mRNA transcript from a CD58 genomic sequence comprising an intron flanking the 3′ splice site of the NSAE exon and an intron flanking the 5′ splice site of a NSAE exon. In some embodiments, the ASO targets a NSAE pre-mRNA transcript comprising a sequence selected from the group consisting of premrna_ENST00000369487.3, premrna_ENST00000369489.10, premma_ENST00000457047.6, premrna_ENST00000464088.5, and premma_ENST00000526981.1. In some embodiments, the ASO targets a CD58 pre-mRNA sequence comprising a NSAE exon. In some embodiments, the ASO targets a CD58 pre-mRNA sequence comprising an intron flanking the 3′ splice site of the NSAE exon. In some embodiments, the ASO targets a CD58 pre-mRNA sequence comprising an intron flanking the 5′ splice site of the NSAE exon. In some embodiments, the transcript is selected from the group consisting of transcript_ENST00000369487.3, transcript_ENST00000369489.10, transcript_ENST00000457047.6, transcript_ENST00000464088.5, and transcript_ENST00000526981.1.

[0198] In some embodiments, the CD58 pre-mRNA transcript is encoded by a genetic sequence with at least about 80%, 85%, 90%, 95%, 96%, 97%, 98%, 99% or 100% sequence identity to the Ensembl reference number ENSG00000116815.16 or a complement thereof. In some embodiments, the CD58 pre-mRNA transcript comprises a sequence with at least about 80%, 85%, 90%, 95%, 96%, 97%, 98%, 99% or 100% sequence identity to a CD58 pre-mRNA transcript or a complement thereof described herein.

[0199] In some embodiments, the targeted portion of the CD58 pre-mRNA comprises a sequence with at least 80%, 85%, 90%, 95%, 97%, or 100% sequence identity to a region comprising at least 8 contiguous nucleic acids of a sequence of premrna_ENST00000369487.3, premrna_ENST00000369489.10, premrna_ENST00000457047.6, premrna_ENST00000464088.5, premrna_ENST00000526981.1 or a sequence of Table 3 or complements thereof. In some embodiments, the targeted portion of the CD58 pre-mRNA comprises a sequence with at least 80%, 85%, 90%, 95%, 97%, or 100% sequence identity to a region comprising at least 8 contiguous nucleic acids of a sequence selected from the group consisting of SEQ ID NO: 342-SEQ ID NO: 347 or complements thereof. In some embodiments, the targeted portion of the CD58 pre-mRNA comprises a sequence that is complementary to at least 8, 9, 10, 11, 12, 13, 14, 15, 16, 17, 18, 19 or 20 contiguous nucleic acids of a sequence of Table 6A or Table 6B or a complement thereof.

[0200] In some embodiments, the ASOs disclosed herein target a NSAE pre-mRNA transcribed from a CES2 genomic sequence. In some embodiments, the ASO targets a NSAE pre-mRNA transcript from a CES2 genomic sequence comprising a NSAE exon. In some embodiments, the ASO targets a NSAE pre-mRNA transcript from a CES2 genomic sequence comprising an intron flanking the 3′ splice site of the NSAE exon and an intron flanking the 5′ splice site of a NSAE exon. In some embodiments, the ASO targets a NSAE pre-mRNA transcript comprising a sequence selected from the group consisting of premrna_ENST00000317091.10, premrna_ENST00000417689.6, premrna_ENST00000561697.5, premrna_ENST00000561843.1, premrna_ENST00000563988.1, premrna_ENST00000564420.1, premrna_ENST00000566182.1, premrna_ENST00000566359.1, premrna_ENST00000567128.1, premrna_ENST00000568347.1, premrna_ENST00000568470.6, premrna_ENST00000570032.2, premrna_ENST00000652196.1, and premrna_ENST00000652667.1.

[0201] In some embodiments, the ASO targets a CES2 pre-mRNA sequence comprising a NSAE exon. In some embodiments, the ASO targets a CES2 pre-mRNA sequence comprising an intron flanking the 3′ splice site of the NSAE exon. In some embodiments, the ASO targets a CES2 pre-mRNA sequence comprising an intron flanking the 5′ splice site of the NSAE exon. In some embodiments, the transcript is selected from the group consisting of transcript_ENST00000317091.10, transcript_ENST00000417689.6, transcript_ENST00000561697.5, transcript_ENST00000561843.1, transcript_ENST00000563988.1, transcript_ENST00000564420.1, transcript_ENST00000566182.1, transcript_ENST00000566359.1, transcript_ENST00000567128.1, transcript_ENST00000568347.1, transcript_ENST00000568470.6, transcript_ENST00000570032.2, transcript_ENST00000652196.1, and transcript_ENST00000652667.1.

[0202] In some embodiments, the CES2 pre-mRNA transcript is encoded by a genetic sequence with at least about 80%, 85%, 90%, 95%, 96%, 97%, 98%, 99% or 100% sequence identity to the Ensembl reference number ENSG00000172831.14 or a complement thereof. In some embodiments, the CES2 pre-mRNA transcript comprises a sequence with at least about 80%, 85%, 90%, 95%, 96%, 97%, 98%, 99% or 100% sequence identity to a CES2 pre-mRNA transcript or a complement thereof described herein.

[0203] In some embodiments, the targeted portion of the CES2 pre-mRNA comprises a sequence with at least 80%, 85%, 90%, 95%, 97%, or 100% sequence identity to a region comprising at least 8 contiguous nucleic acids of a sequence of premrna_ENST00000317091.10, premrna_ENST00000417689.6, premrna_ENST00000561697.5, premrna_ENST00000561843.1, premrna_ENST00000563988.1, premrna_ENST00000564420.1, premrna_ENST00000566182.1, premrna_ENST00000566359.1, premrna_ENST00000567128.1, premrna_ENST00000568347.1, premrna_ENST00000568470.6, premrna_ENST00000570032.2, premrna_ENST00000652196.1, premrna_ENST00000652667.1, or a sequence of Table 3 or complements thereof. In some embodiments, the targeted portion of the CES2 pre-mRNA comprises a sequence with at least 80%, 85%, 90%, 95%, 97%, or 100% sequence identity to a region comprising at least 8 contiguous nucleic acids of a sequence selected from the group consisting of SEQ ID NO: 348-SEQ ID NO: 359 or complements thereof. In some embodiments, the targeted portion of the CES2 pre-mRNA comprises a sequence that is complementary to at least 8, 9, 10, 11, 12, 13, 14, 15, 16, 17, 18, 19 or 20 contiguous nucleic acids of a sequence of Table 6A or Table 6B or a complement thereof.

[0204] In some embodiments, the ASOs disclosed herein target a NSAE pre-mRNA transcribed from a CHFR genomic sequence. In some embodiments, the ASO targets a NSAE pre-mRNA transcript from a CHFR genomic sequence comprising a NSAE exon. In some embodiments, the ASO targets a NSAE pre-mRNA transcript from a CHFR genomic sequence comprising an intron flanking the 3′ splice site of the NSAE exon and an intron flanking the 5′ splice site of a NSAE exon. In some embodiments, the ASO targets a NSAE pre-mRNA transcript comprising a sequence selected from the group consisting of premrna_ENST00000266880.11, premrna_ENST00000315585.11, premrna_ENST00000432561.6, premrna_ENST00000443047.6, premrna_ENST00000450056.6, premrna_ENST00000499045.2, premrna_ENST00000502279.2, premrna_ENST00000511001.2, premrna_ENST00000535181.5, premrna_ENST00000535527.5, premrna_ENST00000535897.1, premrna_ENST00000536196.1, premrna_ENST00000536843.5, premrna_ENST00000536932.5, premrna_ENST00000537551.5, premrna_ENST00000538235.2, premrna_ENST00000540537.5, premrna_ENST00000540963.1, premrna_ENST00000541341.5, premrna_ENST00000541817.5, premrna_ENST00000542714.5, premrna_ENST00000544093.5, premrna_ENST00000544268.5, and premrna_ENST00000545046.5. In some embodiments, the ASO targets a CHFR pre-mRNA sequence comprising a NSAE exon. In some embodiments, the ASO targets a CHFR pre-mRNA sequence comprising an intron flanking the 3′ splice site of the NSAE exon. In some embodiments, the ASO targets a CHFR pre-mRNA sequence comprising an intron flanking the 5′ splice site of the NSAE exon. In some embodiments, the transcript is selected from the group consisting of transcript_ENST00000266880.11, transcript_ENST00000315585.11, transcript_ENST00000432561.6, transcript_ENST00000443047.6, transcript_ENST00000450056.6, transcript_ENST00000499045.2, transcript_ENST00000502279.2, transcript_ENST00000511001.2, transcript_ENST00000535181.5, transcript_ENST00000535527.5, transcript_ENST00000535897.1, transcript_ENST00000536196.1, transcript_ENST00000536843.5, transcript_ENST00000536932.5, transcript_ENST00000537551.5, transcript_ENST00000538235.2, transcript_ENST00000540537.5, transcript_ENST00000540963.1, transcript_ENST00000541341.5, transcript_ENST00000541817.5, transcript_ENST00000542714.5, transcript_ENST00000544093.5, transcript_ENST00000544268.5, and transcript_ENST00000545046.5.

[0205] In some embodiments, the CHFR pre-mRNA transcript is encoded by a genetic sequence with at least about 80%, 85%, 90%, 95%, 96%, 97%, 98%, 99% or 100% sequence identity to the Ensembl reference number ENSG00000072609.17 or a complement thereof. In some embodiments, the CHFR pre-mRNA transcript comprises a sequence with at least about 80%, 85%, 90%, 95%, 96%, 97%, 98%, 99% or 100% sequence identity to a CHFR pre-mRNA transcript or a complement thereof described herein.

[0206] In some embodiments, the targeted portion of the CHFR pre-mRNA comprises a sequence with at least 80%, 85%, 90%, 95%, 97%, or 100% sequence identity to a region comprising at least 8 contiguous nucleic acids of a sequence of premrna_ENST00000266880.11, premrna_ENST00000315585.11, premrna_ENST00000432561.6, premrna_ENST00000443047.6, premrna_ENST00000450056.6, premrna_ENST00000499045.2, premrna_ENST00000502279.2, premrna_ENST00000511001.2, premrna_ENST00000535181.5, premrna_ENST00000535527.5, premrna_ENST00000535897.1, premrna_ENST00000536196.1, premrna_ENST00000536843.5, premrna_ENST00000536932.5, premrna_ENST00000537551.5, premrna_ENST00000538235.2, premrna_ENST00000540537.5, premrna_ENST00000540963.1, premrna_ENST00000541341.5, premrna_ENST00000541817.5, premrna_ENST00000542714.5, premrna_ENST00000544093.5, premrna_ENST00000544268.5, premrna_ENST00000545046.5 or a sequence of Table 3 or complements thereof. In some embodiments, the targeted portion of the CHFR pre-mRNA comprises a sequence with at least 80%, 85%, 90%, 95%, 97%, or 100% sequence identity to a region comprising at least 8 contiguous nucleic acids of a sequence selected from the group consisting of SEQ ID NO: 360-SEQ ID NO: 363 or complements thereof. In some embodiments, the targeted portion of the CHFR pre-mRNA comprises a sequence that is complementary to at least 8, 9, 10, 11, 12, 13, 14, 15, 16, 17, 18, 19 or 20 contiguous nucleic acids of a sequence of Table 6A or Table 6B or a complement thereof.

[0207] In some embodiments, the ASOs disclosed herein target a NSAE pre-mRNA transcribed from a CLCN2 genomic sequence. In some embodiments, the ASO targets a NSAE pre-mRNA transcript from a CLCN2 genomic sequence comprising a NSAE exon. In some embodiments, the ASO targets a NSAE pre-mRNA transcript from a CLCN2 genomic sequence comprising an intron flanking the 3′ splice site of the NSAE exon and an intron flanking the 5′ splice site of a NSAE exon. In some embodiments, the ASO targets a NSAE pre-mRNA transcript comprising a sequence selected from the group consisting of premrna_ENST00000265593.9, premrna_ENST00000344937.11, premrna_ENST00000430397.5, premrna_ENST00000434054.6, premrna_ENST00000457512.1, premrna_ENST00000465231.1, premrna_ENST00000475279.2, premrna_ENST00000485667.1, premrna_ENST00000491162.1, premrna_ENST00000636180.1, premrna_ENST00000636241.1, premrna_ENST00000636419.1, premrna_ENST00000636492.1, premrna_ENST00000636658.1, premrna_ENST00000636661.1, premrna_ENST00000636830.1, premrna_ENST00000636860.1, premrna_ENST00000637258.1, premrna_ENST00000637392.1, premrna_ENST00000637538.1, premrna_ENST00000637909.1, and premrna_ENST00000638134.1. In some embodiments, the ASO targets a CLCN2 pre-mRNA sequence comprising a NSAE exon. In some embodiments, the ASO targets a CLCN2 pre-mRNA sequence comprising an intron flanking the 3′ splice site of the NSAE exon. In some embodiments, the ASO targets a CLCN2 pre-mRNA sequence comprising an intron flanking the 5′ splice site of the NSAE exon. In some embodiments, the transcript is selected from the group consisting of transcript_ENST00000265593.9, transcript_ENST00000344937.11, transcript_ENST00000430397.5, transcript_ENST00000434054.6, transcript_ENST00000457512.1, transcript_ENST00000465231.1, transcript_ENST00000475279.2, transcript_ENST00000485667.1, transcript_ENST00000491162.1, transcript_ENST00000636180.1, transcript_ENST00000636241.1, transcript_ENST00000636419.1, transcript_ENST00000636492.1, transcript_ENST00000636658.1, transcript_ENST00000636661.1, transcript_ENST00000636830.1, transcript_ENST00000636860.1, transcript_ENST00000637258.1, transcript_ENST00000637392.1, transcript_ENST00000637538.1, transcript_ENST00000637909.1, and transcript_ENST00000638134.1.

[0208] In some embodiments, the CLCN2 pre-mRNA transcript is encoded by a genetic sequence with at least about 80%, 85%, 90%, 95%, 96%, 97%, 98%, 99% or 100% sequence identity to the Ensembl reference number ENSG00000114859.16 or a complement thereof. In some embodiments, the CLCN2 pre-mRNA transcript comprises a sequence with at least about 80%, 85%, 90%, 95%, 96%, 97%, 98%, 99% or 100% sequence identity to a CLCN2 pre-mRNA transcript or a complement thereof described herein.

[0209] In some embodiments, the targeted portion of the CLCN2 pre-mRNA comprises a sequence with at least 80%, 85%, 90%, 95%, 97%, or 100% sequence identity to a region comprising at least 8 contiguous nucleic acids of a sequence of premrna_ENST00000265593.9, premrna_ENST00000344937.11, premrna_ENST00000430397.5, premrna_ENST00000434054.6, premrna_ENST00000457512.1, premrna_ENST00000465231.1, premrna_ENST00000475279.2, premrna_ENST00000485667.1, premrna_ENST00000491162.1, premrna_ENST00000636180.1, premrna_ENST00000636241.1, premrna_ENST00000636419.1, premrna_ENST00000636492.1, premrna_ENST00000636658.1, premrna_ENST00000636661.1, premrna_ENST00000636830.1, premrna_ENST00000636860.1, premrna_ENST00000637258.1, premrna_ENST00000637392.1, premrna_ENST00000637538.1, premrna_ENST00000637909.1, premrna_ENST00000638134.1 or a sequence of Table 3 or complements thereof. In some embodiments, the targeted portion of the CLCN2 pre-mRNA comprises a sequence with at least 80%, 85%, 90%, 95%, 97%, or 100% sequence identity to a region comprising at least 8 contiguous nucleic acids of a sequence selected from the group consisting of SEQ ID NO: 364-SEQ ID NO: 369 or complements thereof. In some embodiments, the targeted portion of the CLCN2 pre-mRNA comprises a sequence that is complementary to at least 8, 9, 10, 11, 12, 13, 14, 15, 16, 17, 18, 19 or 20 contiguous nucleic acids of a sequence of Table 6A or Table 6B or a complement thereof.

[0210] In some embodiments, the ASOs disclosed herein target a NSAE pre-mRNA transcribed from a CNOT3 genomic sequence. In some embodiments, the ASO targets a NSAE pre-mRNA transcript from a CNOT3 genomic sequence comprising a NSAE exon. In some embodiments, the ASO targets a NSAE pre-mRNA transcript from a CNOT3 genomic sequence comprising an intron flanking the 3′ splice site of the NSAE exon and an intron flanking the 5′ splice site of a NSAE exon. In some embodiments, the ASO targets a NSAE pre-mRNA transcript comprising a sequence selected from the group consisting of premrna_ENST00000221232.11, premrna_ENST00000358389.7, premrna_ENST00000440571.6, premrna_ENST00000447684.5, premrna_ENST00000457463.1, premrna_ENST00000471126.1, premrna_ENST00000496327.2, premrna_ENST00000613073.4, premrna_ENST00000617930.2, premrna_ENST00000618939.5, premrna_ENST00000642159.1, premrna_ENST00000644245.1, premrna_ENST00000644707.1, premrna_ENST00000646002.1, and premrna_ENST00000647082.1. In some embodiments, the ASO targets a CNOT3 pre-mRNA sequence comprising a NSAE exon. In some embodiments, the ASO targets a CNOT3 pre-mRNA sequence comprising an intron flanking the 3′ splice site of the NSAE exon. In some embodiments, the ASO targets a CNOT3 pre-mRNA sequence comprising an intron flanking the 5′ splice site of the NSAE exon. In some embodiments, the transcript is selected from the group consisting of transcript_ENST00000221232.11, transcript_ENST00000358389.7, transcript_ENST00000440571.6, transcript_ENST00000447684.5, transcript_ENST00000457463.1, transcript_ENST00000471126.1, transcript_ENST00000496327.2, transcript_ENST00000613073.4, transcript_ENST00000617930.2, transcript_ENST00000618939.5, transcript_ENST00000642159.1, transcript_ENST00000644245.1, transcript_ENST00000644707.1, transcript_ENST00000646002.1, and transcript_ENST00000647082.1.

[0211] In some embodiments, the CNOT3 pre-mRNA transcript is encoded by a genetic sequence with at least about 80%, 85%, 90%, 95%, 96%, 97%, 98%, 99% or 100% sequence identity to the Ensembl reference number ENSG00000088038.19, ENSG00000273943.4, ENSG00000274176.4, ENSG00000274616.4, ENSG00000274941.4, ENSG00000275979.4, ENSG00000276082.4, ENSG00000277600.4, ENSG00000277114.4, or ENSG00000277615.4, or a complement thereof. In some embodiments, the CNOT3 pre-mRNA transcript comprises a sequence with at least about 80%, 85%, 90%, 95%, 96%, 97%, 98%, 99% or 100% sequence identity to a CNOT3 pre-mRNA transcript or a complement thereof described herein.

[0212] In some embodiments, the targeted portion of the CNOT3 pre-mRNA comprises a sequence with at least 80%, 85%, 90%, 95%, 97%, or 100% sequence identity to a region comprising at least 8 contiguous nucleic acids of a sequence of premrna_ENST00000221232.11, premrna_ENST00000358389.7, premrna_ENST00000440571.6, premrna_ENST00000447684.5, premrna_ENST00000457463.1, premrna_ENST00000471126.1, premrna_ENST00000496327.2, premrna_ENST00000613073.4, premrna_ENST00000617930.2, premrna_ENST00000618939.5, premrna_ENST00000642159.1, premrna_ENST00000644245.1, premrna_ENST00000644707.1, premrna_ENST00000646002.1, premrna_ENST00000647082.1 or a sequence of Table 3 or complements thereof. In some embodiments, the targeted portion of the CNOT3 pre-mRNA comprises a sequence with at least 80%, 85%, 90%, 95%, 97%, or 100% sequence identity to a region comprising at least 8 contiguous nucleic acids of a sequence selected from the group consisting of SEQ ID NO: 370-SEQ ID NO: 377 or complements thereof. In some embodiments, the targeted portion of the CNOT3 pre-mRNA comprises a sequence that is complementary to at least 8, 9, 10, 11, 12, 13, 14, 15, 16, 17, 18, 19 or 20 contiguous nucleic acids of a sequence of Table 6A or Table 6B or a complement thereof.

[0213] In some embodiments, the ASOs disclosed herein target a NSAE pre-mRNA transcribed from a CNTROB genomic sequence. In some embodiments, the ASO targets a NSAE pre-mRNA transcript from a CNTROB genomic sequence comprising a NSAE exon. In some embodiments, the ASO targets a NSAE pre-mRNA transcript from a CNTROB genomic sequence comprising an intron flanking the 3′ splice site of the NSAE exon and an intron flanking the 5′ splice site of a NSAE exon. In some embodiments, the ASO targets a NSAE pre-mRNA transcript comprising a sequence selected from the group consisting of premrna_ENST00000380262.7, premrna_ENST00000563694.6, premrna_ENST00000565740.5, premrna_ENST00000570782.1, premrna_ENST00000570784.1, premrna_ENST00000571540.5, premrna_ENST00000571632.5, premrna_ENST00000573862.1, premrna_ENST00000574430.5, premrna_ENST00000575408.5, premrna_ENST00000576536.1, premrna_ENST00000576538.5, premrna_ENST00000576587.1, premrna_ENST00000576723.5, and premrna_ENST00000576922.5. In some embodiments, the ASO targets a CNTROB pre-mRNA sequence comprising a NSAE exon. In some embodiments, the ASO targets a CNTROB pre-mRNA sequence comprising an intron flanking the 3′ splice site of the NSAE exon. In some embodiments, the ASO targets a CNTROB pre-mRNA sequence comprising an intron flanking the 5′ splice site of the NSAE exon. In some embodiments, the transcript is selected from the group consisting of transcript_ENST00000380262.7, transcript_ENST00000563694.6, transcript_ENST00000565740.5, transcript_ENST00000570782.1, transcript_ENST00000570784.1, transcript_ENST00000571540.5, transcript_ENST00000571632.5, transcript_ENST00000573862.1, transcript_ENST00000574430.5, transcript_ENST00000575408.5, transcript_ENST00000576536.1, transcript_ENST00000576538.5, transcript_ENST00000576587.1, transcript_ENST00000576723.5, and transcript_ENST00000576922.5.

[0214] In some embodiments, the CNTROB pre-mRNA transcript is encoded by a genetic sequence with at least about 80%, 85%, 90%, 95%, 96%, 97%, 98%, 99% or 100% sequence identity to the Ensembl reference number ENSG00000170037.14 or a complement thereof. In some embodiments, the CNTROB pre-mRNA transcript comprises a sequence with at least about 80%, 85%, 90%, 95%, 96%, 97%, 98%, 99% or 100% sequence identity to a CNTROB pre-mRNA transcript or a complement thereof described herein.

[0215] In some embodiments, the targeted portion of the CNTROB pre-mRNA comprises a sequence with at least 80%, 85%, 90%, 95%, 97%, or 100% sequence identity to a region comprising at least 8 contiguous nucleic acids of a sequence of premrna_ENST00000380262.7, premrna_ENST00000563694.6, premrna_ENST00000565740.5, premrna_ENST00000570782.1, premrna_ENST00000570784.1, premrna_ENST00000571540.5, premrna_ENST00000571632.5, premrna_ENST00000573862.1, premrna_ENST00000574430.5, premrna_ENST00000575408.5, premrna_ENST00000576536.1, premrna_ENST00000576538.5, premrna_ENST00000576587.1, premrna_ENST00000576723.5, premrna_ENST00000576922.5 or a sequence of Table 3 or complements thereof. In some embodiments, the targeted portion of the CNTROB pre-mRNA comprises a sequence with at least 80%, 85%, 90%, 95%, 97%, or 100% sequence identity to a region comprising at least 8 contiguous nucleic acids of a sequence selected from the group consisting of SEQ ID NO: 378-SEQ ID NO: 381 or complements thereof. In some embodiments, the targeted portion of the CNTROB pre-mRNA comprises a sequence that is complementary to at least 8, 9, 10, 11, 12, 13, 14, 15, 16, 17, 18, 19 or 20 contiguous nucleic acids of a sequence of Table 6A or Table 6B or a complement thereof.

[0216] In some embodiments, the ASOs disclosed herein target a NSAE pre-mRNA transcribed from a COL5A3 genomic sequence. In some embodiments, the ASO targets a NSAE pre-mRNA transcript from a COL5A3 genomic sequence comprising a NSAE exon. In some embodiments, the ASO targets a NSAE pre-mRNA transcript from a COL5A3 genomic sequence comprising an intron flanking the 3′ splice site of the NSAE exon and an intron flanking the 5′ splice site of a NSAE exon. In some embodiments, the ASO targets a NSAE pre-mRNA transcript comprising a sequence selected from the group consisting of premrna_ENST00000264828.4 and premrna_ENST00000461214.1. In some embodiments, the ASO targets a COL5A3 pre-mRNA sequence comprising a NSAE exon. In some embodiments, the ASO targets a COL5A3 pre-mRNA sequence comprising an intron flanking the 3′ splice site of the NSAE exon. In some embodiments, the ASO targets a COL5A3 pre-mRNA sequence comprising an intron flanking the 5′ splice site of the NSAE exon. In some embodiments, the transcript is selected from the group consisting of transcript_ENST00000264828.4 and transcript_ENST00000461214.1.

[0217] In some embodiments, the COL5A3 pre-mRNA transcript is encoded by a genetic sequence with at least about 80%, 85%, 90%, 95%, 96%, 97%, 98%, 99% or 100% sequence identity to the Ensembl reference number ENSG00000080573.7 or a complement thereof. In some embodiments, the COL5A3 pre-mRNA transcript comprises a sequence with at least about 80%, 85%, 90%, 95%, 96%, 97%, 98%, 99% or 100% sequence identity to a COL5A3 pre-mRNA transcript or a complement thereof described herein.

[0218] In some embodiments, the targeted portion of the COL5A3 pre-mRNA comprises a sequence with at least 80%, 85%, 90%, 95%, 97%, or 100% sequence identity to a region comprising at least 8 contiguous nucleic acids of a sequence of premrna_ENST00000264828.4, premrna_ENST00000461214.1, or a sequence of Table 3 or complements thereof. In some embodiments, the targeted portion of the COL5A3 pre-mRNA comprises a sequence with at least 80%, 85%, 90%, 95%, 97%, or 100% sequence identity to a region comprising at least 8 contiguous nucleic acids of a sequence selected from the group consisting of SEQ ID NO: 382-SEQ ID NO: 385 or complements thereof. In some embodiments, the targeted portion of the COL5A3 pre-mRNA comprises a sequence that is complementary to at least 8, 9, 10, 11, 12, 13, 14, 15, 16, 17, 18, 19 or 20 contiguous nucleic acids of a sequence of Table 6A or Table 6B or a complement thereof.

[0219] In some embodiments, the ASOs disclosed herein target a NSAE pre-mRNA transcribed from a CPSF1 genomic sequence. In some embodiments, the ASO targets a NSAE pre-mRNA transcript from a CPSF1 genomic sequence comprising a NSAE exon. In some embodiments, the ASO targets a NSAE pre-mRNA transcript from a CPSF1 genomic sequence comprising an intron flanking the 3′ splice site of the NSAE exon and an intron flanking the 5′ splice site of a NSAE exon. In some embodiments, the ASO targets a NSAE pre-mRNA transcript comprising a sequence selected from the group consisting of premrna_ENST00000526271.2, premrna_ENST00000527827.1, premrna_ENST00000527916.1, premrna_ENST00000529288.1, premrna_ENST00000531042.5, premrna_ENST00000531480.2, premrna_ENST00000531727.5, premrna_ENST00000532560.5, premrna_ENST00000532725.1, premrna_ENST00000532935.5, premrna_ENST00000533492.1, premrna_ENST00000616140.2, premrna_ENST00000620219.4, and premrna_ENST00000622776.1. In some embodiments, the ASO targets a CPSF1 pre-mRNA sequence comprising a NSAE exon. In some embodiments, the ASO targets a CPSF1 pre-mRNA sequence comprising an intron flanking the 3′ splice site of the NSAE exon. In some embodiments, the ASO targets a CPSF1 pre-mRNA sequence comprising an intron flanking the 5′ splice site of the NSAE exon. In some embodiments, the transcript is selected from the group consisting of transcript_ENST00000526271.2, transcript_ENST00000527827.1, transcript_ENST00000527916.1, transcript_ENST00000529288.1, transcript_ENST00000531042.5, transcript_ENST00000531480.2, transcript_ENST00000531727.5, transcript_ENST00000532560.5, transcript_ENST00000532725.1, transcript_ENST00000532935.5, transcript_ENST00000533492.1, transcript_ENST00000616140.2, transcript_ENST00000620219.4, and transcript_ENST00000622776.1.

[0220] In some embodiments, the CPSF1 pre-mRNA transcript is encoded by a genetic sequence with at least about 80%, 85%, 90%, 95%, 96%, 97%, 98%, 99% or 100% sequence identity to the Ensembl reference number ENSG00000071894.17 or ENSG00000285049.2 or a complement thereof. In some embodiments, the CPSF1 pre-mRNA transcript comprises a sequence with at least about 80%, 85%, 90%, 95%, 96%, 97%, 98%, 99% or 100% sequence identity to a CPSF1 pre-mRNA transcript or a complement thereof described herein.

[0221] In some embodiments, the targeted portion of the CPSF1 pre-mRNA comprises a sequence with at least 80%, 85%, 90%, 95%, 97%, or 100% sequence identity to a region comprising at least 8 contiguous nucleic acids of a sequence of premrna_ENST00000526271.2, premrna_ENST00000527827.1, premrna_ENST00000527916.1, premrna_ENST00000529288.1, premrna_ENST00000531042.5, premrna_ENST00000531480.2, premrna_ENST00000531727.5, premrna_ENST00000532560.5, premrna_ENST00000532725.1, premrna_ENST00000532935.5, premrna_ENST00000533492.1, premrna_ENST00000616140.2, premrna_ENST00000620219.4, premrna_ENST00000622776.1, or a sequence of Table 3 or complements thereof. In some embodiments, the targeted portion of the CPSF1 pre-mRNA comprises a sequence with at least 80%, 85%, 90%, 95%, 97%, or 100% sequence identity to a region comprising at least 8 contiguous nucleic acids of a sequence selected from the group consisting of SEQ ID NO: 386-SEQ ID NO: 389 or complements thereof. In some embodiments, the targeted portion of the CPSF1 pre-mRNA comprises a sequence that is complementary to at least 8, 9, 10, 11, 12, 13, 14, 15, 16, 17, 18, 19 or 20 contiguous nucleic acids of a sequence of Table 6A or Table 6B or a complement thereof.

[0222] In some embodiments, the ASOs disclosed herein target a NSAE pre-mRNA transcribed from a CSPP1 genomic sequence. In some embodiments, the ASO targets a NSAE pre-mRNA transcript from a CSPP1 genomic sequence comprising a NSAE exon. In some embodiments, the ASO targets a NSAE pre-mRNA transcript from a CSPP1 genomic sequence comprising an intron flanking the 3′ splice site of the NSAE exon and an intron flanking the 5′ splice site of a NSAE exon. In some embodiments, the ASO targets a NSAE pre-mRNA transcript comprising a sequence selected from the group consisting of premrna_ENST00000262210.9, premrna_ENST00000519163.6, premrna_ENST00000519668.1, premrna_ENST00000519701.5, premrna_ENST00000521168.5, premrna_ENST00000521324.1, and premrna_ENST00000521919.5. In some embodiments, the ASO targets a CSPP1 pre-mRNA sequence comprising a NSAE exon. In some embodiments, the ASO targets a CSPP1 pre-mRNA sequence comprising an intron flanking the 3′ splice site of the NSAE exon. In some embodiments, the ASO targets a CSPP1 pre-mRNA sequence comprising an intron flanking the 5′ splice site of the NSAE exon. In some embodiments, the transcript is selected from the group consisting of transcript_ENST00000262210.9, transcript_ENST00000519163.6, transcript_ENST00000519668.1, transcript_ENST00000519701.5, transcript_ENST00000521168.5, transcript_ENST00000521324.1, and transcript_ENST00000521919.5.

[0223] In some embodiments, the CSPP1 pre-mRNA transcript is encoded by a genetic sequence with at least about 80%, 85%, 90%, 95%, 96%, 97%, 98%, 99% or 100% sequence identity to the Ensembl reference number ENSG00000104218.14 or a complement thereof. In some embodiments, the CSPP1 pre-mRNA transcript comprises a sequence with at least about 80%, 85%, 90%, 95%, 96%, 97%, 98%, 99% or 100% sequence identity to a CSPP1 pre-mRNA transcript or a complement thereof described herein.

[0224] In some embodiments, the targeted portion of the CSPP1 pre-mRNA comprises a sequence with at least 80%, 85%, 90%, 95%, 97%, or 100% sequence identity to a region comprising at least 8 contiguous nucleic acids of a sequence of premrna_ENST00000262210.9, premrna_ENST00000519163.6, premrna_ENST00000519668.1, premrna_ENST00000519701.5, premrna_ENST00000521168.5, premrna_ENST00000521324.1, and premrna_ENST00000521919.5, or a sequence of Table 3 or complements thereof. In some embodiments, the targeted portion of the CSPP1 pre-mRNA comprises a sequence with at least 80%, 85%, 90%, 95%, 97%, or 100% sequence identity to a region comprising at least 8 contiguous nucleic acids of a sequence selected from the group consisting of SEQ ID NO: 390-SEQ ID NO: 393 or complements thereof. In some embodiments, the targeted portion of the CSPP1 pre-mRNA comprises a sequence that is complementary to at least 8, 9, 10, 11, 12, 13, 14, 15, 16, 17, 18, 19 or 20 contiguous nucleic acids of a sequence of Table 6A or Table 6B or a complement thereof.

[0225] In some embodiments, the ASOs disclosed herein target a NSAE pre-mRNA transcribed from a CTF1 genomic sequence. In some embodiments, the ASO targets a NSAE pre-mRNA transcript from a CTF1 genomic sequence comprising a NSAE exon. In some embodiments, the ASO targets a NSAE pre-mRNA transcript from a CTF1 genomic sequence comprising an intron flanking the 3′ splice site of the NSAE exon and an intron flanking the 5′ splice site of a NSAE exon. In some embodiments, the ASO targets a NSAE pre-mRNA transcript comprising a sequence selected from the group consisting of premrna_ENST00000279804.2, and premrna_ENST00000395019.3. In some embodiments, the ASO targets a CTF1 pre-mRNA sequence comprising a NSAE exon. In some embodiments, the ASO targets a CTF1 pre-mRNA sequence comprising an intron flanking the 3′ splice site of the NSAE exon. In some embodiments, the ASO targets a CTF1 pre-mRNA sequence comprising an intron flanking the 5′ splice site of the NSAE exon. In some embodiments, the transcript is selected from the group consisting of transcript_ENST00000279804.2, and transcript_ENST00000395019.3.

[0226] In some embodiments, the CTF1 pre-mRNA transcript is encoded by a genetic sequence with at least about 80%, 85%, 90%, 95%, 96%, 97%, 98%, 99% or 100% sequence identity to the Ensembl reference number ENSG00000150281.6 or a complement thereof. In some embodiments, the CTF1 pre-mRNA transcript comprises a sequence with at least about 80%, 85%, 90%, 95%, 96%, 97%, 98%, 99% or 100% sequence identity to a CTF1 pre-mRNA transcript or a complement thereof described herein.

[0227] In some embodiments, the targeted portion of the CTF1 pre-mRNA comprises a sequence with at least 80%, 85%, 90%, 95%, 97%, or 100% sequence identity to a region comprising at least 8 contiguous nucleic acids of a sequence of premrna_ENST00000279804.2, premrna_ENST00000395019.3 or a sequence of Table 3 or complements thereof. In some embodiments, the targeted portion of the CTF1 pre-mRNA comprises a sequence with at least 80%, 85%, 90%, 95%, 97%, or 100% sequence identity to a region comprising at least 8 contiguous nucleic acids of a sequence selected from the group consisting of SEQ ID NO: 394-SEQ ID NO: 399 or complements thereof. In some embodiments, the targeted portion of the CTF1 pre-mRNA comprises a sequence that is complementary to at least 8, 9, 10, 11, 12, 13, 14, 15, 16, 17, 18, 19 or 20 contiguous nucleic acids of a sequence of Table 6A or Table 6B or a complement thereof.

[0228] In some embodiments, the ASOs disclosed herein target a NSAE pre-mRNA transcribed from a CTH genomic sequence. In some embodiments, the ASO targets a NSAE pre-mRNA transcript from a CTH genomic sequence comprising a NSAE exon. In some embodiments, the ASO targets a NSAE pre-mRNA transcript from a CTH genomic sequence comprising an intron flanking the 3′ splice site of the NSAE exon and an intron flanking the 5′ splice site of a NSAE exon. In some embodiments, the ASO targets a NSAE pre-mRNA transcript comprising a sequence selected from the group consisting of premrna_ENST00000346806.2, premrna_ENST00000370938.8, premrna_ENST00000411986.6, premrna_ENST00000464926.1, and premrna_ENST00000482383.1. In some embodiments, the ASO targets a CTH pre-mRNA sequence comprising a NSAE exon. In some embodiments, the ASO targets a CTH pre-mRNA sequence comprising an intron flanking the 3′ splice site of the NSAE exon. In some embodiments, the ASO targets a CTH pre-mRNA sequence comprising an intron flanking the 5′ splice site of the NSAE exon. In some embodiments, the transcript is selected from the group consisting of transcript_ENST00000346806.2, transcript_ENST00000370938.8, transcript_ENST00000411986.6, transcript_ENST00000464926.1, and transcript_ENST00000482383.1.

[0229] In some embodiments, the CTH pre-mRNA transcript is encoded by a genetic sequence with at least about 80%, 85%, 90%, 95%, 96%, 97%, 98%, 99% or 100% sequence identity to the Ensembl reference number ENSG00000116761.12 or a complement thereof. In some embodiments, the CTH pre-mRNA transcript comprises a sequence with at least about 80%, 85%, 90%, 95%, 96%, 97%, 98%, 99% or 100% sequence identity to a CTH pre-mRNA transcript or a complement thereof described herein.

[0230] In some embodiments, the targeted portion of the CTH pre-mRNA comprises a sequence with at least 80%, 85%, 90%, 95%, 97%, or 100% sequence identity to a region comprising at least 8 contiguous nucleic acids of a sequence of premrna_ENST00000346806.2, premrna_ENST00000370938.8, premrna_ENST00000411986.6, premrna_ENST00000464926.1, premrna_ENST00000482383.1 or a sequence of Table 3 or complements thereof. In some embodiments, the targeted portion of the CTH pre-mRNA comprises a sequence with at least 80%, 85%, 90%, 95%, 97%, or 100% sequence identity to a region comprising at least 8 contiguous nucleic acids of a sequence selected from the group consisting of SEQ ID NO: 400-SEQ ID NO: 407 or complements thereof. In some embodiments, the targeted portion of the CTH pre-mRNA comprises a sequence that is complementary to at least 8, 9, 10, 11, 12, 13, 14, 15, 16, 17, 18, 19 or 20 contiguous nucleic acids of a sequence of Table 6A or Table 6B or a complement thereof.

[0231] In some embodiments, the ASOs disclosed herein target a NSAE pre-mRNA transcribed from a CYP3A5 genomic sequence. In some embodiments, the ASO targets a NSAE pre-mRNA transcript from a CYP3A5 genomic sequence comprising a NSAE exon. In some embodiments, the ASO targets a NSAE pre-mRNA transcript from a CYP3A5 genomic sequence comprising an intron flanking the 3′ splice site of the NSAE exon and an intron flanking the 5′ splice site of a NSAE exon. In some embodiments, the ASO targets a NSAE pre-mRNA transcript comprising a sequence selected from the group consisting of premrna_ENST00000222982.8, premrna_ENST00000339843.6, premrna_ENST00000439761.3, premrna_ENST00000456417.5, premrna_ENST00000461920.5, premrna_ENST00000463364.5, premrna_ENST00000463907.5, premrna_ENST00000466061.5, premrna_ENST00000469622.5, premrna_ENST00000469887.5, premrna_ENST00000473347.1, premrna_ENST00000480723.5, premrna_ENST00000481825.5, premrna_ENST00000488187.1, premrna_ENST00000489231.1, and premrna_ENST00000646887.1. In some embodiments, the ASO targets a CYP3A5 pre-mRNA sequence comprising a NSAE exon. In some embodiments, the ASO targets a CYP3A5 pre-mRNA sequence comprising an intron flanking the 3′ splice site of the NSAE exon. In some embodiments, the ASO targets a CYP3A5 pre-mRNA sequence comprising an intron flanking the 5′ splice site of the NSAE exon. In some embodiments, the transcript is selected from the group consisting of transcript_ENST00000222982.8, transcript_ENST00000339843.6, transcript_ENST00000439761.3, transcript_ENST00000456417.5, transcript_ENST00000461920.5, transcript_ENST00000463364.5, transcript_ENST00000463907.5, transcript_ENST00000466061.5, transcript_ENST00000469622.5, transcript_ENST00000469887.5, transcript_ENST00000473347.1, transcript_ENST00000480723.5, transcript_ENST00000481825.5, transcript_ENST00000488187.1, transcript_ENST00000489231.1, and transcript_ENST00000646887.1.

[0232] In some embodiments, the CYP3A5 pre-mRNA transcript is encoded by a genetic sequence with at least about 80%, 85%, 90%, 95%, 96%, 97%, 98%, 99% or 100% sequence identity to the Ensembl reference number ENSG00000106258.15 or a complement thereof. In some embodiments, the CYP3A5 pre-mRNA transcript comprises a sequence with at least about 80%, 85%, 90%, 95%, 96%, 97%, 98%, 99% or 100% sequence identity to a CYP3A5 pre-mRNA transcript or a complement thereof described herein.

[0233] In some embodiments, the targeted portion of the CYP3A5 pre-mRNA comprises a sequence with at least 80%, 85%, 90%, 95%, 97%, or 100% sequence identity to a region comprising at least 8 contiguous nucleic acids of a sequence of premrna_ENST00000222982.8, premrna_ENST00000339843.6, premrna_ENST00000439761.3, premrna_ENST00000456417.5, premrna_ENST00000461920.5, premrna_ENST00000463364.5, premrna_ENST00000463907.5, premrna_ENST00000466061.5, premrna_ENST00000469622.5, premrna_ENST00000469887.5, premrna_ENST00000473347.1, premrna_ENST00000480723.5, premrna_ENST00000481825.5, premrna_ENST00000488187.1, premrna_ENST00000489231.1, premrna_ENST00000646887.1 or a sequence of Table 3 or complements thereof. In some embodiments, the targeted portion of the CYP3A5 pre-mRNA comprises a sequence with at least 80%, 85%, 90%, 95%, 97%, or 100% sequence identity to a region comprising at least 8 contiguous nucleic acids of a sequence selected from the group consisting of SEQ ID NO: 408-SEQ ID NO: 411 or complements thereof. In some embodiments, the targeted portion of the CYP3A5 pre-mRNA comprises a sequence that is complementary to at least 8, 9, 10, 11, 12, 13, 14, 15, 16, 17, 18, 19 or 20 contiguous nucleic acids of a sequence of Table 6A or Table 6B or a complement thereof.

[0234] In some embodiments, the ASOs disclosed herein target a NSAE pre-mRNA transcribed from a DAB2IP genomic sequence. In some embodiments, the ASO targets a NSAE pre-mRNA transcript from a DAB2IP genomic sequence comprising a NSAE exon. In some embodiments, the ASO targets a NSAE pre-mRNA transcript from a DAB2IP genomic sequence comprising an intron flanking the 3′ splice site of the NSAE exon and an intron flanking the 5′ splice site of a NSAE exon. In some embodiments, the ASO targets a NSAE pre-mRNA transcript comprising a sequence selected from the group consisting of premrna_ENST00000259371.6, premrna_ENST00000309989.1, premrna_ENST00000373782.7, premrna_ENST00000394340.7, premrna_ENST00000408936.7, premrna_ENST00000436835.5, premrna_ENST00000459906.1, premrna_ENST00000465078.1, premrna_ENST00000487716.1, premrna_ENST00000489314.1, premrna_ENST00000648444.1, and premrna_ENST00000648693.1. In some embodiments, the ASO targets a DAB2IP pre-mRNA sequence comprising a NSAE exon. In some embodiments, the ASO targets a DAB2IP pre-mRNA sequence comprising an intron flanking the 3′ splice site of the NSAE exon. In some embodiments, the ASO targets a DAB2IP pre-mRNA sequence comprising an intron flanking the 5′ splice site of the NSAE exon. In some embodiments, the transcript is selected from the group consisting of transcript_ENST00000259371.6, transcript_ENST00000309989.1, transcript_ENST00000373782.7, transcript_ENST00000394340.7, transcript_ENST00000408936.7, transcript_ENST00000436835.5, transcript_ENST00000459906.1, transcript_ENST00000465078.1, transcript_ENST00000487716.1, transcript_ENST00000489314.1, transcript_ENST00000648444.1, and transcript_ENST00000648693.1.

[0235] In some embodiments, the DAB2IP pre-mRNA transcript is encoded by a genetic sequence with at least about 80%, 85%, 90%, 95%, 96%, 97%, 98%, 99% or 100% sequence identity to the Ensembl reference number ENSG00000136848.17 or a complement thereof. In some embodiments, the DAB2IP pre-mRNA transcript comprises a sequence with at least about 80%, 85%, 90%, 95%, 96%, 97%, 98%, 99% or 100% sequence identity to a DAB2IP pre-mRNA transcript or a complement thereof described herein.

[0236] In some embodiments, the targeted portion of the DAB2IP pre-mRNA comprises a sequence with at least 80%, 85%, 90%, 95%, 97%, or 100% sequence identity to a region comprising at least 8 contiguous nucleic acids of a sequence of premrna_ENST00000259371.6, premrna_ENST00000309989.1, premrna_ENST00000373782.7, premrna_ENST00000394340.7, premrna_ENST00000408936.7, premrna_ENST00000436835.5, premrna_ENST00000459906.1, premrna_ENST00000465078.1, premrna_ENST00000487716.1, premrna_ENST00000489314.1, premrna_ENST00000648444.1, premrna_ENST00000648693.1 or a sequence of Table 3 or complements thereof. In some embodiments, the targeted portion of the DAB2IP pre-mRNA comprises a sequence with at least 80%, 85%, 90%, 95%, 97%, or 100% sequence identity to a region comprising at least 8 contiguous nucleic acids of a sequence selected from the group consisting of SEQ ID NO: 412-SEQ ID NO: 415 or complements thereof. In some embodiments, the targeted portion of the DAB2IP pre-mRNA comprises a sequence that is complementary to at least 8, 9, 10, 11, 12, 13, 14, 15, 16, 17, 18, 19 or 20 contiguous nucleic acids of a sequence of Table 6A or Table 6B or a complement thereof.

[0237] In some embodiments, the ASOs disclosed herein target a NSAE pre-mRNA transcribed from a DBN1 genomic sequence. In some embodiments, the ASO targets a NSAE pre-mRNA transcript from a DBN1 genomic sequence comprising a NSAE exon. In some embodiments, the ASO targets a NSAE pre-mRNA transcript from a DBN1 genomic sequence comprising an intron flanking the 3′ splice site of the NSAE exon and an intron flanking the 5′ splice site of a NSAE exon. In some embodiments, the ASO targets a NSAE pre-mRNA transcript comprising a sequence selected from the group consisting of premrna_ENST00000292385.9, premrna_ENST00000309007.9, premrna_ENST00000393565.5, premrna_ENST00000467054.2, premrna_ENST00000471767.1, premrna_ENST00000472831.5, premrna_ENST00000477391.6, premrna_ENST00000505550.1, premrna_ENST00000506117.5, premrna_ENST00000512501.1, and premrna_ENST00000514833.1. In some embodiments, the ASO targets a DBN1 pre-mRNA sequence comprising a NSAE exon. In some embodiments, the ASO targets a DBN1 pre-mRNA sequence comprising an intron flanking the 3′ splice site of the NSAE exon. In some embodiments, the ASO targets a DBN1 pre-mRNA sequence comprising an intron flanking the 5′ splice site of the NSAE exon. In some embodiments, the transcript is selected from the group consisting of transcript_ENST00000292385.9, transcript_ENST00000309007.9, transcript_ENST00000393565.5, transcript_ENST00000467054.2, transcript_ENST00000471767.1, transcript_ENST00000472831.5, transcript_ENST00000477391.6, transcript_ENST00000505550.1, transcript_ENST00000506117.5, transcript_ENST00000512501.1, and transcript_ENST00000514833.1.

[0238] In some embodiments, the DBN1 pre-mRNA transcript is encoded by a genetic sequence with at least about 80%, 85%, 90%, 95%, 96%, 97%, 98%, 99% or 100% sequence identity to the Ensembl reference number ENSG00000113758.13 or a complement thereof. In some embodiments, the DBN1 pre-mRNA transcript comprises a sequence with at least about 80%, 85%, 90%, 95%, 96%, 97%, 98%, 99% or 100% sequence identity to a DBN1 pre-mRNA transcript or a complement thereof described herein.

[0239] In some embodiments, the targeted portion of the DBN1 pre-mRNA comprises a sequence with at least 80%, 85%, 90%, 95%, 97%, or 100% sequence identity to a region comprising at least 8 contiguous nucleic acids of a sequence of premrna_ENST00000292385.9, premrna_ENST00000309007.9, premrna_ENST00000393565.5, premrna_ENST00000467054.2, premrna_ENST00000471767.1, premrna_ENST00000472831.5, premrna_ENST00000477391.6, premrna_ENST00000505550.1, premrna_ENST00000506117.5, premrna_ENST00000512501.1, premrna_ENST00000514833.1 or a sequence of Table 3 or complements thereof. In some embodiments, the targeted portion of the DBN1 pre-mRNA comprises a sequence with at least 80%, 85%, 90%, 95%, 97%, or 100% sequence identity to a region comprising at least 8 contiguous nucleic acids of a sequence selected from the group consisting of SEQ ID NO: 416-SEQ ID NO: 424 or complements thereof. In some embodiments, the targeted portion of the DBN1 pre-mRNA comprises a sequence that is complementary to at least 8, 9, 10, 11, 12, 13, 14, 15, 16, 17, 18, 19 or 20 contiguous nucleic acids of a sequence of Table 6A or Table 6B or a complement thereof.

[0240] In some embodiments, the ASOs disclosed herein target a NSAE pre-mRNA transcribed from a DDX51 genomic sequence. In some embodiments, the ASO targets a NSAE pre-mRNA transcript from a DDX51 genomic sequence comprising a NSAE exon. In some embodiments, the ASO targets a NSAE pre-mRNA transcript from a DDX51 genomic sequence comprising an intron flanking the 3′ splice site of the NSAE exon and an intron flanking the 5′ splice site of a NSAE exon. In some embodiments, the ASO targets a NSAE pre-mRNA transcript comprising a sequence selected from the group consisting of premrna_ENST00000329073.8, premrna_ENST00000397333.4, premrna_ENST00000462829.2, premrna_ENST00000541489.5, premrna_ENST00000545991.1, and premrna_ENST00000546058.1. In some embodiments, the ASO targets a DDX51 pre-mRNA sequence comprising a NSAE exon. In some embodiments, the ASO targets a DDX51 pre-mRNA sequence comprising an intron flanking the 3′ splice site of the NSAE exon. In some embodiments, the ASO targets a DDX51 pre-mRNA sequence comprising an intron flanking the 5′ splice site of the NSAE exon. In some embodiments, the transcript is selected from the group consisting of transcript_ENST00000329073.8, transcript_ENST00000397333.4, transcript_ENST00000462829.2, transcript_ENST00000541489.5, transcript_ENST00000545991.1, and transcript_ENST00000546058.1.

[0241] In some embodiments, the DDX51 pre-mRNA transcript is encoded by a genetic sequence with at least about 80%, 85%, 90%, 95%, 96%, 97%, 98%, 99% or 100% sequence identity to the Ensembl reference number ENSG00000185163.10 or ENSG00000288503.1 or a complement thereof. In some embodiments, the DDX51 pre-mRNA transcript comprises a sequence with at least about 80%, 85%, 90%, 95%, 96%, 97%, 98%, 99% or 100% sequence identity to a DDX51 pre-mRNA transcript or a complement thereof described herein.

[0242] In some embodiments, the targeted portion of the DDX51 pre-mRNA comprises a sequence with at least 80%, 85%, 90%, 95%, 97%, or 100% sequence identity to a region comprising at least 8 contiguous nucleic acids of a sequence of premrna_ENST00000329073.8, premrna_ENST00000397333.4, premrna_ENST00000462829.2, premrna_ENST00000541489.5, premrna_ENST00000545991.1, premrna_ENST00000546058.1 or a sequence of Table 3 or complements thereof. In some embodiments, the targeted portion of the DDX51 pre-mRNA comprises a sequence with at least 80%, 85%, 90%, 95%, 97%, or 100% sequence identity to a region comprising at least 8 contiguous nucleic acids of a sequence selected from the group consisting of SEQ ID NO: 425-SEQ ID NO: 428 or complements thereof. In some embodiments, the targeted portion of the DDX51 pre-mRNA comprises a sequence that is complementary to at least 8, 9, 10, 11, 12, 13, 14, 15, 16, 17, 18, 19 or 20 contiguous nucleic acids of a sequence of Table 6A or Table 6B or a complement thereof.

[0243] In some embodiments, the ASOs disclosed herein target a NSAE pre-mRNA transcribed from a DEAF1 genomic sequence. In some embodiments, the ASO targets a NSAE pre-mRNA transcript from a DEAF1 genomic sequence comprising a NSAE exon. In some embodiments, the ASO targets a NSAE pre-mRNA transcript from a DEAF1 genomic sequence comprising an intron flanking the 3′ splice site of the NSAE exon and an intron flanking the 5′ splice site of a NSAE exon. In some embodiments, the ASO targets a NSAE pre-mRNA transcript comprising a sequence selected from the group consisting of premrna_ENST00000382409.3, premrna_ENST00000524786.1, premrna_ENST00000525626.5, premrna_ENST00000525904.5, premrna_ENST00000526790.1, premrna_ENST00000526857.2, premrna_ENST00000527170.5, premrna_ENST00000527658.1, premrna_ENST00000528864.5, premrna_ENST00000529717.5, premrna_ENST00000529727.1, and premrna_ENST00000530813.1. In some embodiments, the ASO targets a DEAF1 pre-mRNA sequence comprising a NSAE exon. In some embodiments, the ASO targets a DEAF1 pre-mRNA sequence comprising an intron flanking the 3′ splice site of the NSAE exon. In some embodiments, the ASO targets a DEAF1 pre-mRNA sequence comprising an intron flanking the 5′ splice site of the NSAE exon. In some embodiments, the transcript is selected from the group consisting of transcript_ENST00000382409.3, transcript_ENST00000524786.1, transcript_ENST00000525626.5, transcript_ENST00000525904.5, transcript_ENST00000526790.1, transcript_ENST00000526857.2, transcript_ENST00000527170.5, transcript_ENST00000527658.1, transcript_ENST00000528864.5, transcript_ENST00000529717.5, transcript_ENST00000529727.1, and transcript_ENST00000530813.1.

[0244] In some embodiments, the DEAF1 pre-mRNA transcript is encoded by a genetic sequence with at least about 80%, 85%, 90%, 95%, 96%, 97%, 98%, 99% or 100% sequence identity to the Ensembl reference number ENSG00000177030.17 or ENSG00000282712.1 a complement thereof. In some embodiments, the DEAF1 pre-mRNA transcript comprises a sequence with at least about 80%, 85%, 90%, 95%, 96%, 97%, 98%, 99% or 100% sequence identity to a DEAF1 pre-mRNA transcript or a complement thereof described herein.

[0245] In some embodiments, the targeted portion of the DEAF1 pre-mRNA comprises a sequence with at least 80%, 85%, 90%, 95%, 97%, or 100% sequence identity to a region comprising at least 8 contiguous nucleic acids of a sequence of premrna_ENST00000382409.3, premrna_ENST00000524786.1, premrna_ENST00000525626.5, premrna_ENST00000525904.5, premrna_ENST00000526790.1, premrna_ENST00000526857.2, premrna_ENST00000527170.5, premrna_ENST00000527658.1, premrna_ENST00000528864.5, premrna_ENST00000529717.5, premrna_ENST00000529727.1, premrna_ENST00000530813.1 or a sequence of Table 3 or complements thereof. In some embodiments, the targeted portion of the DEAF1 pre-mRNA comprises a sequence with at least 80%, 85%, 90%, 95%, 97%, or 100% sequence identity to a region comprising at least 8 contiguous nucleic acids of a sequence selected from the group consisting of SEQ ID NO: 429-SEQ ID NO: 432 or complements thereof. In some embodiments, the targeted portion of the DEAF1 pre-mRNA comprises a sequence that is complementary to at least 8, 9, 10, 11, 12, 13, 14, 15, 16, 17, 18, 19 or 20 contiguous nucleic acids of a sequence of Table 6A or Table 6B or a complement thereof.

[0246] In some embodiments, the ASOs disclosed herein target a NSAE pre-mRNA transcribed from a DGKE genomic sequence. In some embodiments, the ASO targets a NSAE pre-mRNA transcript from a DGKE genomic sequence comprising a NSAE exon. In some embodiments, the ASO targets a NSAE pre-mRNA transcript from a DGKE genomic sequence comprising an intron flanking the 3′ splice site of the NSAE exon and an intron flanking the 5′ splice site of a NSAE exon. In some embodiments, the ASO targets a NSAE pre-mRNA transcript comprising a sequence selected from the group consisting of premrna_ENST00000284061.8, premrna_ENST00000570738.1, premrna_ENST00000571084.1, premrna_ENST00000572810.1, premrna_ENST00000572944.1, and premrna_ENST00000576869.5. In some embodiments, the ASO targets a DGKE pre-mRNA sequence comprising a NSAE exon. In some embodiments, the ASO targets a DGKE pre-mRNA sequence comprising an intron flanking the 3′ splice site of the NSAE exon. In some embodiments, the ASO targets a DGKE pre-mRNA sequence comprising an intron flanking the 5′ splice site of the NSAE exon. In some embodiments, the transcript is selected from the group consisting of transcript_ENST00000284061.8, transcript_ENST00000570738.1, transcript_ENST00000571084.1, transcript_ENST00000572810.1, transcript_ENST00000572944.1, and transcript_ENST00000576869.5.

[0247] In some embodiments, the DGKE pre-mRNA transcript is encoded by a genetic sequence with at least about 80%, 85%, 90%, 95%, 96%, 97%, 98%, 99% or 100% sequence identity to the Ensembl reference number ENSG00000153933.10 or a complement thereof. In some embodiments, the DGKE pre-mRNA transcript comprises a sequence with at least about 80%, 85%, 90%, 95%, 96%, 97%, 98%, 99% or 100% sequence identity to a DGKE pre-mRNA transcript or a complement thereof described herein.

[0248] In some embodiments, the targeted portion of the DGKE pre-mRNA comprises a sequence with at least 80%, 85%, 90%, 95%, 97%, or 100% sequence identity to a region comprising at least 8 contiguous nucleic acids of a sequence of premrna_ENST00000284061.8, premrna_ENST00000570738.1, premrna_ENST00000571084.1, premrna_ENST00000572810.1, premrna_ENST00000572944.1, premrna_ENST00000576869.5 or a sequence of Table 3 or complements thereof. In some embodiments, the targeted portion of the DGKE pre-mRNA comprises a sequence with at least 80%, 85%, 90%, 95%, 97%, or 100% sequence identity to a region comprising at least 8 contiguous nucleic acids of a sequence selected from the group consisting of SEQ ID NO: 433-SEQ ID NO: 436 or complements thereof. In some embodiments, the targeted portion of the DGKE pre-mRNA comprises a sequence that is complementary to at least 8, 9, 10, 11, 12, 13, 14, 15, 16, 17, 18, 19 or 20 contiguous nucleic acids of a sequence of Table 6A or Table 6B or a complement thereof.

[0249] In some embodiments, the ASOs disclosed herein target a NSAE pre-mRNA transcribed from a DHDDS genomic sequence. In some embodiments, the ASO targets a NSAE pre-mRNA transcript from a DHDDS genomic sequence comprising a NSAE exon. In some embodiments, the ASO targets a NSAE pre-mRNA transcript from a DHDDS genomic sequence comprising an intron flanking the 3′ splice site of the NSAE exon and an intron flanking the 5′ splice site of a NSAE exon. In some embodiments, the ASO targets a NSAE pre-mRNA transcript comprising a sequence selected from the group consisting of premrna_ENST00000236342.12, premrna_ENST00000360009.6, premrna_ENST00000374185.7, premrna_ENST00000374186.7, premrna_ENST00000416052.1, premrna_ENST00000427245.6, premrna_ENST00000430232.5, premrna_ENST00000431933.5, premrna_ENST00000434391.6, premrna_ENST00000436153.6, premrna_ENST00000487944.5, premrna_ENST00000525165.5, premrna_ENST00000525326.5, premrna_ENST00000525410.1, premrna_ENST00000525546.5, premrna_ENST00000525682.6, premrna_ENST00000526219.5, premrna_ENST00000526278.5, premrna_ENST00000527611.1, premrna_ENST00000528557.5, premrna_ENST00000529688.5, premrna_ENST00000530781.5, premrna_ENST00000531312.5, premrna_ENST00000531955.5, and premrna_ENST00000533087.5. In some embodiments, the ASO targets a DHDDS pre-mRNA sequence comprising a NSAE exon. In some embodiments, the ASO targets a DHDDS pre-mRNA sequence comprising an intron flanking the 3′ splice site of the NSAE exon. In some embodiments, the ASO targets a DHDDS pre-mRNA sequence comprising an intron flanking the 5′ splice site of the NSAE exon. In some embodiments, the transcript is selected from the group consisting of transcript_ENST00000236342.12, transcript_ENST00000360009.6, transcript_ENST00000374185.7, transcript_ENST00000374186.7, transcript_ENST00000416052.1, transcript_ENST00000427245.6, transcript_ENST00000430232.5, transcript_ENST00000431933.5, transcript_ENST00000434391.6, transcript_ENST00000436153.6, transcript_ENST00000487944.5, transcript_ENST00000525165.5, transcript_ENST00000525326.5, transcript_ENST00000525410.1, transcript_ENST00000525546.5, transcript_ENST00000525682.6, transcript_ENST00000526219.5, transcript_ENST00000526278.5, transcript_ENST00000527611.1, transcript_ENST00000528557.5, transcript_ENST00000529688.5, transcript_ENST00000530781.5, transcript_ENST00000531312.5, transcript_ENST00000531955.5, and transcript_ENST00000533087.5.

[0250] In some embodiments, the DHDDS pre-mRNA transcript is encoded by a genetic sequence with at least about 80%, 85%, 90%, 95%, 96%, 97%, 98%, 99% or 100% sequence identity to the Ensembl reference number ENSG00000117682.17 or a complement thereof. In some embodiments, the DHDDS pre-mRNA transcript comprises a sequence with at least about 80%, 85%, 90%, 95%, 96%, 97%, 98%, 99% or 100% sequence identity to a DHDDS pre-mRNA transcript or a complement thereof described herein.

[0251] In some embodiments, the targeted portion of the DHDDS pre-mRNA comprises a sequence with at least 80%, 85%, 90%, 95%, 97%, or 100% sequence identity to a region comprising at least 8 contiguous nucleic acids of a sequence of premrna_ENST00000236342.12, premrna_ENST00000360009.6, premrna_ENST00000374185.7, premrna_ENST00000374186.7, premrna_ENST00000416052.1, premrna_ENST00000427245.6, premrna_ENST00000430232.5, premrna_ENST00000431933.5, premrna_ENST00000434391.6, premrna_ENST00000436153.6, premrna_ENST00000487944.5, premrna_ENST00000525165.5, premrna_ENST00000525326.5, premrna_ENST00000525410.1, premrna_ENST00000525546.5, premrna_ENST00000525682.6, premrna_ENST00000526219.5, premrna_ENST00000526278.5, premrna_ENST00000527611.1, premrna_ENST00000528557.5, premrna_ENST00000529688.5, premrna_ENST00000530781.5, premrna_ENST00000531312.5, premrna_ENST00000531955.5, premrna_ENST00000533087.5, or a sequence of Table 3 or complements thereof. In some embodiments, the targeted portion of the DHDDS pre-mRNA comprises a sequence with at least 80%, 85%, 90%, 95%, 97%, or 100% sequence identity to a region comprising at least 8 contiguous nucleic acids of a sequence selected from the group consisting of SEQ ID NO: 437-SEQ ID NO: 444 or complements thereof. In some embodiments, the targeted portion of the DHDDS pre-mRNA comprises a sequence that is complementary to at least 8, 9, 10, 11, 12, 13, 14, 15, 16, 17, 18, 19 or 20 contiguous nucleic acids of a sequence of Table 6A or Table 6B or a complement thereof.

[0252] In some embodiments, the ASOs disclosed herein target a NSAE pre-mRNA transcribed from a DMKN genomic sequence. In some embodiments, the ASO targets a NSAE pre-mRNA transcript from a DMKN genomic sequence comprising a NSAE exon. In some embodiments, the ASO targets a NSAE pre-mRNA transcript from a DMKN genomic sequence comprising an intron flanking the 3′ splice site of the NSAE exon and an intron flanking the 5′ splice site of a NSAE exon. In some embodiments, the ASO targets a NSAE pre-mRNA transcript comprising a sequence selected from the group consisting of premrna_ENST00000339686.8, premrna_ENST00000392206.6, premrna_ENST00000402589.6, premrna_ENST00000408915.6, premrna_ENST00000414866.6, premrna_ENST00000418261.5, premrna_ENST00000419602.5, premrna_ENST00000424570.6, premrna_ENST00000429837.5, premrna_ENST00000434389.5, premrna_ENST00000436012.5, premrna_ENST00000443640.5, premrna_ENST00000447113.6, premrna_ENST00000450261.1, premrna_ENST00000451297.6, premrna_ENST00000458071.5, premrna_ENST00000460051.5, premrna_ENST00000460327.5, premrna_ENST00000461300.5, premrna_ENST00000462126.5, premrna_ENST00000462538.5, premrna_ENST00000462721.5, premrna_ENST00000463292.5, premrna_ENST00000464709.6, premrna_ENST00000464894.5, premrna_ENST00000465927.5, premrna_ENST00000466587.6, premrna_ENST00000467532.5, premrna_ENST00000467637.5, premrna_ENST00000469960.5, premrna_ENST00000470746.6, premrna_ENST00000470857.1, premrna_ENST00000470964.1, premrna_ENST00000471017.5, premrna_ENST00000471786.6, premrna_ENST00000472065.1, premrna_ENST00000472252.6, premrna_ENST00000472365.6, premrna_ENST00000474928.5, premrna_ENST00000474992.5, premrna_ENST00000476051.5, premrna_ENST00000476246.5, premrna_ENST00000478648.6, premrna_ENST00000480502.5, premrna_ENST00000480507.1, premrna_ENST00000482321.5, premrna_ENST00000483855.5, premrna_ENST00000484064.5, premrna_ENST00000486450.5, premrna_ENST00000486756.6, premrna_ENST00000488542.6, premrna_ENST00000488762.5, premrna_ENST00000488892.5, premrna_ENST00000489395.6, premrna_ENST00000490622.5, premrna_ENST00000492341.6, premrna_ENST00000493517.5, premrna_ENST00000493979.5, premrna_ENST00000498211.5, premrna_ENST00000498269.5, premrna_ENST00000498593.5, premrna_ENST00000593342.5, premrna_ENST00000595571.5, premrna_ENST00000597212.5, premrna_ENST00000601368.5, premrna_ENST00000601650.1, premrna_ENST00000602679.5, and premrna_ENST00000602781.5. In some embodiments, the ASO targets a DMKN pre-mRNA sequence comprising a NSAE exon. In some embodiments, the ASO targets a DMKN pre-mRNA sequence comprising an intron flanking the 3′ splice site of the NSAE exon. In some embodiments, the ASO targets a DMKN pre-mRNA sequence comprising an intron flanking the 5′ splice site of the NSAE exon. In some embodiments, the transcript is selected from the group consisting of transcript_ENST00000339686.8, transcript_ENST00000392206.6, transcript_ENST00000402589.6, transcript_ENST00000408915.6, transcript_ENST00000414866.6, transcript_ENST00000418261.5, transcript_ENST00000419602.5, transcript_ENST00000424570.6, transcript_ENST00000429837.5, transcript_ENST00000434389.5, transcript_ENST00000436012.5, transcript_ENST00000443640.5, transcript_ENST00000447113.6, transcript_ENST00000450261.1, transcript_ENST00000451297.6, transcript_ENST00000458071.5, transcript_ENST00000460051.5, transcript_ENST00000460327.5, transcript_ENST00000461300.5, transcript_ENST00000462126.5, transcript_ENST00000462538.5, transcript_ENST00000462721.5, transcript_ENST00000463292.5, transcript_ENST00000464709.6, transcript_ENST00000464894.5, transcript_ENST00000465927.5, transcript_ENST00000466587.6, transcript_ENST00000467532.5, transcript_ENST00000467637.5, transcript_ENST00000469960.5, transcript_ENST00000470746.6, transcript_ENST00000470857.1, transcript_ENST00000470964.1, transcript_ENST00000471017.5, transcript_ENST00000471786.6, transcript_ENST00000472065.1, transcript_ENST00000472252.6, transcript_ENST00000472365.6, transcript_ENST00000474928.5, transcript_ENST00000474992.5, transcript_ENST00000476051.5, transcript_ENST00000476246.5, transcript_ENST00000478648.6, transcript_ENST00000480502.5, transcript_ENST00000480507.1, transcript_ENST00000482321.5, transcript_ENST00000483855.5, transcript_ENST00000484064.5, transcript_ENST00000486450.5, transcript_ENST00000486756.6, transcript_ENST00000488542.6, transcript_ENST00000488762.5, transcript_ENST00000488892.5, transcript_ENST00000489395.6, transcript_ENST00000490622.5, transcript_ENST00000492341.6, transcript_ENST00000493517.5, transcript_ENST00000493979.5, transcript_ENST00000498211.5, transcript_ENST00000498269.5, transcript_ENST00000498593.5, transcript_ENST00000593342.5, transcript_ENST00000595571.5, transcript_ENST00000597212.5, transcript_ENST00000601368.5, transcript_ENST00000601650.1, transcript_ENST00000602679.5, and transcript_ENST00000602781.5.

[0253] In some embodiments, the DMKN pre-mRNA transcript is encoded by a genetic sequence with at least about 80%, 85%, 90%, 95%, 96%, 97%, 98%, 99% or 100% sequence identity to the Ensembl reference number ENSG00000161249.21 or a complement thereof. In some embodiments, the DMKN pre-mRNA transcript comprises a sequence with at least about 80%, 85%, 90%, 95%, 96%, 97%, 98%, 99% or 100% sequence identity to a DMKN pre-mRNA transcript or a complement thereof described herein.

[0254] In some embodiments, the targeted portion of the DMKN pre-mRNA comprises a sequence with at least 80%, 85%, 90%, 95%, 97%, or 100% sequence identity to a region comprising at least 8 contiguous nucleic acids of a sequence of premrna_ENST00000339686.8, premrna_ENST00000392206.6, premrna_ENST00000402589.6, premrna_ENST00000408915.6, premrna_ENST00000414866.6, premrna_ENST00000418261.5, premrna_ENST00000419602.5, premrna_ENST00000424570.6, premrna_ENST00000429837.5, premrna_ENST00000434389.5, premrna_ENST00000436012.5, premrna_ENST00000443640.5, premrna_ENST00000447113.6, premrna_ENST00000450261.1, premrna_ENST00000451297.6, premrna_ENST00000458071.5, premrna_ENST00000460051.5, premrna_ENST00000460327.5, premrna_ENST00000461300.5, premrna_ENST00000462126.5, premrna_ENST00000462538.5, premrna_ENST00000462721.5, premrna_ENST00000463292.5, premrna_ENST00000464709.6, premrna_ENST00000464894.5, premrna_ENST00000465927.5, premrna_ENST00000466587.6, premrna_ENST00000467532.5, premrna_ENST00000467637.5, premrna_ENST00000469960.5, premrna_ENST00000470746.6, premrna_ENST00000470857.1, premrna_ENST00000470964.1, premrna_ENST00000471017.5, premrna_ENST00000471786.6, premrna_ENST00000472065.1, premrna_ENST00000472252.6, premrna_ENST00000472365.6, premrna_ENST00000474928.5, premrna_ENST00000474992.5, premrna_ENST00000476051.5, premrna_ENST00000476246.5, premrna_ENST00000478648.6, premrna_ENST00000480502.5, premrna_ENST00000480507.1, premrna_ENST00000482321.5, premrna_ENST00000483855.5, premrna_ENST00000484064.5, premrna_ENST00000486450.5, premrna_ENST00000486756.6, premrna_ENST00000488542.6, premrna_ENST00000488762.5, premrna_ENST00000488892.5, premrna_ENST00000489395.6, premrna_ENST00000490622.5, premrna_ENST00000492341.6, premrna_ENST00000493517.5, premrna_ENST00000493979.5, premrna_ENST00000498211.5, premrna_ENST00000498269.5, premrna_ENST00000498593.5, premrna_ENST00000593342.5, premrna_ENST00000595571.5, premrna_ENST00000597212.5, premrna_ENST00000601368.5, premrna_ENST00000601650.1, premrna_ENST00000602679.5, premrna_ENST00000602781.5 or a sequence of Table 3 or complements thereof. In some embodiments, the targeted portion of the DMKN pre-mRNA comprises a sequence with at least 80%, 85%, 90%, 95%, 97%, or 100% sequence identity to a region comprising at least 8 contiguous nucleic acids of a sequence selected from the group consisting of SEQ ID NO: 445-SEQ ID NO: 448 or complements thereof. In some embodiments, the targeted portion of the DMKN pre-mRNA comprises a sequence that is complementary to at least 8, 9, 10, 11, 12, 13, 14, 15, 16, 17, 18, 19 or 20 contiguous nucleic acids of a sequence of Table 6A or Table 6B or a complement thereof.

[0255] In some embodiments, the ASOs disclosed herein target a NSAE pre-mRNA transcribed from a DNHD1 genomic sequence. In some embodiments, the ASO targets a NSAE pre-mRNA transcript from a DNHD1 genomic sequence comprising a NSAE exon. In some embodiments, the ASO targets a NSAE pre-mRNA transcript from a DNHD1 genomic sequence comprising an intron flanking the 3′ splice site of the NSAE exon and an intron flanking the 5′ splice site of a NSAE exon. In some embodiments, the ASO targets a NSAE pre-mRNA transcript comprising a sequence selected from the group consisting of premrna_ENST00000254579.11, premrna_ENST00000354685.7, premrna_ENST00000472080.1, premrna_ENST00000473019.5, premrna_ENST00000477562.1, premrna_ENST00000524401.2, premrna_ENST00000525080.1, premrna_ENST00000525883.5, premrna_ENST00000526027.1, premrna_ENST00000527143.1, premrna_ENST00000529821.5, premrna_ENST00000530197.5, premrna_ENST00000531903.5, premrna_ENST00000532027.5, premrna_ENST00000532467.1, premrna_ENST00000533635.5, premrna_ENST00000533649.1, and premrna_ENST00000534210.6. In some embodiments, the ASO targets a DNHD1 pre-mRNA sequence comprising a NSAE exon. In some embodiments, the ASO targets a DNHD1 pre-mRNA sequence comprising an intron flanking the 3′ splice site of the NSAE exon. In some embodiments, the ASO targets a DNHD1 pre-mRNA sequence comprising an intron flanking the 5′ splice site of the NSAE exon. In some embodiments, the transcript is selected from the group consisting of transcript_ENST00000254579.11, transcript_ENST00000354685.7, transcript_ENST00000472080.1, transcript_ENST00000473019.5, transcript_ENST00000477562.1, transcript_ENST00000524401.2, transcript_ENST00000525080.1, transcript_ENST00000525883.5, transcript_ENST00000526027.1, transcript_ENST00000527143.1, transcript_ENST00000529821.5, transcript_ENST00000530197.5, transcript_ENST00000531903.5, transcript_ENST00000532027.5, transcript_ENST00000532467.1, transcript_ENST00000533635.5, transcript_ENST00000533649.1, and transcript_ENST00000534210.6.

[0256] In some embodiments, the DNHD1 pre-mRNA transcript is encoded by a genetic sequence with at least about 80%, 85%, 90%, 95%, 96%, 97%, 98%, 99% or 100% sequence identity to the Ensembl reference number ENSG00000179532.13 or a complement thereof. In some embodiments, the DNHD1 pre-mRNA transcript comprises a sequence with at least about 80%, 85%, 90%, 95%, 96%, 97%, 98%, 99% or 100% sequence identity to a DNHD1 pre-mRNA transcript or a complement thereof described herein.

[0257] In some embodiments, the targeted portion of the DNHD1 pre-mRNA comprises a sequence with at least 80%, 85%, 90%, 95%, 97%, or 100% sequence identity to a region comprising at least 8 contiguous nucleic acids of a sequence of premrna_ENST00000254579.11, premrna_ENST00000354685.7, premrna_ENST00000472080.1, premrna_ENST00000473019.5, premrna_ENST00000477562.1, premrna_ENST00000524401.2, premrna_ENST00000525080.1, premrna_ENST00000525883.5, premrna_ENST00000526027.1, premrna_ENST00000527143.1, premrna_ENST00000529821.5, premrna_ENST00000530197.5, premrna_ENST00000531903.5, premrna_ENST00000532027.5, premrna_ENST00000532467.1, premrna_ENST00000533635.5, premrna_ENST00000533649.1, premrna_ENST00000534210.6 or a sequence of Table 3 or complements thereof. In some embodiments, the targeted portion of the DNHD1 pre-mRNA comprises a sequence with at least 80%, 85%, 90%, 95%, 97%, or 100% sequence identity to a region comprising at least 8 contiguous nucleic acids of a sequence selected from the group consisting of SEQ ID NO: 449-SEQ ID NO: 452 or complements thereof. In some embodiments, the targeted portion of the DNHD1 pre-mRNA comprises a sequence that is complementary to at least 8, 9, 10, 11, 12, 13, 14, 15, 16, 17, 18, 19 or 20 contiguous nucleic acids of a sequence of Table 6A or Table 6B or a complement thereof.

[0258] In some embodiments, the ASOs disclosed herein target a NSAE pre-mRNA transcribed from a DOCK8 genomic sequence. In some embodiments, the ASO targets a NSAE pre-mRNA transcript from a DOCK8 genomic sequence comprising a NSAE exon. In some embodiments, the ASO targets a NSAE pre-mRNA transcript from a DOCK8 genomic sequence comprising an intron flanking the 3′ splice site of the NSAE exon and an intron flanking the 5′ splice site of a NSAE exon. In some embodiments, the ASO targets a NSAE pre-mRNA transcript comprising a sequence selected from the group consisting of premrna_ENST00000382329.1, premrna_ENST00000382331.5, premrna_ENST00000382341.5, premrna_ENST00000432829.6, premrna_ENST00000453981.5, premrna_ENST00000454469.6, premrna_ENST00000462618.1, premrna_ENST00000469197.5, premrna_ENST00000469391.5, premrna_ENST00000474772.1, premrna_ENST00000478380.5, premrna_ENST00000479404.5, premrna_ENST00000483757.5, premrna_ENST00000487230.5, premrna_ENST00000493666.2, premrna_ENST00000495184.5, and premrna_ENST00000524396.5. In some embodiments, the ASO targets a DOCK8 pre-mRNA sequence comprising a NSAE exon. In some embodiments, the ASO targets a DOCK8 pre-mRNA sequence comprising an intron flanking the 3′ splice site of the NSAE exon. In some embodiments, the ASO targets a DOCK8 pre-mRNA sequence comprising an intron flanking the 5′ splice site of the NSAE exon. In some embodiments, the transcript is selected from the group consisting of transcript_ENST00000382329.1, transcript_ENST00000382331.5, transcript_ENST00000382341.5, transcript_ENST00000432829.6, transcript_ENST00000453981.5, transcript_ENST00000454469.6, transcript_ENST00000462618.1, transcript_ENST00000469197.5, transcript_ENST00000469391.5, transcript_ENST00000474772.1, transcript_ENST00000478380.5, transcript_ENST00000479404.5, transcript_ENST00000483757.5, transcript_ENST00000487230.5, transcript_ENST00000493666.2, transcript_ENST00000495184.5, and transcript_ENST00000524396.5.

[0259] In some embodiments, the DOCK8 pre-mRNA transcript is encoded by a genetic sequence with at least about 80%, 85%, 90%, 95%, 96%, 97%, 98%, 99% or 100% sequence identity to the Ensembl reference number ENSG00000107099.15 or a complement thereof. In some embodiments, the DOCK8 pre-mRNA transcript comprises a sequence with at least about 80%, 85%, 90%, 95%, 96%, 97%, 98%, 99% or 100% sequence identity to a DOCK8 pre-mRNA transcript or a complement thereof described herein.

[0260] In some embodiments, the targeted portion of the DOCK8 pre-mRNA comprises a sequence with at least 80%, 85%, 90%, 95%, 97%, or 100% sequence identity to a region comprising at least 8 contiguous nucleic acids of a sequence of premrna_ENST00000382329.1, premrna_ENST00000382331.5, premrna_ENST00000382341.5, premrna_ENST00000432829.6, premrna_ENST00000453981.5, premrna_ENST00000454469.6, premrna_ENST00000462618.1, premrna_ENST00000469197.5, premrna_ENST00000469391.5, premrna_ENST00000474772.1, premrna_ENST00000478380.5, premrna_ENST00000479404.5, premrna_ENST00000483757.5, premrna_ENST00000487230.5, premrna_ENST00000493666.2, premrna_ENST00000495184.5, premrna_ENST00000524396.5 or a sequence of Table 3 or complements thereof. In some embodiments, the targeted portion of the DOCK8 pre-mRNA comprises a sequence with at least 80%, 85%, 90%, 95%, 97%, or 100% sequence identity to a region comprising at least 8 contiguous nucleic acids of a sequence selected from the group consisting of SEQ ID NO: 453-SEQ ID NO: 456 or complements thereof. In some embodiments, the targeted portion of the DOCK8 pre-mRNA comprises a sequence that is complementary to at least 8, 9, 10, 11, 12, 13, 14, 15, 16, 17, 18, 19 or 20 contiguous nucleic acids of a sequence of Table 6A or Table 6B or a complement thereof.

[0261] In some embodiments, the ASOs disclosed herein target a NSAE pre-mRNA transcribed from a DOK5 genomic sequence. In some embodiments, the ASO targets a NSAE pre-mRNA transcript from a DOK5 genomic sequence comprising a NSAE exon. In some embodiments, the ASO targets a NSAE pre-mRNA transcript from a DOK5 genomic sequence comprising an intron flanking the 3′ splice site of the NSAE exon and an intron flanking the 5′ splice site of a NSAE exon. In some embodiments, the ASO targets a NSAE pre-mRNA transcript comprising a sequence selected from the group consisting of premrna_ENST00000262593.10, premrna_ENST00000395939.5, premrna_ENST00000484860.1, and premrna_ENST00000491469.1. In some embodiments, the ASO targets a DOK5 pre-mRNA sequence comprising a NSAE exon. In some embodiments, the ASO targets a DOK5 pre-mRNA sequence comprising an intron flanking the 3′ splice site of the NSAE exon. In some embodiments, the ASO targets a DOK5 pre-mRNA sequence comprising an intron flanking the 5′ splice site of the NSAE exon. In some embodiments, the transcript is selected from the group consisting of transcript_ENST00000262593.10, transcript_ENST00000395939.5, transcript_ENST00000484860.1, and transcript_ENST00000491469.1.

[0262] In some embodiments, the DOK5 pre-mRNA transcript is encoded by a genetic sequence with at least about 80%, 85%, 90%, 95%, 96%, 97%, 98%, 99% or 100% sequence identity to the Ensembl reference number ENSG00000101134.12 or a complement thereof. In some embodiments, the DOK5 pre-mRNA transcript comprises a sequence with at least about 80%, 85%, 90%, 95%, 96%, 97%, 98%, 99% or 100% sequence identity to a DOK5 pre-mRNA transcript or a complement thereof described herein.

[0263] In some embodiments, the targeted portion of the DOK5 pre-mRNA comprises a sequence with at least 80%, 85%, 90%, 95%, 97%, or 100% sequence identity to a region comprising at least 8 contiguous nucleic acids of a sequence of premrna_ENST00000262593.10, premrna_ENST00000395939.5, premrna_ENST00000484860.1, premrna_ENST00000491469.1 or a sequence of Table 3 or complements thereof. In some embodiments, the targeted portion of the DOK5 pre-mRNA comprises a sequence with at least 80%, 85%, 90%, 95%, 97%, or 100% sequence identity to a region comprising at least 8 contiguous nucleic acids of a sequence selected from the group consisting of SEQ ID NO: 457-SEQ ID NO: 460 or complements thereof. In some embodiments, the targeted portion of the DOK5 pre-mRNA comprises a sequence that is complementary to at least 8, 9, 10, 11, 12, 13, 14, 15, 16, 17, 18, 19 or 20 contiguous nucleic acids of a sequence of Table 6A or Table 6B or a complement thereof.

[0264] In some embodiments, the ASOs disclosed herein target a NSAE pre-mRNA transcribed from a EIF2B5 genomic sequence. In some embodiments, the ASO targets a NSAE pre-mRNA transcript from a EIF2B5 genomic sequence comprising a NSAE exon. In some embodiments, the ASO targets a NSAE pre-mRNA transcript from a EIF2B5 genomic sequence comprising an intron flanking the 3′ splice site of the NSAE exon and an intron flanking the 5′ splice site of a NSAE exon. In some embodiments, the ASO targets a NSAE pre-mRNA transcript comprising a sequence selected from the group consisting of premrna_ENST00000432569.2, premrna_ENST00000432982.5, premrna_ENST00000465218.3, premrna_ENST00000468748.7, premrna_ENST00000471832.2, premrna_ENST00000479250.1, premrna_ENST00000481054.5, premrna_ENST00000484154.2, premrna_ENST00000491008.6, premrna_ENST00000491144.5, premrna_ENST00000492226.2, premrna_ENST00000492773.6, premrna_ENST00000493740.1, premrna_ENST00000498831.1, premrna_ENST00000647636.1, premrna_ENST00000647909.1, premrna_ENST00000648145.1, premrna_ENST00000648189.1, premrna_ENST00000648256.1, premrna_ENST00000648314.1, premrna_ENST00000648599.1, premrna_ENST00000648630.1, premrna_ENST00000648682.1, premrna_ENST00000648882.1, premrna_ENST00000648890.1, premrna_ENST00000648915.2, premrna_ENST00000649545.1, premrna_ENST00000649688.1, premrna_ENST00000649814.1, premrna_ENST00000650244.1, and premrna_ENST00000650270.1. In some embodiments, the ASO targets a EIF2B5 pre-mRNA sequence comprising a NSAE exon. In some embodiments, the ASO targets a EIF2B5 pre-mRNA sequence comprising an intron flanking the 3′ splice site of the NSAE exon. In some embodiments, the ASO targets a EIF2B5 pre-mRNA sequence comprising an intron flanking the 5′ splice site of the NSAE exon. In some embodiments, the transcript is selected from the group consisting of transcript_ENST00000432569.2, transcript_ENST00000432982.5, transcript_ENST00000465218.3, transcript_ENST00000468748.7, transcript_ENST00000471832.2, transcript_ENST00000479250.1, transcript_ENST00000481054.5, transcript_ENST00000484154.2, transcript_ENST00000491008.6, transcript_ENST00000491144.5, transcript_ENST00000492226.2, transcript_ENST00000492773.6, transcript_ENST00000493740.1, transcript_ENST00000498831.1, transcript_ENST00000647636.1, transcript_ENST00000647909.1, transcript_ENST00000648145.1, transcript_ENST00000648189.1, transcript_ENST00000648256.1, transcript_ENST00000648314.1, transcript_ENST00000648599.1, transcript_ENST00000648630.1, transcript_ENST00000648682.1, transcript_ENST00000648882.1, transcript_ENST00000648890.1, transcript_ENST00000648915.2, transcript_ENST00000649545.1, transcript_ENST00000649688.1, transcript_ENST00000649814.1, transcript_ENST00000650244.1, and transcript_ENST00000650270.1.

[0265] In some embodiments, the EIF2B5 pre-mRNA transcript is encoded by a genetic sequence with at least about 80%, 85%, 90%, 95%, 96%, 97%, 98%, 99% or 100% sequence identity to the Ensembl reference number ENSG00000145191.15 or a complement thereof. In some embodiments, the EIF2B5 pre-mRNA transcript comprises a sequence with at least about 80%, 85%, 90%, 95%, 96%, 97%, 98%, 99% or 100% sequence identity to a EIF2B5 pre-mRNA transcript or a complement thereof described herein.

[0266] In some embodiments, the targeted portion of the EIF2B5 pre-mRNA comprises a sequence with at least 80%, 85%, 90%, 95%, 97%, or 100% sequence identity to a region comprising at least 8 contiguous nucleic acids of a sequence of premrna_ENST00000432569.2, premrna_ENST00000432982.5, premrna_ENST00000465218.3, premrna_ENST00000468748.7, premrna_ENST00000471832.2, premrna_ENST00000479250.1, premrna_ENST00000481054.5, premrna_ENST00000484154.2, premrna_ENST00000491008.6, premrna_ENST00000491144.5, premrna_ENST00000492226.2, premrna_ENST00000492773.6, premrna_ENST00000493740.1, premrna_ENST00000498831.1, premrna_ENST00000647636.1, premrna_ENST00000647909.1, premrna_ENST00000648145.1, premrna_ENST00000648189.1, premrna_ENST00000648256.1, premrna_ENST00000648314.1, premrna_ENST00000648599.1, premrna_ENST00000648630.1, premrna_ENST00000648682.1, premrna_ENST00000648882.1, premrna_ENST00000648890.1, premrna_ENST00000648915.2, premrna_ENST00000649545.1, premrna_ENST00000649688.1, premrna_ENST00000649814.1, premrna_ENST00000650244.1, premrna_ENST00000650270.1 or a sequence of Table 3 or complements thereof. In some embodiments, the targeted portion of the EIF2B5 pre-mRNA comprises a sequence with at least 80%, 85%, 90%, 95%, 97%, or 100% sequence identity to a region comprising at least 8 contiguous nucleic acids of a sequence selected from the group consisting of SEQ ID NO: 461-SEQ ID NO: 464 or complements thereof. In some embodiments, the targeted portion of the EIF2B5 pre-mRNA comprises a sequence that is complementary to at least 8, 9, 10, 11, 12, 13, 14, 15, 16, 17, 18, 19 or 20 contiguous nucleic acids of a sequence of Table 6A or Table 6B or a complement thereof.

[0267] In some embodiments, the ASOs disclosed herein target a NSAE pre-mRNA transcribed from a ELAC2 genomic sequence. In some embodiments, the ASO targets a NSAE pre-mRNA transcript from a ELAC2 genomic sequence comprising a NSAE exon. In some embodiments, the ASO targets a NSAE pre-mRNA transcript from a ELAC2 genomic sequence comprising an intron flanking the 3′ splice site of the NSAE exon and an intron flanking the 5′ splice site of a NSAE exon. In some embodiments, the ASO targets a NSAE pre-mRNA transcript comprising a sequence selected from the group consisting of premrna_ENST00000338034.9, premrna_ENST00000395962.6, premrna_ENST00000426905.7, premrna_ENST00000446899.5, premrna_ENST00000465825.5, premrna_ENST00000476042.1, premrna_ENST00000480891.5, premrna_ENST00000484122.5, premrna_ENST00000487229.6, premrna_ENST00000491478.5, premrna_ENST00000492559.5, premrna_ENST00000578071.1, premrna_ENST00000578104.1, premrna_ENST00000578991.5, premrna_ENST00000580504.5, premrna_ENST00000581499.6, premrna_ENST00000583371.5, premrna_ENST00000584650.5, premrna_ENST00000609101.5, premrna_ENST00000609345.1, and premrna_ENST00000609757.5. In some embodiments, the ASO targets a ELAC2 pre-mRNA sequence comprising a NSAE exon. In some embodiments, the ASO targets a ELAC2 pre-mRNA sequence comprising an intron flanking the 3′ splice site of the NSAE exon. In some embodiments, the ASO targets a ELAC2 pre-mRNA sequence comprising an intron flanking the 5′ splice site of the NSAE exon. In some embodiments, the transcript is selected from the group consisting of transcript_ENST00000338034.9, transcript_ENST00000395962.6, transcript_ENST00000426905.7, transcript_ENST00000446899.5, transcript_ENST00000465825.5, transcript_ENST00000476042.1, transcript_ENST00000480891.5, transcript_ENST00000484122.5, transcript_ENST00000487229.6, transcript_ENST00000491478.5, transcript_ENST00000492559.5, transcript_ENST00000578071.1, transcript_ENST00000578104.1, transcript_ENST00000578991.5, transcript_ENST00000580504.5, transcript_ENST00000581499.6, transcript_ENST00000583371.5, transcript_ENST00000584650.5, transcript_ENST00000609101.5, transcript_ENST00000609345.1, and transcript_ENST00000609757.5.

[0268] In some embodiments, the ELAC2 pre-mRNA transcript is encoded by a genetic sequence with at least about 80%, 85%, 90%, 95%, 96%, 97%, 98%, 99% or 100% sequence identity to the Ensembl reference number ENSG00000006744.19 or a complement thereof. In some embodiments, the ELAC2 pre-mRNA transcript comprises a sequence with at least about 80%, 85%, 90%, 95%, 96%, 97%, 98%, 99% or 100% sequence identity to a ELAC2 pre-mRNA transcript or a complement thereof described herein.

[0269] In some embodiments, the targeted portion of the ELAC2 pre-mRNA comprises a sequence with at least 80%, 85%, 90%, 95%, 97%, or 100% sequence identity to a region comprising at least 8 contiguous nucleic acids of a sequence of premrna_ENST00000338034.9, premrna_ENST00000395962.6, premrna_ENST00000426905.7, premrna_ENST00000446899.5, premrna_ENST00000465825.5, premrna_ENST00000476042.1, premrna_ENST00000480891.5, premrna_ENST00000484122.5, premrna_ENST00000487229.6, premrna_ENST00000491478.5, premrna_ENST00000492559.5, premrna_ENST00000578071.1, premrna_ENST00000578104.1, premrna_ENST00000578991.5, premrna_ENST00000580504.5, premrna_ENST00000581499.6, premrna_ENST00000583371.5, premrna_ENST00000584650.5, premrna_ENST00000609101.5, premrna_ENST00000609345.1, premrna_ENST00000609757.5 or a sequence of Table 3 or complements thereof. In some embodiments, the targeted portion of the ELAC2 pre-mRNA comprises a sequence with at least 80%, 85%, 90%, 95%, 97%, or 100% sequence identity to a region comprising at least 8 contiguous nucleic acids of a sequence selected from the group consisting of SEQ ID NO: 465-SEQ ID NO: 472 or complements thereof. In some embodiments, the targeted portion of the ELAC2 pre-mRNA comprises a sequence that is complementary to at least 8, 9, 10, 11, 12, 13, 14, 15, 16, 17, 18, 19 or 20 contiguous nucleic acids of a sequence of Table 6A or Table 6B or a complement thereof.

[0270] In some embodiments, the ASOs disclosed herein target a NSAE pre-mRNA transcribed from a ELP1 genomic sequence. In some embodiments, the ASO targets a NSAE pre-mRNA transcript from a ELP1 genomic sequence comprising a NSAE exon. In some embodiments, the ASO targets a NSAE pre-mRNA transcript from a ELP1 genomic sequence comprising an intron flanking the 3′ splice site of the NSAE exon and an intron flanking the 5′ splice site of a NSAE exon. In some embodiments, the ASO targets a NSAE pre-mRNA transcript comprising a sequence selected from the group consisting of premrna_ENST00000374647.10, premrna_ENST00000467959.1, premrna_ENST00000495759.5, and premrna_ENST00000537196.1. In some embodiments, the ASO targets a ELP1 pre-mRNA sequence comprising a NSAE exon. In some embodiments, the ASO targets a ELP1 pre-mRNA sequence comprising an intron flanking the 3′ splice site of the NSAE exon. In some embodiments, the ASO targets a ELP1 pre-mRNA sequence comprising an intron flanking the 5′ splice site of the NSAE exon. In some embodiments, the transcript is selected from the group consisting of transcript_ENST00000374647.10, transcript_ENST00000467959.1, transcript_ENST00000495759.5, and transcript_ENST00000537196.1.

[0271] In some embodiments, the ELP1 pre-mRNA transcript is encoded by a genetic sequence with at least about 80%, 85%, 90%, 95%, 96%, 97%, 98%, 99% or 100% sequence identity to the Ensembl reference number ENSG00000070061.15 or a complement thereof. In some embodiments, the ELP1 pre-mRNA transcript comprises a sequence with at least about 80%, 85%, 90%, 95%, 96%, 97%, 98%, 99% or 100% sequence identity to a ELP1 pre-mRNA transcript or a complement thereof described herein.

[0272] In some embodiments, the targeted portion of the ELP1 pre-mRNA comprises a sequence with at least 80%, 85%, 90%, 95%, 97%, or 100% sequence identity to a region comprising at least 8 contiguous nucleic acids of a sequence of premrna_ENST00000374647.10, premrna_ENST00000467959.1, premrna_ENST00000495759.5, premrna_ENST00000537196.1 or a sequence of Table 3 or complements thereof. In some embodiments, the targeted portion of the ELP1 pre-mRNA comprises a sequence with at least 80%, 85%, 90%, 95%, 97%, or 100% sequence identity to a region comprising at least 8 contiguous nucleic acids of a sequence selected from the group consisting of SEQ ID NO: 473-SEQ ID NO: 476 or complements thereof. In some embodiments, the targeted portion of the ELP1 pre-mRNA comprises a sequence that is complementary to at least 8, 9, 10, 11, 12, 13, 14, 15, 16, 17, 18, 19 or 20 contiguous nucleic acids of a sequence of Table 6A or Table 6B or a complement thereof.

[0273] In some embodiments, the ASOs disclosed herein target a NSAE pre-mRNA transcribed from a ENTPD4 genomic sequence. In some embodiments, the ASO targets a NSAE pre-mRNA transcript from a ENTPD4 genomic sequence comprising a NSAE exon. In some embodiments, the ASO targets a NSAE pre-mRNA transcript from a ENTPD4 genomic sequence comprising an intron flanking the 3′ splice site of the NSAE exon and an intron flanking the 5′ splice site of a NSAE exon. In some embodiments, the ASO targets a NSAE pre-mRNA transcript comprising a sequence selected from the group consisting of premrna_ENST00000356206.10, premrna_ENST00000358689.9, premrna_ENST00000417069.6, premrna_ENST00000518471.5, premrna_ENST00000518718.1, premrna_ENST00000519839.1, premrna_ENST00000520936.1, premrna_ENST00000521321.5, premrna_ENST00000522255.1, premrna_ENST00000522913.1, and premrna_ENST00000523958.5. In some embodiments, the ASO targets a ENTPD4 pre-mRNA sequence comprising a NSAE exon. In some embodiments, the ASO targets a ENTPD4 pre-mRNA sequence comprising an intron flanking the 3′ splice site of the NSAE exon. In some embodiments, the ASO targets a ENTPD4 pre-mRNA sequence comprising an intron flanking the 5′ splice site of the NSAE exon. In some embodiments, the transcript is selected from the group consisting of transcript_ENST00000356206.10, transcript_ENST00000358689.9, transcript_ENST00000417069.6, transcript_ENST00000518471.5, transcript_ENST00000518718.1, transcript_ENST00000519839.1, transcript_ENST00000520936.1, transcript_ENST00000521321.5, transcript_ENST00000522255.1, transcript_ENST00000522913.1, and transcript_ENST00000523958.5.

[0274] In some embodiments, the ENTPD4 pre-mRNA transcript is encoded by a genetic sequence with at least about 80%, 85%, 90%, 95%, 96%, 97%, 98%, 99% or 100% sequence identity to the Ensembl reference number ENSG00000197217.13 or a complement thereof. In some embodiments, the ENTPD4 pre-mRNA transcript comprises a sequence with at least about 80%, 85%, 90%, 95%, 96%, 97%, 98%, 99% or 100% sequence identity to a ENTPD4 pre-mRNA transcript or a complement thereof described herein.

[0275] In some embodiments, the targeted portion of the ENTPD4 pre-mRNA comprises a sequence with at least 80%, 85%, 90%, 95%, 97%, or 100% sequence identity to a region comprising at least 8 contiguous nucleic acids of a sequence of premrna_ENST00000356206.10, premrna_ENST00000358689.9, premrna_ENST00000417069.6, premrna_ENST00000518471.5, premrna_ENST00000518718.1, premrna_ENST00000519839.1, premrna_ENST00000520936.1, premrna_ENST00000521321.5, premrna_ENST00000522255.1, premrna_ENST00000522913.1, premrna_ENST00000523958.5 or a sequence of Table 3 or complements thereof. In some embodiments, the targeted portion of the ENTPD4 pre-mRNA comprises a sequence with at least 80%, 85%, 90%, 95%, 97%, or 100% sequence identity to a region comprising at least 8 contiguous nucleic acids of a sequence selected from the group consisting of SEQ ID NO: 477-SEQ ID NO: 480 or complements thereof. In some embodiments, the targeted portion of the ENTPD4 pre-mRNA comprises a sequence that is complementary to at least 8, 9, 10, 11, 12, 13, 14, 15, 16, 17, 18, 19 or 20 contiguous nucleic acids of a sequence of Table 6A or Table 6B or a complement thereof.

[0276] In some embodiments, the ASOs disclosed herein target a NSAE pre-mRNA transcribed from a ESRRA genomic sequence. In some embodiments, the ASO targets a NSAE pre-mRNA transcript from a ESRRA genomic sequence comprising a NSAE exon. In some embodiments, the ASO targets a NSAE pre-mRNA transcript from a ESRRA genomic sequence comprising an intron flanking the 3′ splice site of the NSAE exon and an intron flanking the 5′ splice site of a NSAE exon. In some embodiments, the ASO targets a NSAE pre-mRNA transcript comprising a sequence selected from the group consisting of premrna_ENST00000000442.11, premrna_ENST00000405666.5, premrna_ENST00000406310.6, premrna_ENST00000467987.1, premrna_ENST00000468670.1, premrna_ENST00000539594.5, premrna_ENST00000545035.1, and premrna_ENST00000673656.1. In some embodiments, the ASO targets a ESRRA pre-mRNA sequence comprising a NSAE exon. In some embodiments, the ASO targets a ESRRA pre-mRNA sequence comprising an intron flanking the 3′ splice site of the NSAE exon. In some embodiments, the ASO targets a ESRRA pre-mRNA sequence comprising an intron flanking the 5′ splice site of the NSAE exon. In some embodiments, the transcript is selected from the group consisting of transcript_ENST00000000442.11, transcript_ENST00000405666.5, transcript_ENST00000406310.6, transcript_ENST00000467987.1, transcript_ENST00000468670.1, transcript_ENST00000539594.5, transcript_ENST00000545035.1, and transcript_ENST00000673656.1.

[0277] In some embodiments, the ESRRA pre-mRNA transcript is encoded by a genetic sequence with at least about 80%, 85%, 90%, 95%, 96%, 97%, 98%, 99% or 100% sequence identity to the Ensembl reference number ENSG00000173153.16 or a complement thereof. In some embodiments, the ESRRA pre-mRNA transcript comprises a sequence with at least about 80%, 85%, 90%, 95%, 96%, 97%, 98%, 99% or 100% sequence identity to a ESRRA pre-mRNA transcript or a complement thereof described herein.

[0278] In some embodiments, the targeted portion of the ESRRA pre-mRNA comprises a sequence with at least 80%, 85%, 90%, 95%, 97%, or 100% sequence identity to a region comprising at least 8 contiguous nucleic acids of a sequence of premrna_ENST00000000442.11, premrna_ENST00000405666.5, premrna_ENST00000406310.6, premrna_ENST00000467987.1, premrna_ENST00000468670.1, premrna_ENST00000539594.5, premrna_ENST00000545035.1, premrna_ENST00000673656.1 or a sequence of Table 3 or complements thereof. In some embodiments, the targeted portion of the ESRRA pre-mRNA comprises a sequence with at least 80%, 85%, 90%, 95%, 97%, or 100% sequence identity to a region comprising at least 8 contiguous nucleic acids of a sequence selected from the group consisting of SEQ ID NO: 481-SEQ ID NO: 484 or complements thereof. In some embodiments, the targeted portion of the ESRRA pre-mRNA comprises a sequence that is complementary to at least 8, 9, 10, 11, 12, 13, 14, 15, 16, 17, 18, 19 or 20 contiguous nucleic acids of a sequence of Table 6A or Table 6B or a complement thereof.

[0279] In some embodiments, the ASOs disclosed herein target a NSAE pre-mRNA transcribed from a ESS2 genomic sequence. In some embodiments, the ASO targets a NSAE pre-mRNA transcript from a ESS2 genomic sequence comprising a NSAE exon. In some embodiments, the ASO targets a NSAE pre-mRNA transcript from a ESS2 genomic sequence comprising an intron flanking the 3′ splice site of the NSAE exon and an intron flanking the 5′ splice site of a NSAE exon. In some embodiments, the ASO targets a NSAE pre-mRNA transcript comprising a sequence selected from the group consisting of premrna_ENST00000252137.11, premrna_ENST00000434568.5, premrna_ENST00000469466.1, and premrna_ENST00000472073.1. In some embodiments, the ASO targets a ESS2 pre-mRNA sequence comprising a NSAE exon. In some embodiments, the ASO targets a ESS2 pre-mRNA sequence comprising an intron flanking the 3′ splice site of the NSAE exon. In some embodiments, the ASO targets a ESS2 pre-mRNA sequence comprising an intron flanking the 5′ splice site of the NSAE exon. In some embodiments, the transcript is selected from the group consisting of transcript_ENST00000252137.11, transcript_ENST00000434568.5, transcript_ENST00000469466.1, and transcript_ENST00000472073.1.

[0280] In some embodiments, the ESS2 pre-mRNA transcript is encoded by a genetic sequence with at least about 80%, 85%, 90%, 95%, 96%, 97%, 98%, 99% or 100% sequence identity to the Ensembl reference number ENSG00000100056.12 or a complement thereof. In some embodiments, the ESS2 pre-mRNA transcript comprises a sequence with at least about 80%, 85%, 90%, 95%, 96%, 97%, 98%, 99% or 100% sequence identity to a ESS2 pre-mRNA transcript or a complement thereof described herein.

[0281] In some embodiments, the targeted portion of the ESS2 pre-mRNA comprises a sequence with at least 80%, 85%, 90%, 95%, 97%, or 100% sequence identity to a region comprising at least 8 contiguous nucleic acids of a sequence of premrna_ENST00000252137.11, premrna_ENST00000434568.5, premrna_ENST00000469466.1, premrna_ENST00000472073.1 or a sequence of Table 3 or complements thereof. In some embodiments, the targeted portion of the ESS2 pre-mRNA comprises a sequence with at least 80%, 85%, 90%, 95%, 97%, or 100% sequence identity to a region comprising at least 8 contiguous nucleic acids of a sequence selected from the group consisting of SEQ ID NO: 485-SEQ ID NO: 488 or complements thereof. In some embodiments, the targeted portion of the ESS2 pre-mRNA comprises a sequence that is complementary to at least 8, 9, 10, 11, 12, 13, 14, 15, 16, 17, 18, 19 or 20 contiguous nucleic acids of a sequence of Table 6A or Table 6B or a complement thereof.

[0282] In some embodiments, the ASOs disclosed herein target a NSAE pre-mRNA transcribed from a ETAA1 genomic sequence. In some embodiments, the ASO targets a NSAE pre-mRNA transcript from a ETAA1 genomic sequence comprising a NSAE exon. In some embodiments, the ASO targets a NSAE pre-mRNA transcript from a ETAA1 genomic sequence comprising an intron flanking the 3′ splice site of the NSAE exon and an intron flanking the 5′ splice site of a NSAE exon. In some embodiments, the ASO targets a NSAE pre-mRNA transcript comprising a sequence selected from the group consisting of premrna_ENST00000272342.6, premrna_ENST00000462772.2, premrna_ENST00000644028.1, and premrna_ENST00000645739.1. In some embodiments, the ASO targets a ETAA1 pre-mRNA sequence comprising a NSAE exon. In some embodiments, the ASO targets a ETAA1 pre-mRNA sequence comprising an intron flanking the 3′ splice site of the NSAE exon. In some embodiments, the ASO targets a ETAA1 pre-mRNA sequence comprising an intron flanking the 5′ splice site of the NSAE exon. In some embodiments, the transcript is selected from the group consisting of transcript_ENST00000272342.6, transcript_ENST00000462772.2, transcript_ENST00000644028.1, and transcript_ENST00000645739.1.

[0283] In some embodiments, the ETAA1 pre-mRNA transcript is encoded by a genetic sequence with at least about 80%, 85%, 90%, 95%, 96%, 97%, 98%, 99% or 100% sequence identity to the Ensembl reference number ENSG00000143971.9 or a complement thereof. In some embodiments, the ETAA1 pre-mRNA transcript comprises a sequence with at least about 80%, 85%, 90%, 95%, 96%, 97%, 98%, 99% or 100% sequence identity to a ETAA1 pre-mRNA transcript or a complement thereof described herein.

[0284] In some embodiments, the targeted portion of the ETAA1 pre-mRNA comprises a sequence with at least 80%, 85%, 90%, 95%, 97%, or 100% sequence identity to a region comprising at least 8 contiguous nucleic acids of a sequence of premrna_ENST00000272342.6, premrna_ENST00000462772.2, premrna_ENST00000644028.1, premrna_ENST00000645739.1 or a sequence of Table 3 or complements thereof. In some embodiments, the targeted portion of the ETAA1 pre-mRNA comprises a sequence with at least 80%, 85%, 90%, 95%, 97%, or 100% sequence identity to a region comprising at least 8 contiguous nucleic acids of a sequence selected from the group consisting of SEQ ID NO: 489-SEQ ID NO: 492 or complements thereof. In some embodiments, the targeted portion of the ETAA1 pre-mRNA comprises a sequence that is complementary to at least 8, 9, 10, 11, 12, 13, 14, 15, 16, 17, 18, 19 or 20 contiguous nucleic acids of a sequence of Table 6A or Table 6B or a complement thereof.

[0285] In some embodiments, the ASOs disclosed herein target a NSAE pre-mRNA transcribed from a ETHE1 genomic sequence. In some embodiments, the ASO targets a NSAE pre-mRNA transcript from a ETHE1 genomic sequence comprising a NSAE exon. In some embodiments, the ASO targets a NSAE pre-mRNA transcript from a ETHE1 genomic sequence comprising an intron flanking the 3′ splice site of the NSAE exon and an intron flanking the 5′ splice site of a NSAE exon. In some embodiments, the ASO targets a NSAE pre-mRNA transcript comprising a sequence selected from the group consisting of premrna_ENST00000292147.7, premrna_ENST00000594342.5, premrna_ENST00000595115.1, premrna_ENST00000598330.1, premrna_ENST00000600651.5, and premrna_ENST00000602138.1. In some embodiments, the ASO targets a ETHE1 pre-mRNA sequence comprising a NSAE exon. In some embodiments, the ASO targets a ETHE1 pre-mRNA sequence comprising an intron flanking the 3′ splice site of the NSAE exon. In some embodiments, the ASO targets a ETHE1 pre-mRNA sequence comprising an intron flanking the 5′ splice site of the NSAE exon. In some embodiments, the transcript is selected from the group consisting of transcript_ENST00000292147.7, transcript_ENST00000594342.5, transcript_ENST00000595115.1, transcript_ENST00000598330.1, transcript_ENST00000600651.5, and transcript_ENST00000602138.1.

[0286] In some embodiments, the ETHE1 pre-mRNA transcript is encoded by a genetic sequence with at least about 80%, 85%, 90%, 95%, 96%, 97%, 98%, 99% or 100% sequence identity to the Ensembl reference number ENSG00000105755.8 or a complement thereof. In some embodiments, the ETHE1 pre-mRNA transcript comprises a sequence with at least about 80%, 85%, 90%, 95%, 96%, 97%, 98%, 99% or 100% sequence identity to a ETHE1 pre-mRNA transcript or a complement thereof described herein.

[0287] In some embodiments, the targeted portion of the ETHE1 pre-mRNA comprises a sequence with at least 80%, 85%, 90%, 95%, 97%, or 100% sequence identity to a region comprising at least 8 contiguous nucleic acids of a sequence of premrna_ENST00000292147.7, premrna_ENST00000594342.5, premrna_ENST00000595115.1, premrna_ENST00000598330.1, premrna_ENST00000600651.5, premrna_ENST00000602138.1 or a sequence of Table 3 or complements thereof. In some embodiments, the targeted portion of the ETHE1 pre-mRNA comprises a sequence with at least 80%, 85%, 90%, 95%, 97%, or 100% sequence identity to a region comprising at least 8 contiguous nucleic acids of a sequence selected from the group consisting of SEQ ID NO: 493-SEQ ID NO: 496 or complements thereof. In some embodiments, the targeted portion of the ETHE1 pre-mRNA comprises a sequence that is complementary to at least 8, 9, 10, 11, 12, 13, 14, 15, 16, 17, 18, 19 or 20 contiguous nucleic acids of a sequence of Table 6A or Table 6B or a complement thereof.

[0288] In some embodiments, the ASOs disclosed herein target a NSAE pre-mRNA transcribed from a FANCA genomic sequence. In some embodiments, the ASO targets a NSAE pre-mRNA transcript from a FANCA genomic sequence comprising a NSAE exon. In some embodiments, the ASO targets a NSAE pre-mRNA transcript from a FANCA genomic sequence comprising an intron flanking the 3′ splice site of the NSAE exon and an intron flanking the 5′ splice site of a NSAE exon. In some embodiments, the ASO targets a NSAE pre-mRNA transcript comprising a sequence selected from the group consisting of premrna_ENST00000305699.15, premrna_ENST00000389301.8, premrna_ENST00000389302.7, premrna_ENST00000534992.5, premrna_ENST00000543736.5, premrna_ENST00000561660.1, premrna_ENST00000561667.1, premrna_ENST00000561722.5, premrna_ENST00000562424.1, premrna_ENST00000563318.1, premrna_ENST00000563510.5, premrna_ENST00000563513.1, premrna_ENST00000563673.5, premrna_ENST00000563767.1, premrna_ENST00000564475.5, premrna_ENST00000564870.1, premrna_ENST00000564969.5, premrna_ENST00000565582.5, premrna_ENST00000566133.1, premrna_ENST00000566409.1, premrna_ENST00000566889.5, premrna_ENST00000567205.1, premrna_ENST00000567284.6, premrna_ENST00000567510.1, premrna_ENST00000567621.5, premrna_ENST00000567879.5, premrna_ENST00000567883.5, premrna_ENST00000567943.1, premrna_ENST00000567988.5, premrna_ENST00000568369.5, premrna_ENST00000568626.1, and premrna_ENST00000568983.5. In some embodiments, the ASO targets a FANCA pre-mRNA sequence comprising a NSAE exon. In some embodiments, the ASO targets a FANCA pre-mRNA sequence comprising an intron flanking the 3′ splice site of the NSAE exon. In some embodiments, the ASO targets a FANCA pre-mRNA sequence comprising an intron flanking the 5′ splice site of the NSAE exon. In some embodiments, the transcript is selected from the group consisting of transcript_ENST00000305699.15, transcript_ENST00000389301.8, transcript_ENST00000389302.7, transcript_ENST00000534992.5, transcript_ENST00000543736.5, transcript_ENST00000561660.1, transcript_ENST00000561667.1, transcript_ENST00000561722.5, transcript_ENST00000562424.1, transcript_ENST00000563318.1, transcript_ENST00000563510.5, transcript_ENST00000563513.1, transcript_ENST00000563673.5, transcript_ENST00000563767.1, transcript_ENST00000564475.5, transcript_ENST00000564870.1, transcript_ENST00000564969.5, transcript_ENST00000565582.5, transcript_ENST00000566133.1, transcript_ENST00000566409.1, transcript_ENST00000566889.5, transcript_ENST00000567205.1, transcript_ENST00000567284.6, transcript_ENST00000567510.1, transcript_ENST00000567621.5, transcript_ENST00000567879.5, transcript_ENST00000567883.5, transcript_ENST00000567943.1, transcript_ENST00000567988.5, transcript_ENST00000568369.5, transcript_ENST00000568626.1, and transcript_ENST00000568983.5.

[0289] In some embodiments, the FANCA pre-mRNA transcript is encoded by a genetic sequence with at least about 80%, 85%, 90%, 95%, 96%, 97%, 98%, 99% or 100% sequence identity to the Ensembl reference number ENSG00000187741.15 or a complement thereof. In some embodiments, the FANCA pre-mRNA transcript comprises a sequence with at least about 80%, 85%, 90%, 95%, 96%, 97%, 98%, 99% or 100% sequence identity to a FANCA pre-mRNA transcript or a complement thereof described herein.

[0290] In some embodiments, the targeted portion of the FANCA pre-mRNA comprises a sequence with at least 80%, 85%, 90%, 95%, 97%, or 100% sequence identity to a region comprising at least 8 contiguous nucleic acids of a sequence of premrna_ENST00000305699.15, premrna_ENST00000389301.8, premrna_ENST00000389302.7, premrna_ENST00000534992.5, premrna_ENST00000543736.5, premrna_ENST00000561660.1, premrna_ENST00000561667.1, premrna_ENST00000561722.5, premrna_ENST00000562424.1, premrna_ENST00000563318.1, premrna_ENST00000563510.5, premrna_ENST00000563513.1, premrna_ENST00000563673.5, premrna_ENST00000563767.1, premrna_ENST00000564475.5, premrna_ENST00000564870.1, premrna_ENST00000564969.5, premrna_ENST00000565582.5, premrna_ENST00000566133.1, premrna_ENST00000566409.1, premrna_ENST00000566889.5, premrna_ENST00000567205.1, premrna_ENST00000567284.6, premrna_ENST00000567510.1, premrna_ENST00000567621.5, premrna_ENST00000567879.5, premrna_ENST00000567883.5, premrna_ENST00000567943.1, premrna_ENST00000567988.5, premrna_ENST00000568369.5, premrna_ENST00000568626.1, premrna_ENST00000568983.5 or a sequence of Table 3 or complements thereof. In some embodiments, the targeted portion of the FANCA pre-mRNA comprises a sequence with at least 80%, 85%, 90%, 95%, 97%, or 100% sequence identity to a region comprising at least 8 contiguous nucleic acids of a sequence selected from the group consisting of SEQ ID NO: 497-SEQ ID NO: 502 or complements thereof. In some embodiments, the targeted portion of the FANCA pre-mRNA comprises a sequence that is complementary to at least 8, 9, 10, 11, 12, 13, 14, 15, 16, 17, 18, 19 or 20 contiguous nucleic acids of a sequence of Table 6A or Table 6B or a complement thereof.

[0291] In some embodiments, the ASOs disclosed herein target a NSAE pre-mRNA transcribed from a FASTK genomic sequence. In some embodiments, the ASO targets a NSAE pre-mRNA transcript from a FASTK genomic sequence comprising a NSAE exon. In some embodiments, the ASO targets a NSAE pre-mRNA transcript from a FASTK genomic sequence comprising an intron flanking the 3′ splice site of the NSAE exon and an intron flanking the 5′ splice site of a NSAE exon. In some embodiments, the ASO targets a NSAE pre-mRNA transcript comprising a sequence selected from the group consisting of premrna_ENST00000297532.11, premrna_ENST00000353841.6, premrna_ENST00000459800.1, premrna_ENST00000460980.5, premrna_ENST00000461979.1, premrna_ENST00000465272.1, premrna_ENST00000466855.1, premrna_ENST00000467237.5, premrna_ENST00000469237.5, premrna_ENST00000478477.1, premrna_ENST00000478883.1, premrna_ENST00000482571.2, premrna_ENST00000482806.5, premrna_ENST00000483953.5, premrna_ENST00000489884.5, premrna_ENST00000496663.1, and premrna_ENST00000540185.5. In some embodiments, the ASO targets a FASTK pre-mRNA sequence comprising a NSAE exon. In some embodiments, the ASO targets a FASTK pre-mRNA sequence comprising an intron flanking the 3′ splice site of the NSAE exon. In some embodiments, the ASO targets a FASTK pre-mRNA sequence comprising an intron flanking the 5′ splice site of the NSAE exon. In some embodiments, the transcript is selected from the group consisting of transcript_ENST00000297532.11, transcript_ENST00000353841.6, transcript_ENST00000459800.1, transcript_ENST00000460980.5, transcript_ENST00000461979.1, transcript_ENST00000465272.1, transcript_ENST00000466855.1, transcript_ENST00000467237.5, transcript_ENST00000469237.5, transcript_ENST00000478477.1, transcript_ENST00000478883.1, transcript_ENST00000482571.2, transcript_ENST00000482806.5, transcript_ENST00000483953.5, transcript_ENST00000489884.5, transcript_ENST00000496663.1, and transcript_ENST00000540185.5.

[0292] In some embodiments, the FASTK pre-mRNA transcript is encoded by a genetic sequence with at least about 80%, 85%, 90%, 95%, 96%, 97%, 98%, 99% or 100% sequence identity to the Ensembl reference number ENSG00000164896.20 or a complement thereof. In some embodiments, the FASTK pre-mRNA transcript comprises a sequence with at least about 80%, 85%, 90%, 95%, 96%, 97%, 98%, 99% or 100% sequence identity to a FASTK pre-mRNA transcript or a complement thereof described herein.

[0293] In some embodiments, the targeted portion of the FASTK pre-mRNA comprises a sequence with at least 80%, 85%, 90%, 95%, 97%, or 100% sequence identity to a region comprising at least 8 contiguous nucleic acids of a sequence of premrna_ENST00000297532.11, premrna_ENST00000353841.6, premrna_ENST00000459800.1, premrna_ENST00000460980.5, premrna_ENST00000461979.1, premrna_ENST00000465272.1, premrna_ENST00000466855.1, premrna_ENST00000467237.5, premrna_ENST00000469237.5, premrna_ENST00000478477.1, premrna_ENST00000478883.1, premrna_ENST00000482571.2, premrna_ENST00000482806.5, premrna_ENST00000483953.5, premrna_ENST00000489884.5, premrna_ENST00000496663.1, premrna_ENST00000540185.5, or a sequence of Table 3 or complements thereof. In some embodiments, the targeted portion of the FASTK pre-mRNA comprises a sequence with at least 80%, 85%, 90%, 95%, 97%, or 100% sequence identity to a region comprising at least 8 contiguous nucleic acids of a sequence selected from the group consisting of SEQ ID NO: 503-SEQ ID NO: 517 or complements thereof. In some embodiments, the targeted portion of the FASTK pre-mRNA comprises a sequence that is complementary to at least 8, 9, 10, 11, 12, 13, 14, 15, 16, 17, 18, 19 or 20 contiguous nucleic acids of a sequence of Table 6A or Table 6B or a complement thereof.

[0294] In some embodiments, the ASOs disclosed herein target a NSAE pre-mRNA transcribed from a FASTKD3 genomic sequence. In some embodiments, the ASO targets a NSAE pre-mRNA transcript from a FASTKD3 genomic sequence comprising a NSAE exon. In some embodiments, the ASO targets a NSAE pre-mRNA transcript from a FASTKD3 genomic sequence comprising an intron flanking the 3′ splice site of the NSAE exon and an intron flanking the 5′ splice site of a NSAE exon. In some embodiments, the ASO targets a NSAE pre-mRNA transcript comprising a sequence selected from the group consisting of premrna_ENST00000264669.10, premrna_ENST00000282110.8, premrna_ENST00000504695.1, premrna_ENST00000507036.1, premrna_ENST00000507572.1, premrna_ENST00000511261.5, premrna_ENST00000513577.1, and premrna_ENST00000513658.5. In some embodiments, the ASO targets a FASTKD3 pre-mRNA sequence comprising a NSAE exon. In some embodiments, the ASO targets a FASTKD3 pre-mRNA sequence comprising an intron flanking the 3′ splice site of the NSAE exon. In some embodiments, the ASO targets a FASTKD3 pre-mRNA sequence comprising an intron flanking the 5′ splice site of the NSAE exon. In some embodiments, the transcript is selected from the group consisting of transcript_ENST00000264669.10, transcript_ENST00000282110.8, transcript_ENST00000504695.1, transcript_ENST00000507036.1, transcript_ENST00000507572.1, transcript_ENST00000511261.5, transcript_ENST00000513577.1, and transcript_ENST00000513658.5.

[0295] In some embodiments, the FASTKD3 pre-mRNA transcript is encoded by a genetic sequence with at least about 80%, 85%, 90%, 95%, 96%, 97%, 98%, 99% or 100% sequence identity to the Ensembl reference number ENSG00000124279.12 or a complement thereof. In some embodiments, the FASTKD3 pre-mRNA transcript comprises a sequence with at least about 80%, 85%, 90%, 95%, 96%, 97%, 98%, 99% or 100% sequence identity to a FASTKD3 pre-mRNA transcript or a complement thereof described herein.

[0296] In some embodiments, the targeted portion of the FASTKD3 pre-mRNA comprises a sequence with at least 80%, 85%, 90%, 95%, 97%, or 100% sequence identity to a region comprising at least 8 contiguous nucleic acids of a sequence of premrna_ENST00000264669.10, premrna_ENST00000282110.8, premrna_ENST00000504695.1, premrna_ENST00000507036.1, premrna_ENST00000507572.1, premrna_ENST00000511261.5, premrna_ENST00000513577.1, premrna_ENST00000513658.5 or a sequence of Table 3 or complements thereof. In some embodiments, the targeted portion of the FASTKD3 pre-mRNA comprises a sequence with at least 80%, 85%, 90%, 95%, 97%, or 100% sequence identity to a region comprising at least 8 contiguous nucleic acids of a sequence selected from the group consisting of SEQ ID NO: 518-SEQ ID NO: 521 or complements thereof. In some embodiments, the targeted portion of the FASTKD3 pre-mRNA comprises a sequence that is complementary to at least 8, 9, 10, 11, 12, 13, 14, 15, 16, 17, 18, 19 or 20 contiguous nucleic acids of a sequence of Table 6A or Table 6B or a complement thereof.

[0297] In some embodiments, the ASOs disclosed herein target a NSAE pre-mRNA transcribed from a FPGS genomic sequence. In some embodiments, the ASO targets a NSAE pre-mRNA transcript from a FPGS genomic sequence comprising a NSAE exon. In some embodiments, the ASO targets a NSAE pre-mRNA transcript from a FPGS genomic sequence comprising an intron flanking the 3′ splice site of the NSAE exon and an intron flanking the 5′ splice site of a NSAE exon. In some embodiments, the ASO targets a NSAE pre-mRNA transcript comprising a sequence selected from the group consisting of premrna_ENST00000373225.7, premrna_ENST00000373228.5, premrna_ENST00000373247.7, premrna_ENST00000393706.6, premrna_ENST00000423577.1, premrna_ENST00000431857.5, premrna_ENST00000460181.5, premrna_ENST00000467826.5, premrna_ENST00000469310.1, premrna_ENST00000473536.1, premrna_ENST00000475270.1, premrna_ENST00000475765.5, premrna_ENST00000479147.6, premrna_ENST00000479375.6, premrna_ENST00000481552.6, premrna_ENST00000488307.5, premrna_ENST00000488506.5, premrna_ENST00000489522.5, premrna_ENST00000496586.5, premrna_ENST00000497386.5, and premrna_ENST00000630236.2. In some embodiments, the ASO targets a FPGS pre-mRNA sequence comprising a NSAE exon. In some embodiments, the ASO targets a FPGS pre-mRNA sequence comprising an intron flanking the 3′ splice site of the NSAE exon. In some embodiments, the ASO targets a FPGS pre-mRNA sequence comprising an intron flanking the 5′ splice site of the NSAE exon. In some embodiments, the transcript is selected from the group consisting of transcript_ENST00000373225.7, transcript_ENST00000373228.5, transcript_ENST00000373247.7, transcript_ENST00000393706.6, transcript_ENST00000423577.1, transcript_ENST00000431857.5, transcript_ENST00000460181.5, transcript_ENST00000467826.5, transcript_ENST00000469310.1, transcript_ENST00000473536.1, transcript_ENST00000475270.1, transcript_ENST00000475765.5, transcript_ENST00000479147.6, transcript_ENST00000479375.6, transcript_ENST00000481552.6, transcript_ENST00000488307.5, transcript_ENST00000488506.5, transcript_ENST00000489522.5, transcript_ENST00000496586.5, transcript_ENST00000497386.5, and transcript_ENST00000630236.2.

[0298] In some embodiments, the FPGS pre-mRNA transcript is encoded by a genetic sequence with at least about 80%, 85%, 90%, 95%, 96%, 97%, 98%, 99% or 100% sequence identity to the Ensembl reference number ENSG00000136877.15 or a complement thereof. In some embodiments, the FPGS pre-mRNA transcript comprises a sequence with at least about 80%, 85%, 90%, 95%, 96%, 97%, 98%, 99% or 100% sequence identity to a FPGS pre-mRNA transcript or a complement thereof described herein.

[0299] In some embodiments, the targeted portion of the FPGS pre-mRNA comprises a sequence with at least 80%, 85%, 90%, 95%, 97%, or 100% sequence identity to a region comprising at least 8 contiguous nucleic acids of a sequence of premrna_ENST00000373225.7, premrna_ENST00000373228.5, premrna_ENST00000373247.7, premrna_ENST00000393706.6, premrna_ENST00000423577.1, premrna_ENST00000431857.5, premrna_ENST00000460181.5, premrna_ENST00000467826.5, premrna_ENST00000469310.1, premrna_ENST00000473536.1, premrna_ENST00000475270.1, premrna_ENST00000475765.5, premrna_ENST00000479147.6, premrna_ENST00000479375.6, premrna_ENST00000481552.6, premrna_ENST00000488307.5, premrna_ENST00000488506.5, premrna_ENST00000489522.5, premrna_ENST00000496586.5, premrna_ENST00000497386.5, premrna_ENST00000630236.2 or a sequence of Table 3 or complements thereof. In some embodiments, the targeted portion of the FPGS pre-mRNA comprises a sequence with at least 80%, 85%, 90%, 95%, 97%, or 100% sequence identity to a region comprising at least 8 contiguous nucleic acids of a sequence selected from the group consisting of SEQ ID NO: 522-SEQ ID NO: 525 or complements thereof. In some embodiments, the targeted portion of the FPGS pre-mRNA comprises a sequence that is complementary to at least 8, 9, 10, 11, 12, 13, 14, 15, 16, 17, 18, 19 or 20 contiguous nucleic acids of a sequence of Table 6A or Table 6B or a complement thereof.

[0300] In some embodiments, the ASOs disclosed herein target a NSAE pre-mRNA transcribed from a FREM1 genomic sequence. In some embodiments, the ASO targets a NSAE pre-mRNA transcript from a FREM1 genomic sequence comprising a NSAE exon. In some embodiments, the ASO targets a NSAE pre-mRNA transcript from a FREM1 genomic sequence comprising an intron flanking the 3′ splice site of the NSAE exon and an intron flanking the 5′ splice site of a NSAE exon. In some embodiments, the ASO targets a NSAE pre-mRNA transcript comprising a sequence selected from the group consisting of premrna_ENST00000380875.7, premrna_ENST00000380880.3, premrna_ENST00000380894.5, premrna_ENST00000422223.6, premrna_ENST00000427623.5, premrna_ENST00000466679.1, premrna_ENST00000485068.5, premrna_ENST00000486223.1, and premrna_ENST00000497634.2. In some embodiments, the ASO targets a FREM1 pre-mRNA sequence comprising a NSAE exon. In some embodiments, the ASO targets a FREM1 pre-mRNA sequence comprising an intron flanking the 3′ splice site of the NSAE exon. In some embodiments, the ASO targets a FREM1 pre-mRNA sequence comprising an intron flanking the 5′ splice site of the NSAE exon. In some embodiments, the transcript is selected from the group consisting of transcript_ENST00000380875.7, transcript_ENST00000380880.3, transcript_ENST00000380894.5, transcript_ENST00000422223.6, transcript_ENST00000427623.5, transcript_ENST00000466679.1, transcript_ENST00000485068.5, transcript_ENST00000486223.1, and transcript_ENST00000497634.2.

[0301] In some embodiments, the FREM1 pre-mRNA transcript is encoded by a genetic sequence with at least about 80%, 85%, 90%, 95%, 96%, 97%, 98%, 99% or 100% sequence identity to the Ensembl reference number ENSG00000164946.19 or a complement thereof. In some embodiments, the FREM1 pre-mRNA transcript comprises a sequence with at least about 80%, 85%, 90%, 95%, 96%, 97%, 98%, 99% or 100% sequence identity to a FREM1 pre-mRNA transcript or a complement thereof described herein.

[0302] In some embodiments, the targeted portion of the FREM1 pre-mRNA comprises a sequence with at least 80%, 85%, 90%, 95%, 97%, or 100% sequence identity to a region comprising at least 8 contiguous nucleic acids of a sequence of premrna_ENST00000380875.7, premrna_ENST00000380880.3, premrna_ENST00000380894.5, premrna_ENST00000422223.6, premrna_ENST00000427623.5, premrna_ENST00000466679.1, premrna_ENST00000485068.5, premrna_ENST00000486223.1, premrna_ENST00000497634.2, or a sequence of Table 3 or complements thereof. In some embodiments, the targeted portion of the FREM1 pre-mRNA comprises a sequence with at least 80%, 85%, 90%, 95%, 97%, or 100% sequence identity to a region comprising at least 8 contiguous nucleic acids of a sequence selected from the group consisting of SEQ ID NO: 526-SEQ ID NO: 531 or complements thereof. In some embodiments, the targeted portion of the FREM1 pre-mRNA comprises a sequence that is complementary to at least 8, 9, 10, 11, 12, 13, 14, 15, 16, 17, 18, 19 or 20 contiguous nucleic acids of a sequence of Table 6A or Table 6B or a complement thereof.

[0303] In some embodiments, the ASOs disclosed herein target a NSAE pre-mRNA transcribed from a GAS8 genomic sequence. In some embodiments, the ASO targets a NSAE pre-mRNA transcript from a GAS8 genomic sequence comprising a NSAE exon. In some embodiments, the ASO targets a NSAE pre-mRNA transcript from a GAS8 genomic sequence comprising an intron flanking the 3′ splice site of the NSAE exon and an intron flanking the 5′ splice site of a NSAE exon. In some embodiments, the ASO targets a NSAE pre-mRNA transcript comprising a sequence selected from the group consisting of premrna_ENST00000268699.9, premrna_ENST00000536122.7, premrna_ENST00000537797.5, premrna_ENST00000540721.5, premrna_ENST00000561675.1, premrna_ENST00000563980.5, premrna_ENST00000564392.5, premrna_ENST00000564789.5, premrna_ENST00000564802.1, premrna_ENST00000564853.1, premrna_ENST00000565000.1, premrna_ENST00000565062.5, premrna_ENST00000565957.5, premrna_ENST00000566266.5, premrna_ENST00000568284.1, premrna_ENST00000568664.5, premrna_ENST00000568705.5, premrna_ENST00000569399.1, premrna_ENST00000569558.5, and premrna_ENST00000620723.4. In some embodiments, the ASO targets a GAS8 pre-mRNA sequence comprising a NSAE exon. In some embodiments, the ASO targets a GAS8 pre-mRNA sequence comprising an intron flanking the 3′ splice site of the NSAE exon. In some embodiments, the ASO targets a GAS8 pre-mRNA sequence comprising an intron flanking the 5′ splice site of the NSAE exon. In some embodiments, the transcript is selected from the group consisting of transcript_ENST00000268699.9, transcript_ENST00000536122.7, transcript_ENST00000537797.5, transcript_ENST00000540721.5, transcript_ENST00000561675.1, transcript_ENST00000563980.5, transcript_ENST00000564392.5, transcript_ENST00000564789.5, transcript_ENST00000564802.1, transcript_ENST00000564853.1, transcript_ENST00000565000.1, transcript_ENST00000565062.5, transcript_ENST00000565957.5, transcript_ENST00000566266.5, transcript_ENST00000568284.1, transcript_ENST00000568664.5, transcript_ENST00000568705.5, transcript_ENST00000569399.1, transcript_ENST00000569558.5, and transcript_ENST00000620723.4.

[0304] In some embodiments, the GAS8 pre-mRNA transcript is encoded by a genetic sequence with at least about 80%, 85%, 90%, 95%, 96%, 97%, 98%, 99% or 100% sequence identity to the Ensembl reference number ENSG00000141013.17 or a complement thereof. In some embodiments, the GAS8 pre-mRNA transcript comprises a sequence with at least about 80%, 85%, 90%, 95%, 96%, 97%, 98%, 99% or 100% sequence identity to a GAS8 pre-mRNA transcript or a complement thereof described herein.

[0305] In some embodiments, the targeted portion of the GAS8 pre-mRNA comprises a sequence with at least 80%, 85%, 90%, 95%, 97%, or 100% sequence identity to a region comprising at least 8 contiguous nucleic acids of a sequence of premrna_ENST00000268699.9, premrna_ENST00000536122.7, premrna_ENST00000537797.5, premrna_ENST00000540721.5, premrna_ENST00000561675.1, premrna_ENST00000563980.5, premrna_ENST00000564392.5, premrna_ENST00000564789.5, premrna_ENST00000564802.1, premrna_ENST00000564853.1, premrna_ENST00000565000.1, premrna_ENST00000565062.5, premrna_ENST00000565957.5, premrna_ENST00000566266.5, premrna_ENST00000568284.1, premrna_ENST00000568664.5, premrna_ENST00000568705.5, premrna_ENST00000569399.1, premrna_ENST00000569558.5, premrna_ENST00000620723.4 or a sequence of Table 3 or complements thereof. In some embodiments, the targeted portion of the GAS8 pre-mRNA comprises a sequence with at least 80%, 85%, 90%, 95%, 97%, or 100% sequence identity to a region comprising at least 8 contiguous nucleic acids of a sequence selected from the group consisting of SEQ ID NO: 532-SEQ ID NO: 539 or complements thereof. In some embodiments, the targeted portion of the GAS8 pre-mRNA comprises a sequence that is complementary to at least 8, 9, 10, 11, 12, 13, 14, 15, 16, 17, 18, 19 or 20 contiguous nucleic acids of a sequence of Table 6A or Table 6B or a complement thereof.

[0306] In some embodiments, the ASOs disclosed herein target a NSAE pre-mRNA transcribed from a GCK genomic sequence. In some embodiments, the ASO targets a NSAE pre-mRNA transcript from a GCK genomic sequence comprising a NSAE exon. In some embodiments, the ASO targets a NSAE pre-mRNA transcript from a GCK genomic sequence comprising an intron flanking the 3′ splice site of the NSAE exon and an intron flanking the 5′ splice site of a NSAE exon. In some embodiments, the ASO targets a NSAE pre-mRNA transcript comprising a sequence selected from the group consisting of premrna_ENST00000336642.9, premrna_ENST00000345378.7, premrna_ENST00000395796.7, premrna_ENST00000403799.8, premrna_ENST00000437084.1, premrna_ENST00000459642.1, premrna_ENST00000473353.1, premrna_ENST00000476008.1, premrna_ENST00000616242.4, premrna_ENST00000671824.1, premrna_ENST00000672743.1, and premrna_ENST00000673284.1. In some embodiments, the ASO targets a GCK pre-mRNA sequence comprising a NSAE exon. In some embodiments, the ASO targets a GCK pre-mRNA sequence comprising an intron flanking the 3′ splice site of the NSAE exon. In some embodiments, the ASO targets a GCK pre-mRNA sequence comprising an intron flanking the 5′ splice site of the NSAE exon. In some embodiments, the transcript is selected from the group consisting of transcript_ENST00000336642.9, transcript_ENST00000345378.7, transcript_ENST00000395796.7, transcript_ENST00000403799.8, transcript_ENST00000437084.1, transcript_ENST00000459642.1, transcript_ENST00000473353.1, transcript_ENST00000476008.1, transcript_ENST00000616242.4, transcript_ENST00000671824.1, transcript_ENST00000672743.1, and transcript_ENST00000673284.1.

[0307] In some embodiments, the GCK pre-mRNA transcript is encoded by a genetic sequence with at least about 80%, 85%, 90%, 95%, 96%, 97%, 98%, 99% or 100% sequence identity to the Ensembl reference number ENSG00000106633.17 or a complement thereof. In some embodiments, the GCK pre-mRNA transcript comprises a sequence with at least about 80%, 85%, 90%, 95%, 96%, 97%, 98%, 99% or 100% sequence identity to a GCK pre-mRNA transcript or a complement thereof described herein.

[0308] In some embodiments, the targeted portion of the GCK pre-mRNA comprises a sequence with at least 80%, 85%, 90%, 95%, 97%, or 100% sequence identity to a region comprising at least 8 contiguous nucleic acids of a sequence of premrna_ENST00000336642.9, premrna_ENST00000345378.7, premrna_ENST00000395796.7, premrna_ENST00000403799.8, premrna_ENST00000437084.1, premrna_ENST00000459642.1, premrna_ENST00000473353.1, premrna_ENST00000476008.1, premrna_ENST00000616242.4, premrna_ENST00000671824.1, premrna_ENST00000672743.1, premrna_ENST00000673284.1 or a sequence of Table 3 or complements thereof. In some embodiments, the targeted portion of the GCK pre-mRNA comprises a sequence with at least 80%, 85%, 90%, 95%, 97%, or 100% sequence identity to a region comprising at least 8 contiguous nucleic acids of a sequence selected from the group consisting of SEQ ID NO: 540-SEQ ID NO: 543 or complements thereof. In some embodiments, the targeted portion of the GCK pre-mRNA comprises a sequence that is complementary to at least 8, 9, 10, 11, 12, 13, 14, 15, 16, 17, 18, 19 or 20 contiguous nucleic acids of a sequence of Table 6A or Table 6B or a complement thereof.

[0309] In some embodiments, the ASOs disclosed herein target a NSAE pre-mRNA transcribed from a GGA1 genomic sequence. In some embodiments, the ASO targets a NSAE pre-mRNA transcript from a GGA1 genomic sequence comprising a NSAE exon. In some embodiments, the ASO targets a NSAE pre-mRNA transcript from a GGA1 genomic sequence comprising an intron flanking the 3′ splice site of the NSAE exon and an intron flanking the 5′ splice site of a NSAE exon. In some embodiments, the ASO targets a NSAE pre-mRNA transcript comprising a sequence selected from the group consisting of premrna_ENST00000325180.12, premrna_ENST00000326597.6, premrna_ENST00000343632.9, premrna_ENST00000381756.9, premrna_ENST00000405147.7, premrna_ENST00000406772.5, premrna_ENST00000411501.5, premrna_ENST00000413251.5, premrna_ENST00000423024.1, premrna_ENST00000429218.5, premrna_ENST00000431745.5, premrna_ENST00000439161.5, premrna_ENST00000447515.5, premrna_ENST00000449944.5, premrna_ENST00000453208.5, premrna_ENST00000460957.1, premrna_ENST00000463672.1, premrna_ENST00000475445.1, premrna_ENST00000481613.1, premrna_ENST00000484804.5, premrna_ENST00000488672.1, premrna_ENST00000489772.5, and premrna_ENST00000491295.1. In some embodiments, the ASO targets a GGA1 pre-mRNA sequence comprising a NSAE exon. In some embodiments, the ASO targets a GGA1 pre-mRNA sequence comprising an intron flanking the 3′ splice site of the NSAE exon. In some embodiments, the ASO targets a GGA1 pre-mRNA sequence comprising an intron flanking the 5′ splice site of the NSAE exon. In some embodiments, the transcript is selected from the group consisting of transcript_ENST00000325180.12, transcript_ENST00000326597.6, transcript_ENST00000343632.9, transcript_ENST00000381756.9, transcript_ENST00000405147.7, transcript_ENST00000406772.5, transcript_ENST00000411501.5, transcript_ENST00000413251.5, transcript_ENST00000423024.1, transcript_ENST00000429218.5, transcript_ENST00000431745.5, transcript_ENST00000439161.5, transcript_ENST00000447515.5, transcript_ENST00000449944.5, transcript_ENST00000453208.5, transcript_ENST00000460957.1, transcript_ENST00000463672.1, transcript_ENST00000475445.1, transcript_ENST00000481613.1, transcript_ENST00000484804.5, transcript_ENST00000488672.1, transcript_ENST00000489772.5, and transcript_ENST00000491295.1.

[0310] In some embodiments, the GGA1 pre-mRNA transcript is encoded by a genetic sequence with at least about 80%, 85%, 90%, 95%, 96%, 97%, 98%, 99% or 100% sequence identity to the Ensembl reference number ENSG00000100083.19 or a complement thereof. In some embodiments, the GGA1 pre-mRNA transcript comprises a sequence with at least about 80%, 85%, 90%, 95%, 96%, 97%, 98%, 99% or 100% sequence identity to a GGA1 pre-mRNA transcript or a complement thereof described herein.

[0311] In some embodiments, the targeted portion of the GGA1 pre-mRNA comprises a sequence with at least 80%, 85%, 90%, 95%, 97%, or 100% sequence identity to a region comprising at least 8 contiguous nucleic acids of a sequence of premrna_ENST00000325180.12, premrna_ENST00000326597.6, premrna_ENST00000343632.9, premrna_ENST00000381756.9, premrna_ENST00000405147.7, premrna_ENST00000406772.5, premrna_ENST00000411501.5, premrna_ENST00000413251.5, premrna_ENST00000423024.1, premrna_ENST00000429218.5, premrna_ENST00000431745.5, premrna_ENST00000439161.5, premrna_ENST00000447515.5, premrna_ENST00000449944.5, premrna_ENST00000453208.5, premrna_ENST00000460957.1, premrna_ENST00000463672.1, premrna_ENST00000475445.1, premrna_ENST00000481613.1, premrna_ENST00000484804.5, premrna_ENST00000488672.1, premrna_ENST00000489772.5, premrna_ENST00000491295.1, or a sequence of Table 3 or complements thereof. In some embodiments, the targeted portion of the GGA1 pre-mRNA comprises a sequence with at least 80%, 85%, 90%, 95%, 97%, or 100% sequence identity to a region comprising at least 8 contiguous nucleic acids of a sequence selected from the group consisting of SEQ ID NO: 544-SEQ ID NO: 553 or complements thereof. In some embodiments, the targeted portion of the GGA1 pre-mRNA comprises a sequence that is complementary to at least 8, 9, 10, 11, 12, 13, 14, 15, 16, 17, 18, 19 or 20 contiguous nucleic acids of a sequence of Table 6A or Table 6B or a complement thereof.

[0312] In some embodiments, the ASOs disclosed herein target a NSAE pre-mRNA transcribed from a GGA3genomic sequence. In some embodiments, the ASO targets a NSAE pre-mRNA transcript from a GGA3genomic sequence comprising a NSAE exon. In some embodiments, the ASO targets a NSAE pre-mRNA transcript from a GGA3genomic sequence comprising an intron flanking the 3′ splice site of the NSAE exon and an intron flanking the 5′ splice site of a NSAE exon. In some embodiments, the ASO targets a GGA3pre-mRNA sequence comprising a NSAE exon. In some embodiments, the ASO targets a GGA3pre-mRNA sequence comprising an intron flanking the 3′ splice site of the NSAE exon. In some embodiments, the ASO targets a GGA3pre-mRNA sequence comprising an intron flanking the 5′ splice site of the NSAE exon. In some embodiments, the transcript is selected from the group consisting of transcript_ENST00000537686.5, transcript_ENST00000538886.5, transcript_ENST00000577435.5, transcript_ENST00000578208.1, transcript_ENST00000578348.5, transcript_ENST00000578773.1, transcript_ENST00000578896.1, transcript_ENST00000579743.2, transcript_ENST00000580646.5, transcript_ENST00000580799.2, transcript_ENST00000582232.1, transcript_ENST00000582376.1, transcript_ENST00000582486.5, transcript_ENST00000582717.5, transcript_ENST00000582821.5, transcript_ENST00000583282.5, transcript_ENST00000583667.1, transcript_ENST00000584243.5, transcript_ENST00000584550.1, transcript_ENST00000613421.4, transcript_ENST00000614198.4, transcript_ENST00000621217.4, transcript_ENST00000621870.4, and transcript_ENST00000649398.1.

[0313] In some embodiments, the GGA3pre-mRNA transcript is encoded by a genetic sequence with at least about 80%, 85%, 90%, 95%, 96%, 97%, 98%, 99% or 100% sequence identity to the Ensembl reference number ENSG00000125447.18 or a complement thereof. In some embodiments, the GGA3pre-mRNA transcript comprises a sequence with at least about 80%, 85%, 90%, 95%, 96%, 97%, 98%, 99% or 100% sequence identity to a GGA3pre-mRNA transcript or a complement thereof described herein.

[0314] In some embodiments, the targeted portion of the GGA3pre-mRNA comprises a sequence with at least 80%, 85%, 90%, 95%, 97%, or 100% sequence identity to a region comprising at least 8 contiguous nucleic acids of a sequence of premrna_ENST00000537686.5, premrna_ENST00000538886.5, premrna_ENST00000577435.5, premrna_ENST00000578208.1, premrna_ENST00000578348.5, premrna_ENST00000578773.1, premrna_ENST00000578896.1, premrna_ENST00000579743.2, premrna_ENST00000580646.5, premrna_ENST00000580799.2, premrna_ENST00000582232.1, premrna_ENST00000582376.1, premrna_ENST00000582486.5, premrna_ENST00000582717.5, premrna_ENST00000582821.5, premrna_ENST00000583282.5, premrna_ENST00000583667.1, premrna_ENST00000584243.5, premrna_ENST00000584550.1, premrna_ENST00000613421.4, premrna_ENST00000614198.4, premrna_ENST00000621217.4, premrna_ENST00000621870.4, premrna_ENST00000649398.1 or a sequence of Table 3 or complements thereof. In some embodiments, the targeted portion of the GGA3 pre-mRNA comprises a sequence with at least 80%, 85%, 90%, 95%, 97%, or 100% sequence identity to a region comprising at least 8 contiguous nucleic acids of a sequence selected from the group consisting of SEQ ID NO: 554-SEQ ID NO: 557 or complements thereof. In some embodiments, the targeted portion of the GGA3 pre-mRNA comprises a sequence that is complementary to at least 8, 9, 10, 11, 12, 13, 14, 15, 16, 17, 18, 19 or 20 contiguous nucleic acids of a sequence of Table 6A or Table 6B or a complement thereof.

[0315] In some embodiments, the ASOs disclosed herein target a NSAE pre-mRNA transcribed from a GGT1 genomic sequence. In some embodiments, the ASO targets a NSAE pre-mRNA transcript from a GGT1 genomic sequence comprising a NSAE exon. In some embodiments, the ASO targets a NSAE pre-mRNA transcript from a GGT1 genomic sequence comprising an intron flanking the 3′ splice site of the NSAE exon and an intron flanking the 5′ splice site of a NSAE exon. In some embodiments, the ASO targets a NSAE pre-mRNA transcript comprising a sequence selected from the group consisting of premrna_ENST00000248923.9, premrna_ENST00000400380.5, premrna_ENST00000400382.6, premrna_ENST00000401885.5, premrna_ENST00000403838.5, premrna_ENST00000404223.5, premrna_ENST00000404532.5, premrna_ENST00000404603.5, premrna_ENST00000404920.1, premrna_ENST00000411974.5, premrna_ENST00000412658.5, premrna_ENST00000412898.5, premrna_ENST00000419133.5, premrna_ENST00000425895.5, premrna_ENST00000428855.5, premrna_ENST00000430289.5, premrna_ENST00000432867.5, premrna_ENST00000438643.6, premrna_ENST00000439775.1, premrna_ENST00000445029.5, premrna_ENST00000447416.5, premrna_ENST00000451366.5, premrna_ENST00000452551.5, premrna_ENST00000455483.5, premrna_ENST00000456869.5, premrna_ENST00000466310.5, premrna_ENST00000474191.6, premrna_ENST00000487766.1, premrna_ENST00000490087.1, premrna_ENST00000651180.1, and premrna_ENST00000652248.1. In some embodiments, the ASO targets a GGT1 pre-mRNA sequence comprising a NSAE exon. In some embodiments, the ASO targets a GGT1 pre-mRNA sequence comprising an intron flanking the 3′ splice site of the NSAE exon. In some embodiments, the ASO targets a GGT1 pre-mRNA sequence comprising an intron flanking the 5′ splice site of the NSAE exon. In some embodiments, the transcript is selected from the group consisting of transcript_ENST00000248923.9, transcript_ENST00000400380.5, transcript_ENST00000400382.6, transcript_ENST00000401885.5, transcript_ENST00000403838.5, transcript_ENST00000404223.5, transcript_ENST00000404532.5, transcript_ENST00000404603.5, transcript_ENST00000404920.1, transcript_ENST00000411974.5, transcript_ENST00000412658.5, transcript_ENST00000412898.5, transcript_ENST00000419133.5, transcript_ENST00000425895.5, transcript_ENST00000428855.5, transcript_ENST00000430289.5, transcript_ENST00000432867.5, transcript_ENST00000438643.6, transcript_ENST00000439775.1, transcript_ENST00000445029.5, transcript_ENST00000447416.5, transcript_ENST00000451366.5, transcript_ENST00000452551.5, transcript_ENST00000455483.5, transcript_ENST00000456869.5, transcript_ENST00000466310.5, transcript_ENST00000474191.6, transcript_ENST00000487766.1, transcript_ENST00000490087.1, transcript_ENST00000651180.1, and transcript_ENST00000652248.1.

[0316] In some embodiments, the GGT1 pre-mRNA transcript is encoded by a genetic sequence with at least about 80%, 85%, 90%, 95%, 96%, 97%, 98%, 99% or 100% sequence identity to the Ensembl reference number ENSG00000100031.19 or ENSG00000286070.1 or a complement thereof. In some embodiments, the GGT1 pre-mRNA transcript comprises a sequence with at least about 80%, 85%, 90%, 95%, 96%, 97%, 98%, 99% or 100% sequence identity to a GGT1 pre-mRNA transcript or a complement thereof described herein.

[0317] In some embodiments, the targeted portion of the GGT1 pre-mRNA comprises a sequence with at least 80%, 85%, 90%, 95%, 97%, or 100% sequence identity to a region comprising at least 8 contiguous nucleic acids of a sequence of premrna_ENST00000248923.9, premrna_ENST00000400380.5, premrna_ENST00000400382.6, premrna_ENST00000401885.5, premrna_ENST00000403838.5, premrna_ENST00000404223.5, premrna_ENST00000404532.5, premrna_ENST00000404603.5, premrna_ENST00000404920.1, premrna_ENST00000411974.5, premrna_ENST00000412658.5, premrna_ENST00000412898.5, premrna_ENST00000419133.5, premrna_ENST00000425895.5, premrna_ENST00000428855.5, premrna_ENST00000430289.5, premrna_ENST00000432867.5, premrna_ENST00000438643.6, premrna_ENST00000439775.1, premrna_ENST00000445029.5, premrna_ENST00000447416.5, premrna_ENST00000451366.5, premrna_ENST00000452551.5, premrna_ENST00000455483.5, premrna_ENST00000456869.5, premrna_ENST00000466310.5, premrna_ENST00000474191.6, premrna_ENST00000487766.1, premrna_ENST00000490087.1, premrna_ENST00000651180.1, premrna_ENST00000652248.1 or a sequence of Table 3 or complements thereof. In some embodiments, the targeted portion of the GGT1 pre-mRNA comprises a sequence with at least 80%, 85%, 90%, 95%, 97%, or 100% sequence identity to a region comprising at least 8 contiguous nucleic acids of a sequence selected from the group consisting of SEQ ID NO: 558-SEQ ID NO: 561 or complements thereof. In some embodiments, the targeted portion of the GGT1 pre-mRNA comprises a sequence that is complementary to at least 8, 9, 10, 11, 12, 13, 14, 15, 16, 17, 18, 19 or 20 contiguous nucleic acids of a sequence of Table 6A or Table 6B or a complement thereof.

[0318] In some embodiments, the ASOs disclosed herein target a NSAE pre-mRNA transcribed from a GLMN genomic sequence. In some embodiments, the ASO targets a NSAE pre-mRNA transcript from a GLMN genomic sequence comprising a NSAE exon. In some embodiments, the ASO targets a NSAE pre-mRNA transcript from a GLMN genomic sequence comprising an intron flanking the 3′ splice site of the NSAE exon and an intron flanking the 5′ splice site of a NSAE exon. In some embodiments, the ASO targets a NSAE pre-mRNA transcript comprising a sequence selected from the group consisting of premrna_ENST00000370360.8, premrna_ENST00000463560.1, premrna_ENST00000471465.1, premrna_ENST00000487911.1, premrna_ENST00000495106.5, and premrna_ENST00000495852.6. In some embodiments, the ASO targets a GLMN pre-mRNA sequence comprising a NSAE exon. In some embodiments, the ASO targets a GLMN pre-mRNA sequence comprising an intron flanking the 3′ splice site of the NSAE exon. In some embodiments, the ASO targets a GLMN pre-mRNA sequence comprising an intron flanking the 5′ splice site of the NSAE exon. In some embodiments, the transcript is selected from the group consisting of transcript_ENST00000370360.8, transcript_ENST00000463560.1, transcript_ENST00000471465.1, transcript_ENST00000487911.1, transcript_ENST00000495106.5, and transcript_ENST00000495852.6.

[0319] In some embodiments, the GLMN pre-mRNA transcript is encoded by a genetic sequence with at least about 80%, 85%, 90%, 95%, 96%, 97%, 98%, 99% or 100% sequence identity to the Ensembl reference number ENSG00000174842.17 or a complement thereof. In some embodiments, the GLMN pre-mRNA transcript comprises a sequence with at least about 80%, 85%, 90%, 95%, 96%, 97%, 98%, 99% or 100% sequence identity to a GLMN pre-mRNA transcript or a complement thereof described herein.

[0320] In some embodiments, the targeted portion of the GLMN pre-mRNA comprises a sequence with at least 80%, 85%, 90%, 95%, 97%, or 100% sequence identity to a region comprising at least 8 contiguous nucleic acids of a sequence of premrna_ENST00000370360.8, premrna_ENST00000463560.1, premrna_ENST00000471465.1, premrna_ENST00000487911.1, premrna_ENST00000495106.5, premrna_ENST00000495852.6 or a sequence of Table 3 or complements thereof. In some embodiments, the targeted portion of the GLMN pre-mRNA comprises a sequence with at least 80%, 85%, 90%, 95%, 97%, or 100% sequence identity to a region comprising at least 8 contiguous nucleic acids of a sequence selected from the group consisting of SEQ ID NO: 562-SEQ ID NO: 569 or complements thereof. In some embodiments, the targeted portion of the GLMN pre-mRNA comprises a sequence that is complementary to at least 8, 9, 10, 11, 12, 13, 14, 15, 16, 17, 18, 19 or 20 contiguous nucleic acids of a sequence of Table 6A or Table 6B or a complement thereof.

[0321] In some embodiments, the ASOs disclosed herein target a NSAE pre-mRNA transcribed from a GON4L genomic sequence. In some embodiments, the ASO targets a NSAE pre-mRNA transcript from a GON4L genomic sequence comprising a NSAE exon. In some embodiments, the ASO targets a NSAE pre-mRNA transcript from a GON4L genomic sequence comprising an intron flanking the 3′ splice site of the NSAE exon and an intron flanking the 5′ splice site of a NSAE exon. In some embodiments, the ASO targets a NSAE pre-mRNA transcript comprising a sequence selected from the group consisting of premrna_ENST00000271883.9, premrna_ENST00000361040.9, premrna_ENST00000368331.5, premrna_ENST00000437809.5, premrna_ENST00000460075.1, premrna_ENST00000466224.1, premrna_ENST00000467009.1, premrna_ENST00000468867.1, premrna_ENST00000471341.5, premrna_ENST00000473267.1, premrna_ENST00000482386.5, premrna_ENST00000483032.1, premrna_ENST00000488251.1, premrna_ENST00000490801.1, premrna_ENST00000496021.1, premrna_ENST00000497369.5, premrna_ENST00000615926.4, premrna_ENST00000620426.4, and premrna_ENST00000622608.1. In some embodiments, the ASO targets a GON4L pre-mRNA sequence comprising a NSAE exon. In some embodiments, the ASO targets a GON4L pre-mRNA sequence comprising an intron flanking the 3′ splice site of the NSAE exon. In some embodiments, the ASO targets a GON4L pre-mRNA sequence comprising an intron flanking the 5′ splice site of the NSAE exon. In some embodiments, the transcript is selected from the group consisting of transcript_ENST00000271883.9, transcript_ENST00000361040.9, transcript_ENST00000368331.5, transcript_ENST00000437809.5, transcript_ENST00000460075.1, transcript_ENST00000466224.1, transcript_ENST00000467009.1, transcript_ENST00000468867.1, transcript_ENST00000471341.5, transcript_ENST00000473267.1, transcript_ENST00000482386.5, transcript_ENST00000483032.1, transcript_ENST00000488251.1, transcript_ENST00000490801.1, transcript_ENST00000496021.1, transcript_ENST00000497369.5, transcript_ENST00000615926.4, transcript_ENST00000620426.4, and transcript_ENST00000622608.1.

[0322] In some embodiments, the GON4L pre-mRNA transcript is encoded by a genetic sequence with at least about 80%, 85%, 90%, 95%, 96%, 97%, 98%, 99% or 100% sequence identity to the Ensembl reference number ENSG00000116580.18 or a complement thereof. In some embodiments, the GON4L pre-mRNA transcript comprises a sequence with at least about 80%, 85%, 90%, 95%, 96%, 97%, 98%, 99% or 100% sequence identity to a GON4L pre-mRNA transcript or a complement thereof described herein.

[0323] In some embodiments, the targeted portion of the GON4L pre-mRNA comprises a sequence with at least 80%, 85%, 90%, 95%, 97%, or 100% sequence identity to a region comprising at least 8 contiguous nucleic acids of a sequence of premrna_ENST00000271883.9, premrna_ENST00000361040.9, premrna_ENST00000368331.5, premrna_ENST00000437809.5, premrna_ENST00000460075.1, premrna_ENST00000466224.1, premrna_ENST00000467009.1, premrna_ENST00000468867.1, premrna_ENST00000471341.5, premrna_ENST00000473267.1, premrna_ENST00000482386.5, premrna_ENST00000483032.1, premrna_ENST00000488251.1, premrna_ENST00000490801.1, premrna_ENST00000496021.1, premrna_ENST00000497369.5, premrna_ENST00000615926.4, premrna_ENST00000620426.4, premrna_ENST00000622608.1 or a sequence of Table 3 or complements thereof. In some embodiments, the targeted portion of the GON4L pre-mRNA comprises a sequence with at least 80%, 85%, 90%, 95%, 97%, or 100% sequence identity to a region comprising at least 8 contiguous nucleic acids of a sequence selected from the group consisting of SEQ ID NO: 570-SEQ ID NO: 573 or complements thereof. In some embodiments, the targeted portion of the GON4L pre-mRNA comprises a sequence that is complementary to at least 8, 9, 10, 11, 12, 13, 14, 15, 16, 17, 18, 19 or 20 contiguous nucleic acids of a sequence of Table 6A or Table 6B or a complement thereof.

[0324] In some embodiments, the ASOs disclosed herein target a NSAE pre-mRNA transcribed from a GRB14 genomic sequence. In some embodiments, the ASO targets a NSAE pre-mRNA transcript from a GRB14 genomic sequence comprising a NSAE exon. In some embodiments, the ASO targets a NSAE pre-mRNA transcript from a GRB14 genomic sequence comprising an intron flanking the 3′ splice site of the NSAE exon and an intron flanking the 5′ splice site of a NSAE exon. In some embodiments, the ASO targets a NSAE pre-mRNA transcript comprising a sequence selected from the group consisting of premrna_ENST00000263915.8, premrna_ENST00000424693.1, premrna_ENST00000446413.6, premrna_ENST00000469573.1, premrna_ENST00000488342.5, and premrna_ENST00000497306.1. In some embodiments, the ASO targets a GRB14 pre-mRNA sequence comprising a NSAE exon. In some embodiments, the ASO targets a GRB14 pre-mRNA sequence comprising an intron flanking the 3′ splice site of the NSAE exon. In some embodiments, the ASO targets a GRB14 pre-mRNA sequence comprising an intron flanking the 5′ splice site of the NSAE exon. In some embodiments, the transcript is selected from the group consisting of transcript_ENST00000263915.8, transcript_ENST00000424693.1, transcript_ENST00000446413.6, transcript_ENST00000469573.1, transcript_ENST00000488342.5, and transcript_ENST00000497306.1.

[0325] In some embodiments, the GRB14 pre-mRNA transcript is encoded by a genetic sequence with at least about 80%, 85%, 90%, 95%, 96%, 97%, 98%, 99% or 100% sequence identity to the Ensembl reference number ENSG00000115290.10 or a complement thereof. In some embodiments, the GRB14 pre-mRNA transcript comprises a sequence with at least about 80%, 85%, 90%, 95%, 96%, 97%, 98%, 99% or 100% sequence identity to a GRB14 pre-mRNA transcript or a complement thereof described herein.

[0326] In some embodiments, the targeted portion of the GRB14 pre-mRNA comprises a sequence with at least 80%, 85%, 90%, 95%, 97%, or 100% sequence identity to a region comprising at least 8 contiguous nucleic acids of a sequence of premrna_ENST00000263915.8, premrna_ENST00000424693.1, premrna_ENST00000446413.6, premrna_ENST00000469573.1, premrna_ENST00000488342.5, premrna_ENST00000497306.1 or a sequence of Table 3 or complements thereof. In some embodiments, the targeted portion of the GRB14 pre-mRNA comprises a sequence with at least 80%, 85%, 90%, 95%, 97%, or 100% sequence identity to a region comprising at least 8 contiguous nucleic acids of a sequence selected from the group consisting of SEQ ID NO: 574-SEQ ID NO: 577 or complements thereof. In some embodiments, the targeted portion of the GRB14 pre-mRNA comprises a sequence that is complementary to at least 8, 9, 10, 11, 12, 13, 14, 15, 16, 17, 18, 19 or 20 contiguous nucleic acids of a sequence of Table 6A or Table 6B or a complement thereof.

[0327] In some embodiments, the ASOs disclosed herein target a NSAE pre-mRNA transcribed from a HDAC3 genomic sequence. In some embodiments, the ASO targets a NSAE pre-mRNA transcript from a HDAC3 genomic sequence comprising a NSAE exon. In some embodiments, the ASO targets a NSAE pre-mRNA transcript from a HDAC3 genomic sequence comprising an intron flanking the 3′ splice site of the NSAE exon and an intron flanking the 5′ splice site of a NSAE exon. In some embodiments, the ASO targets a NSAE pre-mRNA transcript comprising a sequence selected from the group consisting of premrna_ENST00000305264.8, premrna_ENST00000459727.5, premrna_ENST00000467533.5, premrna_ENST00000469207.5, premrna_ENST00000469550.6, premrna_ENST00000471968.1, premrna_ENST00000475549.1, premrna_ENST00000476739.5, premrna_ENST00000486618.1, premrna_ENST00000490808.1, premrna_ENST00000491581.5, premrna_ENST00000492407.1, premrna_ENST00000492506.1, premrna_ENST00000495485.1, premrna_ENST00000519474.5, and premrna_ENST00000523088.5. In some embodiments, the ASO targets a HDAC3 pre-mRNA sequence comprising a NSAE exon. In some embodiments, the ASO targets a HDAC3 pre-mRNA sequence comprising an intron flanking the 3′ splice site of the NSAE exon. In some embodiments, the ASO targets a HDAC3 pre-mRNA sequence comprising an intron flanking the 5′ splice site of the NSAE exon. In some embodiments, the transcript is selected from the group consisting of transcript_ENST00000305264.8, transcript_ENST00000459727.5, transcript_ENST00000467533.5, transcript_ENST00000469207.5, transcript_ENST00000469550.6, transcript_ENST00000471968.1, transcript_ENST00000475549.1, transcript_ENST00000476739.5, transcript_ENST00000486618.1, transcript_ENST00000490808.1, transcript_ENST00000491581.5, transcript_ENST00000492407.1, transcript_ENST00000492506.1, transcript_ENST00000495485.1, transcript_ENST00000519474.5, and transcript_ENST00000523088.5.

[0328] In some embodiments, the HDAC3 pre-mRNA transcript is encoded by a genetic sequence with at least about 80%, 85%, 90%, 95%, 96%, 97%, 98%, 99% or 100% sequence identity to the Ensembl reference number ENSG00000171720.10 or a complement thereof. In some embodiments, the HDAC3 pre-mRNA transcript comprises a sequence with at least about 80%, 85%, 90%, 95%, 96%, 97%, 98%, 99% or 100% sequence identity to a HDAC3 pre-mRNA transcript or a complement thereof described herein.

[0329] In some embodiments, the targeted portion of the HDAC3 pre-mRNA comprises a sequence with at least 80%, 85%, 90%, 95%, 97%, or 100% sequence identity to a region comprising at least 8 contiguous nucleic acids of a sequence of premrna_ENST00000305264.8, premrna_ENST00000459727.5, premrna_ENST00000467533.5, premrna_ENST00000469207.5, premrna_ENST00000469550.6, premrna_ENST00000471968.1, premrna_ENST00000475549.1, premrna_ENST00000476739.5, premrna_ENST00000486618.1, premrna_ENST00000490808.1, premrna_ENST00000491581.5, premrna_ENST00000492407.1, premrna_ENST00000492506.1, premrna_ENST00000495485.1, premrna_ENST00000519474.5, premrna_ENST00000523088.5 or a sequence of Table 3 or complements thereof. In some embodiments, the targeted portion of the HDAC3 pre-mRNA comprises a sequence with at least 80%, 85%, 90%, 95%, 97%, or 100% sequence identity to a region comprising at least 8 contiguous nucleic acids of a sequence selected from the group consisting of SEQ ID NO: 578-SEQ ID NO: 581 or complements thereof. In some embodiments, the targeted portion of the HDAC3 pre-mRNA comprises a sequence that is complementary to at least 8, 9, 10, 11, 12, 13, 14, 15, 16, 17, 18, 19 or 20 contiguous nucleic acids of a sequence of Table 6A or Table 6B or a complement thereof.

[0330] In some embodiments, the ASOs disclosed herein target a NSAE pre-mRNA transcribed from a HELQ genomic sequence. In some embodiments, the ASO targets a NSAE pre-mRNA transcript from a HELQ genomic sequence comprising a NSAE exon. In some embodiments, the ASO targets a NSAE pre-mRNA transcript from a HELQ genomic sequence comprising an intron flanking the 3′ splice site of the NSAE exon and an intron flanking the 5′ splice site of a NSAE exon. In some embodiments, the ASO targets a NSAE pre-mRNA transcript comprising a sequence selected from the group consisting of premrna_ENST00000295488.8, premrna_ENST00000440639.2, premrna_ENST00000508591.5, premrna_ENST00000510985.1, premrna_ENST00000512539.1, and premrna_ENST00000515482.1. In some embodiments, the ASO targets a HELQ pre-mRNA sequence comprising a NSAE exon. In some embodiments, the ASO targets a HELQ pre-mRNA sequence comprising an intron flanking the 3′ splice site of the NSAE exon. In some embodiments, the ASO targets a HELQ pre-mRNA sequence comprising an intron flanking the 5′ splice site of the NSAE exon. In some embodiments, the transcript is selected from the group consisting of transcript_ENST00000295488.8, transcript_ENST00000440639.2, transcript_ENST00000508591.5, transcript_ENST00000510985.1, transcript_ENST00000512539.1, and transcript_ENST00000515482.1.

[0331] In some embodiments, the HELQ pre-mRNA transcript is encoded by a genetic sequence with at least about 80%, 85%, 90%, 95%, 96%, 97%, 98%, 99% or 100% sequence identity to the Ensembl reference number ENSG00000163312.11 or a complement thereof. In some embodiments, the HELQ pre-mRNA transcript comprises a sequence with at least about 80%, 85%, 90%, 95%, 96%, 97%, 98%, 99% or 100% sequence identity to a HELQ pre-mRNA transcript or a complement thereof described herein.

[0332] In some embodiments, the targeted portion of the HELQ pre-mRNA comprises a sequence with at least 80%, 85%, 90%, 95%, 97%, or 100% sequence identity to a region comprising at least 8 contiguous nucleic acids of a sequence of premrna_ENST00000295488.8, premrna_ENST00000440639.2, premrna_ENST00000508591.5, premrna_ENST00000510985.1, premrna_ENST00000512539.1, premrna_ENST00000515482.1, or a sequence of Table 3 or complements thereof. In some embodiments, the targeted portion of the HELQ pre-mRNA comprises a sequence with at least 80%, 85%, 90%, 95%, 97%, or 100% sequence identity to a region comprising at least 8 contiguous nucleic acids of a sequence selected from the group consisting of SEQ ID NO: 582-SEQ ID NO: 585 or complements thereof. In some embodiments, the targeted portion of the HELQ pre-mRNA comprises a sequence that is complementary to at least 8, 9, 10, 11, 12, 13, 14, 15, 16, 17, 18, 19 or 20 contiguous nucleic acids of a sequence of Table 6A or Table 6B or a complement thereof.

[0333] In some embodiments, the ASOs disclosed herein target a NSAE pre-mRNA transcribed from a HP1BP3 genomic sequence. In some embodiments, the ASO targets a NSAE pre-mRNA transcript from a HP1BP3 genomic sequence comprising a NSAE exon. In some embodiments, the ASO targets a NSAE pre-mRNA transcript from a HP1BP3 genomic sequence comprising an intron flanking the 3′ splice site of the NSAE exon and an intron flanking the 5′ splice site of a NSAE exon. In some embodiments, the ASO targets a NSAE pre-mRNA transcript comprising a sequence selected from the group consisting of premrna_ENST00000312239.10, premrna_ENST00000375000.5, premrna_ENST00000375003.6, premrna_ENST00000414993.1, premrna_ENST00000417710.5, premrna_ENST00000419490.5, premrna_ENST00000419948.5, premrna_ENST00000424732.5, premrna_ENST00000437575.5, premrna_ENST00000438032.6, premrna_ENST00000443615.1, premrna_ENST00000487117.1, premrna_ENST00000488722.5, and premrna_ENST00000491748.1. In some embodiments, the ASO targets a HP1BP3 pre-mRNA sequence comprising a NSAE exon. In some embodiments, the ASO targets a HP1BP3 pre-mRNA sequence comprising an intron flanking the 3′ splice site of the NSAE exon. In some embodiments, the ASO targets a HP1BP3 pre-mRNA sequence comprising an intron flanking the 5′ splice site of the NSAE exon. In some embodiments, the transcript is selected from the group consisting of transcript_ENST00000312239.10, transcript_ENST00000375000.5, transcript_ENST00000375003.6, transcript_ENST00000414993.1, transcript_ENST00000417710.5, transcript_ENST00000419490.5, transcript_ENST00000419948.5, transcript_ENST00000424732.5, transcript_ENST00000437575.5, transcript_ENST00000438032.6, transcript_ENST00000443615.1, transcript_ENST00000487117.1, transcript_ENST00000488722.5, and transcript_ENST00000491748.1.

[0334] In some embodiments, the HP1BP3 pre-mRNA transcript is encoded by a genetic sequence with at least about 80%, 85%, 90%, 95%, 96%, 97%, 98%, 99% or 100% sequence identity to the Ensembl reference number ENSG00000127483.19 or a complement thereof. In some embodiments, the HP1BP3 pre-mRNA transcript comprises a sequence with at least about 80%, 85%, 90%, 95%, 96%, 97%, 98%, 99% or 100% sequence identity to a HP1BP3 pre-mRNA transcript or a complement thereof described herein.

[0335] In some embodiments, the targeted portion of the HP1BP3 pre-mRNA comprises a sequence with at least 80%, 85%, 90%, 95%, 97%, or 100% sequence identity to a region comprising at least 8 contiguous nucleic acids of a sequence of premrna_ENST00000312239.10, premrna_ENST00000375000.5, premrna_ENST00000375003.6, premrna_ENST00000414993.1, premrna_ENST00000417710.5, premrna_ENST00000419490.5, premrna_ENST00000419948.5, premrna_ENST00000424732.5, premrna_ENST00000437575.5, premrna_ENST00000438032.6, premrna_ENST00000443615.1, premrna_ENST00000487117.1, premrna_ENST00000488722.5, premrna_ENST00000491748.1 or a sequence of Table 3 or complements thereof. In some embodiments, the targeted portion of the HP1BP3 pre-mRNA comprises a sequence with at least 80%, 85%, 90%, 95%, 97%, or 100% sequence identity to a region comprising at least 8 contiguous nucleic acids of a sequence selected from the group consisting of SEQ ID NO: 586-SEQ ID NO: 589 or complements thereof. In some embodiments, the targeted portion of the HP1BP3 pre-mRNA comprises a sequence that is complementary to at least 8, 9, 10, 11, 12, 13, 14, 15, 16, 17, 18, 19 or 20 contiguous nucleic acids of a sequence of Table 6A or Table 6B or a complement thereof.

[0336] In some embodiments, the ASOs disclosed herein target a NSAE pre-mRNA transcribed from a HPS1 genomic sequence. In some embodiments, the ASO targets a NSAE pre-mRNA transcript from a HPS1 genomic sequence comprising a NSAE exon. In some embodiments, the ASO targets a NSAE pre-mRNA transcript from a HPS1 genomic sequence comprising an intron flanking the 3′ splice site of the NSAE exon and an intron flanking the 5′ splice site of a NSAE exon. In some embodiments, the ASO targets a NSAE pre-mRNA transcript comprising a sequence selected from the group consisting of premrna_ENST00000325103.10, premrna_ENST00000338546.9, premrna_ENST00000359632.7, premrna_ENST00000361490.9, premrna_ENST00000414009.1, premrna_ENST00000462743.1, premrna_ENST00000465957.1, premrna_ENST00000467246.5, premrna_ENST00000470095.5, premrna_ENST00000474873.5, premrna_ENST00000478087.5, premrna_ENST00000480020.5, premrna_ENST00000497527.1, premrna_ENST00000498219.5, and premrna_ENST00000613394.4. In some embodiments, the ASO targets a HPS1 pre-mRNA sequence comprising a NSAE exon. In some embodiments, the ASO targets a HPS1 pre-mRNA sequence comprising an intron flanking the 3′ splice site of the NSAE exon. In some embodiments, the ASO targets a HPS1 pre-mRNA sequence comprising an intron flanking the 5′ splice site of the NSAE exon. In some embodiments, the transcript is selected from the group consisting of transcript_ENST00000325103.10, transcript_ENST00000338546.9, transcript_ENST00000359632.7, transcript_ENST00000361490.9, transcript_ENST00000414009.1, transcript_ENST00000462743.1, transcript_ENST00000465957.1, transcript_ENST00000467246.5, transcript_ENST00000470095.5, transcript_ENST00000474873.5, transcript_ENST00000478087.5, transcript_ENST00000480020.5, transcript_ENST00000497527.1, transcript_ENST00000498219.5, and transcript_ENST00000613394.4.

[0337] In some embodiments, the HPS1 pre-mRNA transcript is encoded by a genetic sequence with at least about 80%, 85%, 90%, 95%, 96%, 97%, 98%, 99% or 100% sequence identity to the Ensembl reference number ENSG00000107521.19 or a complement thereof. In some embodiments, the HPS1 pre-mRNA transcript comprises a sequence with at least about 80%, 85%, 90%, 95%, 96%, 97%, 98%, 99% or 100% sequence identity to a HPS1 pre-mRNA transcript or a complement thereof described herein.

[0338] In some embodiments, the targeted portion of the HPS1 pre-mRNA comprises a sequence with at least 80%, 85%, 90%, 95%, 97%, or 100% sequence identity to a region comprising at least 8 contiguous nucleic acids of a sequence of premrna_ENST00000325103.10, premrna_ENST00000338546.9, premrna_ENST00000359632.7, premrna_ENST00000361490.9, premrna_ENST00000414009.1, premrna_ENST00000462743.1, premrna_ENST00000465957.1, premrna_ENST00000467246.5, premrna_ENST00000470095.5, premrna_ENST00000474873.5, premrna_ENST00000478087.5, premrna_ENST00000480020.5, premrna_ENST00000497527.1, premrna_ENST00000498219.5, premrna_ENST00000613394.4 or a sequence of Table 3 or complements thereof. In some embodiments, the targeted portion of the HPS1 pre-mRNA comprises a sequence with at least 80%, 85%, 90%, 95%, 97%, or 100% sequence identity to a region comprising at least 8 contiguous nucleic acids of a sequence selected from the group consisting of SEQ ID NO: 590-SEQ ID NO: 593 or complements thereof. In some embodiments, the targeted portion of the HPS1 pre-mRNA comprises a sequence that is complementary to at least 8, 9, 10, 11, 12, 13, 14, 15, 16, 17, 18, 19 or 20 contiguous nucleic acids of a sequence of Table 6A or Table 6B or a complement thereof.

[0339] In some embodiments, the ASOs disclosed herein target a NSAE pre-mRNA transcribed from a HPS4 genomic sequence. In some embodiments, the ASO targets a NSAE pre-mRNA transcript from a HPS4 genomic sequence comprising a NSAE exon. In some embodiments, the ASO targets a NSAE pre-mRNA transcript from a HPS4 genomic sequence comprising an intron flanking the 3′ splice site of the NSAE exon and an intron flanking the 5′ splice site of a NSAE exon. In some embodiments, the ASO targets a NSAE pre-mRNA transcript comprising a sequence selected from the group consisting of premrna_ENST00000336873.9, premrna_ENST00000398145.6, premrna_ENST00000402105.7, premrna_ENST00000422379.2, premrna_ENST00000429411.5, premrna_ENST00000439453.5, premrna_ENST00000459918.1, premrna_ENST00000464362.5, premrna_ENST00000466781.5, premrna_ENST00000473782.1, premrna_ENST00000479064.5, premrna_ENST00000481910.1, premrna_ENST00000483631.1, premrna_ENST00000485842.5, premrna_ENST00000491142.1, premrna_ENST00000493455.6, premrna_ENST00000496385.5, and premrna_ENST00000519774.5. In some embodiments, the ASO targets a HPS4 pre-mRNA sequence comprising a NSAE exon. In some embodiments, the ASO targets a HPS4 pre-mRNA sequence comprising an intron flanking the 3′ splice site of the NSAE exon. In some embodiments, the ASO targets a HPS4 pre-mRNA sequence comprising an intron flanking the 5′ splice site of the NSAE exon. In some embodiments, the transcript is selected from the group consisting of transcript_ENST00000336873.9, transcript_ENST00000398145.6, transcript_ENST00000402105.7, transcript_ENST00000422379.2, transcript_ENST00000429411.5, transcript_ENST00000439453.5, transcript_ENST00000459918.1, transcript_ENST00000464362.5, transcript_ENST00000466781.5, transcript_ENST00000473782.1, transcript_ENST00000479064.5, transcript_ENST00000481910.1, transcript_ENST00000483631.1, transcript_ENST00000485842.5, transcript_ENST00000491142.1, transcript_ENST00000493455.6, transcript_ENST00000496385.5, and transcript_ENST00000519774.5.

[0340] In some embodiments, the HPS4 pre-mRNA transcript is encoded by a genetic sequence with at least about 80%, 85%, 90%, 95%, 96%, 97%, 98%, 99% or 100% sequence identity to the Ensembl reference number ENSG00000100099.20 or a complement thereof. In some embodiments, the HPS4 pre-mRNA transcript comprises a sequence with at least about 80%, 85%, 90%, 95%, 96%, 97%, 98%, 99% or 100% sequence identity to a HPS4 pre-mRNA transcript or a complement thereof described herein.

[0341] In some embodiments, the targeted portion of the HPS4 pre-mRNA comprises a sequence with at least 80%, 85%, 90%, 95%, 97%, or 100% sequence identity to a region comprising at least 8 contiguous nucleic acids of a sequence of premrna_ENST00000336873.9, premrna_ENST00000398145.6, premrna_ENST00000402105.7, premrna_ENST00000422379.2, premrna_ENST00000429411.5, premrna_ENST00000439453.5, premrna_ENST00000459918.1, premrna_ENST00000464362.5, premrna_ENST00000466781.5, premrna_ENST00000473782.1, premrna_ENST00000479064.5, premrna_ENST00000481910.1, premrna_ENST00000483631.1, premrna_ENST00000485842.5, premrna_ENST00000491142.1, premrna_ENST00000493455.6, premrna_ENST00000496385.5, premrna_ENST00000519774.5 or a sequence of Table 3 or complements thereof. In some embodiments, the targeted portion of the HPS4 pre-mRNA comprises a sequence with at least 80%, 85%, 90%, 95%, 97%, or 100% sequence identity to a region comprising at least 8 contiguous nucleic acids of a sequence selected from the group consisting of SEQ ID NO: 594-SEQ ID NO: 597 or complements thereof. In some embodiments, the targeted portion of the HPS4 pre-mRNA comprises a sequence that is complementary to at least 8, 9, 10, 11, 12, 13, 14, 15, 16, 17, 18, 19 or 20 contiguous nucleic acids of a sequence of Table 6A or Table 6B or a complement thereof.

[0342] In some embodiments, the ASOs disclosed herein target a NSAE pre-mRNA transcribed from a IDUA genomic sequence. In some embodiments, the ASO targets a NSAE pre-mRNA transcript from a IDUA genomic sequence comprising a NSAE exon. In some embodiments, the ASO targets a NSAE pre-mRNA transcript from a IDUA genomic sequence comprising an intron flanking the 3′ splice site of the NSAE exon and an intron flanking the 5′ splice site of a NSAE exon. In some embodiments, the ASO targets a NSAE pre-mRNA transcript comprising a sequence selected from the group consisting of premrna_ENST00000247933.9, premrna_ENST00000502829.1, premrna_ENST00000502910.5, premrna_ENST00000504568.5, premrna_ENST00000506561.5, premrna_ENST00000508168.5, premrna_ENST00000509744.1, premrna_ENST00000509948.5, premrna_ENST00000514192.5, premrna_ENST00000514224.2, premrna_ENST00000514417.1, premrna_ENST00000514698.5, and premrna_ENST00000652070.1. In some embodiments, the ASO targets a IDUA pre-mRNA sequence comprising a NSAE exon. In some embodiments, the ASO targets a IDUA pre-mRNA sequence comprising an intron flanking the 3′ splice site of the NSAE exon. In some embodiments, the ASO targets a IDUA pre-mRNA sequence comprising an intron flanking the 5′ splice site of the NSAE exon. In some embodiments, the transcript is selected from the group consisting of transcript_ENST00000247933.9, transcript_ENST00000502829.1, transcript_ENST00000502910.5, transcript_ENST00000504568.5, transcript_ENST00000506561.5, transcript_ENST00000508168.5, transcript_ENST00000509744.1, transcript_ENST00000509948.5, transcript_ENST00000514192.5, transcript_ENST00000514224.2, transcript_ENST00000514417.1, transcript_ENST00000514698.5, and transcript_ENST00000652070.1.

[0343] In some embodiments, the IDUA pre-mRNA transcript is encoded by a genetic sequence with at least about 80%, 85%, 90%, 95%, 96%, 97%, 98%, 99% or 100% sequence identity to the Ensembl reference number ENSG00000127415.13 or a complement thereof. In some embodiments, the IDUA pre-mRNA transcript comprises a sequence with at least about 80%, 85%, 90%, 95%, 96%, 97%, 98%, 99% or 100% sequence identity to a IDUA pre-mRNA transcript or a complement thereof described herein.

[0344] In some embodiments, the targeted portion of the IDUA pre-mRNA comprises a sequence with at least 80%, 85%, 90%, 95%, 97%, or 100% sequence identity to a region comprising at least 8 contiguous nucleic acids of a sequence of premrna_ENST00000247933.9, premrna_ENST00000502829.1, premrna_ENST00000502910.5, premrna_ENST00000504568.5, premrna_ENST00000506561.5, premrna_ENST00000508168.5, premrna_ENST00000509744.1, premrna_ENST00000509948.5, premrna_ENST00000514192.5, premrna_ENST00000514224.2, premrna_ENST00000514417.1, premrna_ENST00000514698.5, premrna_ENST00000652070.1 or a sequence of Table 3 or complements thereof. In some embodiments, the targeted portion of the IDUA pre-mRNA comprises a sequence with at least 80%, 85%, 90%, 95%, 97%, or 100% sequence identity to a region comprising at least 8 contiguous nucleic acids of a sequence selected from the group consisting of SEQ ID NO: 598-SEQ ID NO: 603 or complements thereof. In some embodiments, the targeted portion of the IDUA pre-mRNA comprises a sequence that is complementary to at least 8, 9, 10, 11, 12, 13, 14, 15, 16, 17, 18, 19 or 20 contiguous nucleic acids of a sequence of Table 6A or Table 6B or a complement thereof.

[0345] In some embodiments, the ASOs disclosed herein target a NSAE pre-mRNA transcribed from a IFT122 genomic sequence. In some embodiments, the ASO targets a NSAE pre-mRNA transcript from a IFT122 genomic sequence comprising a NSAE exon. In some embodiments, the ASO targets a NSAE pre-mRNA transcript from a IFT122 genomic sequence comprising an intron flanking the 3′ splice site of the NSAE exon and an intron flanking the 5′ splice site of a NSAE exon. In some embodiments, the ASO targets a NSAE pre-mRNA transcript comprising a sequence selected from the group consisting of premrna_ENST00000296266.7, premrna_ENST00000347300.6, premrna_ENST00000348417.6, premrna_ENST00000349441.6, premrna_ENST00000431818.6, premrna_ENST00000440957.6, premrna_ENST00000448668.2, premrna_ENST00000502304.5, premrna_ENST00000502456.5, premrna_ENST00000504021.5, premrna_ENST00000504444.1, premrna_ENST00000504653.5, premrna_ENST00000506507.5, premrna_ENST00000507221.1, premrna_ENST00000507564.5, premrna_ENST00000508654.1, premrna_ENST00000508826.5, premrna_ENST00000509195.5, premrna_ENST00000509522.5, premrna_ENST00000509815.1, premrna_ENST00000510524.5, premrna_ENST00000511425.5, premrna_ENST00000511498.1, premrna_ENST00000512157.5, premrna_ENST00000512220.5, premrna_ENST00000512814.5, premrna_ENST00000513190.1, premrna_ENST00000513891.1, premrna_ENST00000513932.1, premrna_ENST00000514081.1, premrna_ENST00000514275.5, and premrna_ENST00000515783.5. In some embodiments, the ASO targets a IFT122 pre-mRNA sequence comprising a NSAE exon. In some embodiments, the ASO targets a IFT122 pre-mRNA sequence comprising an intron flanking the 3′ splice site of the NSAE exon. In some embodiments, the ASO targets a IFT122 pre-mRNA sequence comprising an intron flanking the 5′ splice site of the NSAE exon. In some embodiments, the transcript is selected from the group consisting of transcript_ENST00000296266.7, transcript_ENST00000347300.6, transcript_ENST00000348417.6, transcript_ENST00000349441.6, transcript_ENST00000431818.6, transcript_ENST00000440957.6, transcript_ENST00000448668.2, transcript_ENST00000502304.5, transcript_ENST00000502456.5, transcript_ENST00000504021.5, transcript_ENST00000504444.1, transcript_ENST00000504653.5, transcript_ENST00000506507.5, transcript_ENST00000507221.1, transcript_ENST00000507564.5, transcript_ENST00000508654.1, transcript_ENST00000508826.5, transcript_ENST00000509195.5, transcript_ENST00000509522.5, transcript_ENST00000509815.1, transcript_ENST00000510524.5, transcript_ENST00000511425.5, transcript_ENST00000511498.1, transcript_ENST00000512157.5, transcript_ENST00000512220.5, transcript_ENST00000512814.5, transcript_ENST00000513190.1, transcript_ENST00000513891.1, transcript_ENST00000513932.1, transcript_ENST00000514081.1, transcript_ENST00000514275.5, and transcript_ENST00000515783.5.

[0346] In some embodiments, the IFT122 pre-mRNA transcript is encoded by a genetic sequence with at least about 80%, 85%, 90%, 95%, 96%, 97%, 98%, 99% or 100% sequence identity to the Ensembl reference number ENSG00000163913.12 or a complement thereof. In some embodiments, the IFT122 pre-mRNA transcript comprises a sequence with at least about 80%, 85%, 90%, 95%, 96%, 97%, 98%, 99% or 100% sequence identity to a IFT122 pre-mRNA transcript or a complement thereof described herein.

[0347] In some embodiments, the targeted portion of the IFT122 pre-mRNA comprises a sequence with at least 80%, 85%, 90%, 95%, 97%, or 100% sequence identity to a region comprising at least 8 contiguous nucleic acids of a sequence of premrna_ENST00000296266.7, premrna_ENST00000347300.6, premrna_ENST00000348417.6, premrna_ENST00000349441.6, premrna_ENST00000431818.6, premrna_ENST00000440957.6, premrna_ENST00000448668.2, premrna_ENST00000502304.5, premrna_ENST00000502456.5, premrna_ENST00000504021.5, premrna_ENST00000504444.1, premrna_ENST00000504653.5, premrna_ENST00000506507.5, premrna_ENST00000507221.1, premrna_ENST00000507564.5, premrna_ENST00000508654.1, premrna_ENST00000508826.5, premrna_ENST00000509195.5, premrna_ENST00000509522.5, premrna_ENST00000509815.1, premrna_ENST00000510524.5, premrna_ENST00000511425.5, premrna_ENST00000511498.1, premrna_ENST00000512157.5, premrna_ENST00000512220.5, premrna_ENST00000512814.5, premrna_ENST00000513190.1, premrna_ENST00000513891.1, premrna_ENST00000513932.1, premrna_ENST00000514081.1, premrna_ENST00000514275.5, premrna_ENST00000515783.5 or a sequence of Table 3 or complements thereof. In some embodiments, the targeted portion of the IFT122 pre-mRNA comprises a sequence with at least 80%, 85%, 90%, 95%, 97%, or 100% sequence identity to a region comprising at least 8 contiguous nucleic acids of a sequence selected from the group consisting of SEQ ID NO: 604-SEQ ID NO: 607 or complements thereof. In some embodiments, the targeted portion of the IFT122 pre-mRNA comprises a sequence that is complementary to at least 8, 9, 10, 11, 12, 13, 14, 15, 16, 17, 18, 19 or 20 contiguous nucleic acids of a sequence of Table 6A or Table 6B or a complement thereof.

[0348] In some embodiments, the ASOs disclosed herein target a NSAE pre-mRNA transcribed from a IL17RC genomic sequence. In some embodiments, the ASO targets a NSAE pre-mRNA transcript from a IL17RC genomic sequence comprising a NSAE exon. In some embodiments, the ASO targets a NSAE pre-mRNA transcript from a IL17RC genomic sequence comprising an intron flanking the 3′ splice site of the NSAE exon and an intron flanking the 5′ splice site of a NSAE exon. In some embodiments, the ASO targets a NSAE pre-mRNA transcript comprising a sequence selected from the group consisting of premrna_ENST00000295981.7, premrna_ENST00000383812.9, premrna_ENST00000403601.8, premrna_ENST00000412901.5, premrna_ENST00000413608.2, premrna_ENST00000416074.6, premrna_ENST00000424206.5, premrna_ENST00000434756.5, premrna_ENST00000436503.5, premrna_ENST00000438091.5, premrna_ENST00000440502.5, premrna_ENST00000451165.6, premrna_ENST00000451231.5, premrna_ENST00000451271.5, premrna_ENST00000455057.5, premrna_ENST00000461995.5, premrna_ENST00000464406.5, premrna_ENST00000465794.1, premrna_ENST00000466046.5, premrna_ENST00000466712.1, premrna_ENST00000469686.5, premrna_ENST00000476810.5, premrna_ENST00000478206.1, premrna_ENST00000481032.1, premrna_ENST00000483582.5, premrna_ENST00000490512.5, premrna_ENST00000494365.5, premrna_ENST00000497102.5, premrna_ENST00000497387.5, and premrna_ENST00000498214.6. In some embodiments, the ASO targets a IL17RC pre-mRNA sequence comprising a NSAE exon. In some embodiments, the ASO targets a IL17RC pre-mRNA sequence comprising an intron flanking the 3′ splice site of the NSAE exon. In some embodiments, the ASO targets a IL17RC pre-mRNA sequence comprising an intron flanking the 5′ splice site of the NSAE exon. In some embodiments, the transcript is selected from the group consisting of transcript_ENST00000295981.7, transcript_ENST00000383812.9, transcript_ENST00000403601.8, transcript_ENST00000412901.5, transcript_ENST00000413608.2, transcript_ENST00000416074.6, transcript_ENST00000424206.5, transcript_ENST00000434756.5, transcript_ENST00000436503.5, transcript_ENST00000438091.5, transcript_ENST00000440502.5, transcript_ENST00000451165.6, transcript_ENST00000451231.5, transcript_ENST00000451271.5, transcript_ENST00000455057.5, transcript_ENST00000461995.5, transcript_ENST00000464406.5, transcript_ENST00000465794.1, transcript_ENST00000466046.5, transcript_ENST00000466712.1, transcript_ENST00000469686.5, transcript_ENST00000476810.5, transcript_ENST00000478206.1, transcript_ENST00000481032.1, transcript_ENST00000483582.5, transcript_ENST00000490512.5, transcript_ENST00000494365.5, transcript_ENST00000497102.5, transcript_ENST00000497387.5, and transcript_ENST00000498214.6.

[0349] In some embodiments, the IL17RC pre-mRNA transcript is encoded by a genetic sequence with at least about 80%, 85%, 90%, 95%, 96%, 97%, 98%, 99% or 100% sequence identity to the Ensembl reference number ENSG00000163702.20 or a complement thereof. In some embodiments, the IL17RC pre-mRNA transcript comprises a sequence with at least about 80%, 85%, 90%, 95%, 96%, 97%, 98%, 99% or 100% sequence identity to a IL17RC pre-mRNA transcript or a complement thereof described herein.

[0350] In some embodiments, the targeted portion of the IL17RC pre-mRNA comprises a sequence with at least 80%, 85%, 90%, 95%, 97%, or 100% sequence identity to a region comprising at least 8 contiguous nucleic acids of a sequence of premrna_ENST00000295981.7, premrna_ENST00000383812.9, premrna_ENST00000403601.8, premrna_ENST00000412901.5, premrna_ENST00000413608.2, premrna_ENST00000416074.6, premrna_ENST00000424206.5, premrna_ENST00000434756.5, premrna_ENST00000436503.5, premrna_ENST00000438091.5, premrna_ENST00000440502.5, premrna_ENST00000451165.6, premrna_ENST00000451231.5, premrna_ENST00000451271.5, premrna_ENST00000455057.5, premrna_ENST00000461995.5, premrna_ENST00000464406.5, premrna_ENST00000465794.1, premrna_ENST00000466046.5, premrna_ENST00000466712.1, premrna_ENST00000469686.5, premrna_ENST00000476810.5, premrna_ENST00000478206.1, premrna_ENST00000481032.1, premrna_ENST00000483582.5, premrna_ENST00000490512.5, premrna_ENST00000494365.5, premrna_ENST00000497102.5, premrna_ENST00000497387.5, premrna_ENST00000498214.6 or a sequence of Table 3 or complements thereof. In some embodiments, the targeted portion of the IL17RC pre-mRNA comprises a sequence with at least 80%, 85%, 90%, 95%, 97%, or 100% sequence identity to a region comprising at least 8 contiguous nucleic acids of a sequence selected from the group consisting of SEQ ID NO: 608-SEQ ID NO: 611 or complements thereof. In some embodiments, the targeted portion of the IL17RC pre-mRNA comprises a sequence that is complementary to at least 8, 9, 10, 11, 12, 13, 14, 15, 16, 17, 18, 19 or 20 contiguous nucleic acids of a sequence of Table 6A or Table 6B or a complement thereof.

[0351] In some embodiments, the ASOs disclosed herein target a NSAE pre-mRNA transcribed from a IMPDH1 genomic sequence. In some embodiments, the ASO targets a NSAE pre-mRNA transcript from a IMPDH1 genomic sequence comprising a NSAE exon. In some embodiments, the ASO targets a NSAE pre-mRNA transcript from a IMPDH1 genomic sequence comprising an intron flanking the 3′ splice site of the NSAE exon and an intron flanking the 5′ splice site of a NSAE exon. In some embodiments, the ASO targets a NSAE pre-mRNA transcript comprising a sequence selected from the group consisting of premrna_ENST00000338791.11, premrna_ENST00000348127.10, premrna_ENST00000354269.9, premrna_ENST00000419067.6, premrna_ENST00000460045.1, premrna_ENST00000468842.1, premrna_ENST00000469328.5, premrna_ENST00000470772.5, premrna_ENST00000473463.1, premrna_ENST00000480861.5, premrna_ENST00000484496.5, premrna_ENST00000489263.1, premrna_ENST00000491376.5, premrna_ENST00000496200.5, premrna_ENST00000496487.5, premrna_ENST00000497868.5, premrna_ENST00000626419.2, and premrna_ENST00000648462.1. In some embodiments, the ASO targets a IMPDH1 pre-mRNA sequence comprising a NSAE exon. In some embodiments, the ASO targets a IMPDH1 pre-mRNA sequence comprising an intron flanking the 3′ splice site of the NSAE exon. In some embodiments, the ASO targets a IMPDH1 pre-mRNA sequence comprising an intron flanking the 5′ splice site of the NSAE exon. In some embodiments, the transcript is selected from the group consisting of transcript_ENST00000338791.11, transcript_ENST00000348127.10, transcript_ENST00000354269.9, transcript_ENST00000419067.6, transcript_ENST00000460045.1, transcript_ENST00000468842.1, transcript_ENST00000469328.5, transcript_ENST00000470772.5, transcript_ENST00000473463.1, transcript_ENST00000480861.5, transcript_ENST00000484496.5, transcript_ENST00000489263.1, transcript_ENST00000491376.5, transcript_ENST00000496200.5, transcript_ENST00000496487.5, transcript_ENST00000497868.5, transcript_ENST00000626419.2, and transcript_ENST00000648462.1.

[0352] In some embodiments, the IMPDH1 pre-mRNA transcript is encoded by a genetic sequence with at least about 80%, 85%, 90%, 95%, 96%, 97%, 98%, 99% or 100% sequence identity to the Ensembl reference number ENSG00000106348.18 or a complement thereof. In some embodiments, the IMPDH1 pre-mRNA transcript comprises a sequence with at least about 80%, 85%, 90%, 95%, 96%, 97%, 98%, 99% or 100% sequence identity to a IMPDH1 pre-mRNA transcript or a complement thereof described herein.

[0353] In some embodiments, the targeted portion of the IMPDH1 pre-mRNA comprises a sequence with at least 80%, 85%, 90%, 95%, 97%, or 100% sequence identity to a region comprising at least 8 contiguous nucleic acids of a sequence of premrna_ENST00000338791.11, premrna_ENST00000348127.10, premrna_ENST00000354269.9, premrna_ENST00000419067.6, premrna_ENST00000460045.1, premrna_ENST00000468842.1, premrna_ENST00000469328.5, premrna_ENST00000470772.5, premrna_ENST00000473463.1, premrna_ENST00000480861.5, premrna_ENST00000484496.5, premrna_ENST00000489263.1, premrna_ENST00000491376.5, premrna_ENST00000496200.5, premrna_ENST00000496487.5, premrna_ENST00000497868.5, premrna_ENST00000626419.2, premrna_ENST00000648462.1 or a sequence of Table 3 or complements thereof. In some embodiments, the targeted portion of the IMPDH1 pre-mRNA comprises a sequence with at least 80%, 85%, 90%, 95%, 97%, or 100% sequence identity to a region comprising at least 8 contiguous nucleic acids of a sequence selected from the group consisting of SEQ ID NO: 612-SEQ ID NO: 617 or complements thereof. In some embodiments, the targeted portion of the IMPDH1 pre-mRNA comprises a sequence that is complementary to at least 8, 9, 10, 11, 12, 13, 14, 15, 16, 17, 18, 19 or 20 contiguous nucleic acids of a sequence of Table 6A or Table 6B or a complement thereof.

[0354] In some embodiments, the ASOs disclosed herein target a NSAE pre-mRNA transcribed from a JNVS genomic sequence. In some embodiments, the ASO targets a NSAE pre-mRNA transcript from a INVS genomic sequence comprising a NSAE exon. In some embodiments, the ASO targets a NSAE pre-mRNA transcript from a INVS genomic sequence comprising an intron flanking the 3′ splice site of the NSAE exon and an intron flanking the 5′ splice site of a NSAE exon. In some embodiments, the ASO targets a NSAE pre-mRNA transcript comprising a sequence selected from the group consisting of premrna_ENST00000262456.6, premrna_ENST00000262457.7, premrna_ENST00000374921.3, premrna_ENST00000460636.2, premrna_ENST00000466647.5, premrna_ENST00000480309.1, and premrna_ENST00000496467.5. In some embodiments, the ASO targets a INVS pre-mRNA sequence comprising a NSAE exon. In some embodiments, the ASO targets a INVS pre-mRNA sequence comprising an intron flanking the 3′ splice site of the NSAE exon. In some embodiments, the ASO targets a INVS pre-mRNA sequence comprising an intron flanking the 5′ splice site of the NSAE exon. In some embodiments, the transcript is selected from the group consisting of transcript_ENST00000262456.6, transcript_ENST00000262457.7, transcript_ENST00000374921.3, transcript_ENST00000460636.2, transcript_ENST00000466647.5, transcript_ENST00000480309.1, and transcript_ENST00000496467.5.

[0355] In some embodiments, the INVS pre-mRNA transcript is encoded by a genetic sequence with at least about 80%, 85%, 90%, 95%, 96%, 97%, 98%, 99% or 100% sequence identity to the Ensembl reference number ENSG00000119509.13 or a complement thereof. In some embodiments, the INVS pre-mRNA transcript comprises a sequence with at least about 80%, 85%, 90%, 95%, 96%, 97%, 98%, 99% or 100% sequence identity to a INVS pre-mRNA transcript or a complement thereof described herein.

[0356] In some embodiments, the targeted portion of the INVS pre-mRNA comprises a sequence with at least 80%, 85%, 90%, 95%, 97%, or 100% sequence identity to a region comprising at least 8 contiguous nucleic acids of a sequence of premrna_ENST00000262456.6, premrna_ENST00000262457.7, premrna_ENST00000374921.3, premrna_ENST00000460636.2, premrna_ENST00000466647.5, premrna_ENST00000480309.1, premrna_ENST00000496467.5 or a sequence of Table 3 or complements thereof. In some embodiments, the targeted portion of the INVS pre-mRNA comprises a sequence with at least 80%, 85%, 90%, 95%, 97%, or 100% sequence identity to a region comprising at least 8 contiguous nucleic acids of a sequence selected from the group consisting of SEQ ID NO: 618-SEQ ID NO: 621 or complements thereof. In some embodiments, the targeted portion of the INVS pre-mRNA comprises a sequence that is complementary to at least 8, 9, 10, 11, 12, 13, 14, 15, 16, 17, 18, 19 or 20 contiguous nucleic acids of a sequence of Table 6A or Table 6B or a complement thereof.

[0357] In some embodiments, the ASOs disclosed herein target a NSAE pre-mRNA transcribed from a IRF3 genomic sequence. In some embodiments, the ASO targets a NSAE pre-mRNA transcript from a IRF3 genomic sequence comprising a NSAE exon. In some embodiments, the ASO targets a NSAE pre-mRNA transcript from a IRF3 genomic sequence comprising an intron flanking the 3′ splice site of the NSAE exon and an intron flanking the 5′ splice site of a NSAE exon. In some embodiments, the ASO targets a NSAE pre-mRNA transcript comprising a sequence selected from the group consisting of premrna_ENST00000309877.11, premrna_ENST00000377135.8, premrna_ENST00000377139.8, premrna_ENST00000442265.2, premrna_ENST00000593337.5, premrna_ENST00000593818.5, premrna_ENST00000593922.5, premrna_ENST00000594387.1, premrna_ENST00000595034.5, premrna_ENST00000595240.5, premrna_ENST00000596644.5, premrna_ENST00000596756.5, premrna_ENST00000596765.5, premrna_ENST00000596788.1, premrna_ENST00000596822.5, premrna_ENST00000597180.1, premrna_ENST00000597198.5, premrna_ENST00000597369.1, premrna_ENST00000597636.5, premrna_ENST00000598108.5, premrna_ENST00000598808.5, premrna_ENST00000599144.5, premrna_ENST00000599223.5, premrna_ENST00000599680.1, premrna_ENST00000600022.5, premrna_ENST00000600453.1, premrna_ENST00000600911.5, premrna_ENST00000601291.5, premrna_ENST00000601373.5, premrna_ENST00000601809.5, and premrna_ENST00000602190.1. In some embodiments, the ASO targets a IRF3 pre-mRNA sequence comprising a NSAE exon. In some embodiments, the ASO targets a IRF3 pre-mRNA sequence comprising an intron flanking the 3′ splice site of the NSAE exon. In some embodiments, the ASO targets a IRF3 pre-mRNA sequence comprising an intron flanking the 5′ splice site of the NSAE exon. In some embodiments, the transcript is selected from the group consisting of transcript_ENST00000309877.11, transcript_ENST00000377135.8, transcript_ENST00000377139.8, transcript_ENST00000442265.2, transcript_ENST00000593337.5, transcript_ENST00000593818.5, transcript_ENST00000593922.5, transcript_ENST00000594387.1, transcript_ENST00000595034.5, transcript_ENST00000595240.5, transcript_ENST00000596644.5, transcript_ENST00000596756.5, transcript_ENST00000596765.5, transcript_ENST00000596788.1, transcript_ENST00000596822.5, transcript_ENST00000597180.1, transcript_ENST00000597198.5, transcript_ENST00000597369.1, transcript_ENST00000597636.5, transcript_ENST00000598108.5, transcript_ENST00000598808.5, transcript_ENST00000599144.5, transcript_ENST00000599223.5, transcript_ENST00000599680.1, transcript_ENST00000600022.5, transcript_ENST00000600453.1, transcript_ENST00000600911.5, transcript_ENST00000601291.5, transcript_ENST00000601373.5, transcript_ENST00000601809.5, and transcript_ENST00000602190.1.

[0358] In some embodiments, the IRF3 pre-mRNA transcript is encoded by a genetic sequence with at least about 80%, 85%, 90%, 95%, 96%, 97%, 98%, 99% or 100% sequence identity to the Ensembl reference number ENSG00000126456.16 or a complement thereof. In some embodiments, the IRF3 pre-mRNA transcript comprises a sequence with at least about 80%, 85%, 90%, 95%, 96%, 97%, 98%, 99% or 100% sequence identity to a IRF3 pre-mRNA transcript or a complement thereof described herein.

[0359] In some embodiments, the targeted portion of the IRF3 pre-mRNA comprises a sequence with at least 80%, 85%, 90%, 95%, 97%, or 100% sequence identity to a region comprising at least 8 contiguous nucleic acids of a sequence of premrna_ENST00000309877.11, premrna_ENST00000377135.8, premrna_ENST00000377139.8, premrna_ENST00000442265.2, premrna_ENST00000593337.5, premrna_ENST00000593818.5, premrna_ENST00000593922.5, premrna_ENST00000594387.1, premrna_ENST00000595034.5, premrna_ENST00000595240.5, premrna_ENST00000596644.5, premrna_ENST00000596756.5, premrna_ENST00000596765.5, premrna_ENST00000596788.1, premrna_ENST00000596822.5, premrna_ENST00000597180.1, premrna_ENST00000597198.5, premrna_ENST00000597369.1, premrna_ENST00000597636.5, premrna_ENST00000598108.5, premrna_ENST00000598808.5, premrna_ENST00000599144.5, premrna_ENST00000599223.5, premrna_ENST00000599680.1, premrna_ENST00000600022.5, premrna_ENST00000600453.1, premrna_ENST00000600911.5, premrna_ENST00000601291.5, premrna_ENST00000601373.5, premrna_ENST00000601809.5, premrna_ENST00000602190.1 or a sequence of Table 3 or complements thereof. In some embodiments, the targeted portion of the IRF3 pre-mRNA comprises a sequence with at least 80%, 85%, 90%, 95%, 97%, or 100% sequence identity to a region comprising at least 8 contiguous nucleic acids of a sequence selected from the group consisting of SEQ ID NO: 622-SEQ ID NO: 627 or complements thereof. In some embodiments, the targeted portion of the IRF3 pre-mRNA comprises a sequence that is complementary to at least 8, 9, 10, 11, 12, 13, 14, 15, 16, 17, 18, 19 or 20 contiguous nucleic acids of a sequence of Table 6A or Table 6B or a complement thereof.

[0360] In some embodiments, the ASOs disclosed herein target a NSAE pre-mRNA transcribed from a KCTD3 genomic sequence. In some embodiments, the ASO targets a NSAE pre-mRNA transcript from a KCTD3 genomic sequence comprising a NSAE exon. In some embodiments, the ASO targets a NSAE pre-mRNA transcript from a KCTD3 genomic sequence comprising an intron flanking the 3′ splice site of the NSAE exon and an intron flanking the 5′ splice site of a NSAE exon. In some embodiments, the ASO targets a NSAE pre-mRNA transcript comprising a sequence selected from the group consisting of premrna_ENST00000259154.9, premrna_ENST00000448333.1, premrna_ENST00000452413.1, premrna_ENST00000465650.1, and premrna_ENST00000495537.1. In some embodiments, the ASO targets a KCTD3 pre-mRNA sequence comprising a NSAE exon. In some embodiments, the ASO targets a KCTD3 pre-mRNA sequence comprising an intron flanking the 3′ splice site of the NSAE exon. In some embodiments, the ASO targets a KCTD3 pre-mRNA sequence comprising an intron flanking the 5′ splice site of the NSAE exon. In some embodiments, the transcript is selected from the group consisting of transcript_ENST00000259154.9, transcript_ENST00000448333.1, transcript_ENST00000452413.1, transcript_ENST00000465650.1, and transcript_ENST00000495537.1.

[0361] In some embodiments, the KCTD3 pre-mRNA transcript is encoded by a genetic sequence with at least about 80%, 85%, 90%, 95%, 96%, 97%, 98%, 99% or 100% sequence identity to the Ensembl reference number ENSG00000136636.13 or a complement thereof. In some embodiments, the KCTD3 pre-mRNA transcript comprises a sequence with at least about 80%, 85%, 90%, 95%, 96%, 97%, 98%, 99% or 100% sequence identity to a KCTD3 pre-mRNA transcript or a complement thereof described herein.

[0362] In some embodiments, the targeted portion of the KCTD3 pre-mRNA comprises a sequence with at least 80%, 85%, 90%, 95%, 97%, or 100% sequence identity to a region comprising at least 8 contiguous nucleic acids of a sequence of premrna_ENST00000259154.9, premrna_ENST00000448333.1, premrna_ENST00000452413.1, premrna_ENST00000465650.1, premrna_ENST00000495537.1 or a sequence of Table 3 or complements thereof. In some embodiments, the targeted portion of the KCTD3 pre-mRNA comprises a sequence with at least 80%, 85%, 90%, 95%, 97%, or 100% sequence identity to a region comprising at least 8 contiguous nucleic acids of a sequence selected from the group consisting of SEQ ID NO: 628-SEQ ID NO: 631 or complements thereof. In some embodiments, the targeted portion of the KCTD3 pre-mRNA comprises a sequence that is complementary to at least 8, 9, 10, 11, 12, 13, 14, 15, 16, 17, 18, 19 or 20 contiguous nucleic acids of a sequence of Table 6A or Table 6B or a complement thereof.

[0363] In some embodiments, the ASOs disclosed herein target a NSAE pre-mRNA transcribed from a KLKB1 genomic sequence. In some embodiments, the ASO targets a NSAE pre-mRNA transcript from a KLKB1 genomic sequence comprising a NSAE exon. In some embodiments, the ASO targets a NSAE pre-mRNA transcript from a KLKB1 genomic sequence comprising an intron flanking the 3′ splice site of the NSAE exon and an intron flanking the 5′ splice site of a NSAE exon. In some embodiments, the ASO targets a NSAE pre-mRNA transcript comprising a sequence selected from the group consisting of premrna_ENST00000264690.11, premrna_ENST00000428196.5, premrna_ENST00000446598.6, premrna_ENST00000467271.1, premrna_ENST00000511406.5, premma_ENST00000511608.5, and premrna_ENST00000513864.2. In some embodiments, the ASO targets a KLKB1 pre-mRNA sequence comprising a NSAE exon. In some embodiments, the ASO targets a KLKB1 pre-mRNA sequence comprising an intron flanking the 3′ splice site of the NSAE exon. In some embodiments, the ASO targets a KLKB1 pre-mRNA sequence comprising an intron flanking the 5′ splice site of the NSAE exon. In some embodiments, the transcript is selected from the group consisting of transcript_ENST00000264690.11, transcript_ENST00000428196.5, transcript_ENST00000446598.6, transcript_ENST00000467271.1, transcript_ENST00000511406.5, transcript_ENST00000511608.5, and transcript_ENST00000513864.2.

[0364] In some embodiments, the KLKB1 pre-mRNA transcript is encoded by a genetic sequence with at least about 80%, 85%, 90%, 95%, 96%, 97%, 98%, 99% or 100% sequence identity to the Ensembl reference number ENSG00000164344.16 or a complement thereof. In some embodiments, the KLKB1 pre-mRNA transcript comprises a sequence with at least about 80%, 85%, 90%, 95%, 96%, 97%, 98%, 99% or 100% sequence identity to a KLKB1 pre-mRNA transcript or a complement thereof described herein.

[0365] In some embodiments, the targeted portion of the KLKB1 pre-mRNA comprises a sequence with at least 80%, 85%, 90%, 95%, 97%, or 100% sequence identity to a region comprising at least 8 contiguous nucleic acids of a sequence of premrna_ENST00000264690.11, premrna_ENST00000428196.5, premrna_ENST00000446598.6, premrna_ENST00000467271.1, premrna_ENST00000511406.5, premrna_ENST00000511608.5, premrna_ENST00000513864.2 or a sequence of Table 3 or complements thereof. In some embodiments, the targeted portion of the KLKB1 pre-mRNA comprises a sequence with at least 80%, 85%, 90%, 95%, 97%, or 100% sequence identity to a region comprising at least 8 contiguous nucleic acids of a sequence selected from the group consisting of SEQ ID NO: 632-SEQ ID NO: 635 or complements thereof. In some embodiments, the targeted portion of the KLKB1 pre-mRNA comprises a sequence that is complementary to at least 8, 9, 10, 11, 12, 13, 14, 15, 16, 17, 18, 19 or 20 contiguous nucleic acids of a sequence of Table 6A or Table 6B or a complement thereof.

[0366] In some embodiments, the ASOs disclosed herein target a NSAE pre-mRNA transcribed from a KYAT1 genomic sequence. In some embodiments, the ASO targets a NSAE pre-mRNA transcript from a KYAT1 genomic sequence comprising a NSAE exon. In some embodiments, the ASO targets a NSAE pre-mRNA transcript from a KYAT1 genomic sequence comprising an intron flanking the 3′ splice site of the NSAE exon and an intron flanking the 5′ splice site of a NSAE exon. In some embodiments, the ASO targets a NSAE pre-mRNA transcript comprising a sequence selected from the group consisting of premrna_ENST00000302586.8, premrna_ENST00000320665.10, premrna_ENST00000416084.5, premrna_ENST00000427720.1, premrna_ENST00000436267.7, premrna_ENST00000451800.5, premrna_ENST00000462722.5, premrna_ENST00000466418.1, premrna_ENST00000474824.1, and premrna_ENST00000483599.5. In some embodiments, the ASO targets a KYAT1 pre-mRNA sequence comprising a NSAE exon. In some embodiments, the ASO targets a KYAT1 pre-mRNA sequence comprising an intron flanking the 3′ splice site of the NSAE exon. In some embodiments, the ASO targets a KYAT1 pre-mRNA sequence comprising an intron flanking the 5′ splice site of the NSAE exon. In some embodiments, the transcript is selected from the group consisting of transcript_ENST00000302586.8, transcript_ENST00000320665.10, transcript_ENST00000416084.5, transcript_ENST00000427720.1, transcript_ENST00000436267.7, transcript_ENST00000451800.5, transcript_ENST00000462722.5, transcript_ENST00000466418.1, transcript_ENST00000474824.1, and transcript_ENST00000483599.5.

[0367] In some embodiments, the KYAT1 pre-mRNA transcript is encoded by a genetic sequence with at least about 80%, 85%, 90%, 95%, 96%, 97%, 98%, 99% or 100% sequence identity to the Ensembl reference number ENSG00000171097.14 or a complement thereof. In some embodiments, the KYAT1 pre-mRNA transcript comprises a sequence with at least about 80%, 85%, 90%, 95%, 96%, 97%, 98%, 99% or 100% sequence identity to a KYAT1 pre-mRNA transcript or a complement thereof described herein.

[0368] In some embodiments, the targeted portion of the KYAT1 pre-mRNA comprises a sequence with at least 80%, 85%, 90%, 95%, 97%, or 100% sequence identity to a region comprising at least 8 contiguous nucleic acids of a sequence of premrna_ENST00000302586.8, premrna_ENST00000320665.10, premrna_ENST00000416084.5, premrna_ENST00000427720.1, premrna_ENST00000436267.7, premrna_ENST00000451800.5, premrna_ENST00000462722.5, premrna_ENST00000466418.1, premrna_ENST00000474824.1, premrna_ENST00000483599.5 or a sequence of Table 3 or complements thereof. In some embodiments, the targeted portion of the KYAT1 pre-mRNA comprises a sequence with at least 80%, 85%, 90%, 95%, 97%, or 100% sequence identity to a region comprising at least 8 contiguous nucleic acids of a sequence selected from the group consisting of SEQ ID NO: 636-SEQ ID NO: 641 or complements thereof. In some embodiments, the targeted portion of the KYAT1 pre-mRNA comprises a sequence that is complementary to at least 8, 9, 10, 11, 12, 13, 14, 15, 16, 17, 18, 19 or 20 contiguous nucleic acids of a sequence of Table 6A or Table 6B or a complement thereof.

[0369] In some embodiments, the ASOs disclosed herein target a NSAE pre-mRNA transcribed from a LAMC3 genomic sequence. In some embodiments, the ASO targets a NSAE pre-mRNA transcript from a LAMC3 genomic sequence comprising a NSAE exon. In some embodiments, the ASO targets a NSAE pre-mRNA transcript from a LAMC3 genomic sequence comprising an intron flanking the 3′ splice site of the NSAE exon and an intron flanking the 5′ splice site of a NSAE exon. In some embodiments, the ASO targets a NSAE pre-mRNA transcript comprising a sequence selected from the group consisting of premrna_ENST00000355452.5, premrna_ENST00000361069.9, premrna_ENST00000462567.1, and premrna_ENST00000480883.1. In some embodiments, the ASO targets a LAMC3 pre-mRNA sequence comprising a NSAE exon. In some embodiments, the ASO targets a LAMC3 pre-mRNA sequence comprising an intron flanking the 3′ splice site of the NSAE exon. In some embodiments, the ASO targets a LAMC3 pre-mRNA sequence comprising an intron flanking the 5′ splice site of the NSAE exon. In some embodiments, the transcript is selected from the group consisting of transcript_ENST00000355452.5, transcript_ENST00000361069.9, transcript_ENST00000462567.1, and transcript_ENST00000480883.1.

[0370] In some embodiments, the LAMC3 pre-mRNA transcript is encoded by a genetic sequence with at least about 80%, 85%, 90%, 95%, 96%, 97%, 98%, 99% or 100% sequence identity to the Ensembl reference number ENSG00000050555.18 or a complement thereof. In some embodiments, the LAMC3 pre-mRNA transcript comprises a sequence with at least about 80%, 85%, 90%, 95%, 96%, 97%, 98%, 99% or 100% sequence identity to a LAMC3 pre-mRNA transcript or a complement thereof described herein.

[0371] In some embodiments, the targeted portion of the LAMC3 pre-mRNA comprises a sequence with at least 80%, 85%, 90%, 95%, 97%, or 100% sequence identity to a region comprising at least 8 contiguous nucleic acids of a sequence of premrna_ENST00000355452.5, premrna_ENST00000361069.9, premrna_ENST00000462567.1, premrna_ENST00000480883.1 or a sequence of Table 3 or complements thereof. In some embodiments, the targeted portion of the LAMC3 pre-mRNA comprises a sequence with at least 80%, 85%, 90%, 95%, 97%, or 100% sequence identity to a region comprising at least 8 contiguous nucleic acids of a sequence selected from the group consisting of SEQ ID NO: 642-SEQ ID NO: 647 or complements thereof. In some embodiments, the targeted portion of the LAMC3 pre-mRNA comprises a sequence that is complementary to at least 8, 9, 10, 11, 12, 13, 14, 15, 16, 17, 18, 19 or 20 contiguous nucleic acids of a sequence of Table 6A or Table 6B or a complement thereof.

[0372] In some embodiments, the ASOs disclosed herein target a NSAE pre-mRNA transcribed from a LDAH genomic sequence. In some embodiments, the ASO targets a NSAE pre-mRNA transcript from a LDAH genomic sequence comprising a NSAE exon. In some embodiments, the ASO targets a NSAE pre-mRNA transcript from a LDAH genomic sequence comprising an intron flanking the 3′ splice site of the NSAE exon and an intron flanking the 5′ splice site of a NSAE exon. In some embodiments, the ASO targets a NSAE pre-mRNA transcript comprising a sequence selected from the group consisting of premrna_ENST00000237822.8, premrna_ENST00000381090.7, premrna_ENST00000402479.6, premrna_ENST00000403006.6, premrna_ENST00000412261.5, premrna_ENST00000419825.2, premrna_ENST00000432947.1, premrna_ENST00000435420.6, premrna_ENST00000440866.6, premrna_ENST00000470099.1, premrna_ENST00000541941.5, premrna_ENST00000619656.4, and premrna_ENST00000626491.2. In some embodiments, the ASO targets a LDAH pre-mRNA sequence comprising a NSAE exon. In some embodiments, the ASO targets a LDAH pre-mRNA sequence comprising an intron flanking the 3′ splice site of the NSAE exon. In some embodiments, the ASO targets a LDAH pre-mRNA sequence comprising an intron flanking the 5′ splice site of the NSAE exon. In some embodiments, the transcript is selected from the group consisting of transcript_ENST00000237822.8, transcript_ENST00000381090.7, transcript_ENST00000402479.6, transcript_ENST00000403006.6, transcript_ENST00000412261.5, transcript_ENST00000419825.2, transcript_ENST00000432947.1, transcript_ENST00000435420.6, transcript_ENST00000440866.6, transcript_ENST00000470099.1, transcript_ENST00000541941.5, transcript_ENST00000619656.4, and transcript_ENST00000626491.2.

[0373] In some embodiments, the LDAH pre-mRNA transcript is encoded by a genetic sequence with at least about 80%, 85%, 90%, 95%, 96%, 97%, 98%, 99% or 100% sequence identity to the Ensembl reference number ENSG00000118961.15 or a complement thereof. In some embodiments, the LDAH pre-mRNA transcript comprises a sequence with at least about 80%, 85%, 90%, 95%, 96%, 97%, 98%, 99% or 100% sequence identity to a LDAH pre-mRNA transcript or a complement thereof described herein.

[0374] In some embodiments, the targeted portion of the LDAH pre-mRNA comprises a sequence with at least 80%, 85%, 90%, 95%, 97%, or 100% sequence identity to a region comprising at least 8 contiguous nucleic acids of a sequence of premrna_ENST00000237822.8, premrna_ENST00000381090.7, premrna_ENST00000402479.6, premrna_ENST00000403006.6, premrna_ENST00000412261.5, premrna_ENST00000419825.2, premrna_ENST00000432947.1, premrna_ENST00000435420.6, premrna_ENST00000440866.6, premrna_ENST00000470099.1, premrna_ENST00000541941.5, premrna_ENST00000619656.4, premrna_ENST00000626491.2 or a sequence of Table 3 or complements thereof. In some embodiments, the targeted portion of the LDAH pre-mRNA comprises a sequence with at least 80%, 85%, 90%, 95%, 97%, or 100% sequence identity to a region comprising at least 8 contiguous nucleic acids of a sequence selected from the group consisting of SEQ ID NO: 648-SEQ ID NO: 651 or complements thereof. In some embodiments, the targeted portion of the LDAH pre-mRNA comprises a sequence that is complementary to at least 8, 9, 10, 11, 12, 13, 14, 15, 16, 17, 18, 19 or 20 contiguous nucleic acids of a sequence of Table 6A or Table 6B or a complement thereof.

[0375] In some embodiments, the ASOs disclosed herein target a NSAE pre-mRNA transcribed from a LIMS2 genomic sequence. In some embodiments, the ASO targets a NSAE pre-mRNA transcript from a LIMS2 genomic sequence comprising a NSAE exon. In some embodiments, the ASO targets a NSAE pre-mRNA transcript from a LIMS2 genomic sequence comprising an intron flanking the 3′ splice site of the NSAE exon and an intron flanking the 5′ splice site of a NSAE exon. In some embodiments, the ASO targets a NSAE pre-mRNA transcript comprising a sequence selected from the group consisting of premrna_ENST00000324938.9, premrna_ENST00000355119.8, premrna_ENST00000409254.1, premrna_ENST00000409286.5, premrna_ENST00000409455.5, premrna_ENST00000409754.5, premrna_ENST00000409808.6, premrna_ENST00000410011.5, premrna_ENST00000410038.5, premrna_ENST00000413578.5, premrna_ENST00000426981.5, premrna_ENST00000466410.5, premrna_ENST00000469300.6, premrna_ENST00000476932.5, premrna_ENST00000484252.5, premrna_ENST00000494613.5, premrna_ENST00000545738.6, and premrna_ENST00000582671.1. In some embodiments, the ASO targets a LIMS2 pre-mRNA sequence comprising a NSAE exon. In some embodiments, the ASO targets a LIMS2 pre-mRNA sequence comprising an intron flanking the 3′ splice site of the NSAE exon. In some embodiments, the ASO targets a LIMS2 pre-mRNA sequence comprising an intron flanking the 5′ splice site of the NSAE exon. In some embodiments, the transcript is selected from the group consisting of transcript_ENST00000324938.9, transcript_ENST00000355119.8, transcript_ENST00000409254.1, transcript_ENST00000409286.5, transcript_ENST00000409455.5, transcript_ENST00000409754.5, transcript_ENST00000409808.6, transcript_ENST00000410011.5, transcript_ENST00000410038.5, transcript_ENST00000413578.5, transcript_ENST00000426981.5, transcript_ENST00000466410.5, transcript_ENST00000469300.6, transcript_ENST00000476932.5, transcript_ENST00000484252.5, transcript_ENST00000494613.5, transcript_ENST00000545738.6, and transcript_ENST00000582671.1.

[0376] In some embodiments, the LIMS2 pre-mRNA transcript is encoded by a genetic sequence with at least about 80%, 85%, 90%, 95%, 96%, 97%, 98%, 99% or 100% sequence identity to the Ensembl reference number ENSG00000072163.19 or a complement thereof. In some embodiments, the LIMS2 pre-mRNA transcript comprises a sequence with at least about 80%, 85%, 90%, 95%, 96%, 97%, 98%, 99% or 100% sequence identity to a LIMS2 pre-mRNA transcript or a complement thereof described herein.

[0377] In some embodiments, the targeted portion of the LIMS2 pre-mRNA comprises a sequence with at least 80%, 85%, 90%, 95%, 97%, or 100% sequence identity to a region comprising at least 8 contiguous nucleic acids of a sequence of premrna_ENST00000324938.9, premrna_ENST00000355119.8, premrna_ENST00000409254.1, premrna_ENST00000409286.5, premrna_ENST00000409455.5, premrna_ENST00000409754.5, premrna_ENST00000409808.6, premrna_ENST00000410011.5, premrna_ENST00000410038.5, premrna_ENST00000413578.5, premrna_ENST00000426981.5, premrna_ENST00000466410.5, premrna_ENST00000469300.6, premrna_ENST00000476932.5, premrna_ENST00000484252.5, premrna_ENST00000494613.5, premrna_ENST00000545738.6, premrna_ENST00000582671.1 or a sequence of Table 3 or complements thereof. In some embodiments, the targeted portion of the LIMS2 pre-mRNA comprises a sequence with at least 80%, 85%, 90%, 95%, 97%, or 100% sequence identity to a region comprising at least 8 contiguous nucleic acids of a sequence selected from the group consisting of SEQ ID NO: 652-SEQ ID NO: 659 or complements thereof. In some embodiments, the targeted portion of the LIMS2 pre-mRNA comprises a sequence that is complementary to at least 8, 9, 10, 11, 12, 13, 14, 15, 16, 17, 18, 19 or 20 contiguous nucleic acids of a sequence of Table 6A or Table 6B or a complement thereof.

[0378] In some embodiments, the ASOs disclosed herein target a NSAE pre-mRNA transcribed from a MALT1 genomic sequence. In some embodiments, the ASO targets a NSAE pre-mRNA transcript from a MALT1 genomic sequence comprising a NSAE exon. In some embodiments, the ASO targets a NSAE pre-mRNA transcript from a MALT1 genomic sequence comprising an intron flanking the 3′ splice site of the NSAE exon and an intron flanking the 5′ splice site of a NSAE exon. In some embodiments, the ASO targets a NSAE pre-mRNA transcript comprising a sequence selected from the group consisting of premrna_ENST00000345724.7, premrna_ENST00000587438.1, premrna_ENST00000589873.5, premrna_ENST00000591792.1, premrna_ENST00000648670.1, premrna_ENST00000649125.1, premrna_ENST00000649202.1, premrna_ENST00000649217.2, premrna_ENST00000649756.1, premrna_ENST00000650045.1, and premrna_ENST00000650355.1. In some embodiments, the ASO targets a MALT1 pre-mRNA sequence comprising a NSAE exon. In some embodiments, the ASO targets a MALT1 pre-mRNA sequence comprising an intron flanking the 3′ splice site of the NSAE exon. In some embodiments, the ASO targets a MALT1 pre-mRNA sequence comprising an intron flanking the 5′ splice site of the NSAE exon. In some embodiments, the transcript is selected from the group consisting of transcript_ENST00000345724.7, transcript_ENST00000587438.1, transcript_ENST00000589873.5, transcript_ENST00000591792.1, transcript_ENST00000648670.1, transcript_ENST00000649125.1, transcript_ENST00000649202.1, transcript_ENST00000649217.2, transcript_ENST00000649756.1, transcript_ENST00000650045.1, and transcript_ENST00000650355.1.

[0379] In some embodiments, the MALT1 pre-mRNA transcript is encoded by a genetic sequence with at least about 80%, 85%, 90%, 95%, 96%, 97%, 98%, 99% or 100% sequence identity to the Ensembl reference number ENSG00000172175.15 or a complement thereof. In some embodiments, the MALT1 pre-mRNA transcript comprises a sequence with at least about 80%, 85%, 90%, 95%, 96%, 97%, 98%, 99% or 100% sequence identity to a MALT1 pre-mRNA transcript or a complement thereof described herein.

[0380] In some embodiments, the targeted portion of the MALT1 pre-mRNA comprises a sequence with at least 80%, 85%, 90%, 95%, 97%, or 100% sequence identity to a region comprising at least 8 contiguous nucleic acids of a sequence of premrna_ENST00000345724.7, premrna_ENST00000587438.1, premrna_ENST00000589873.5, premrna_ENST00000591792.1, premrna_ENST00000648670.1, premrna_ENST00000649125.1, premrna_ENST00000649202.1, premrna_ENST00000649217.2, premrna_ENST00000649756.1, premrna_ENST00000650045.1, premrna_ENST00000650355.1, or a sequence of Table 3 or complements thereof. In some embodiments, the targeted portion of the MALT1 pre-mRNA comprises a sequence with at least 80%, 85%, 90%, 95%, 97%, or 100% sequence identity to a region comprising at least 8 contiguous nucleic acids of a sequence selected from the group consisting of SEQ ID NO: 660-SEQ ID NO: 663 or complements thereof. In some embodiments, the targeted portion of the MALT1 pre-mRNA comprises a sequence that is complementary to at least 8, 9, 10, 11, 12, 13, 14, 15, 16, 17, 18, 19 or 20 contiguous nucleic acids of a sequence of Table 6A or Table 6B or a complement thereof.

[0381] In some embodiments, the ASOs disclosed herein target a NSAE pre-mRNA transcribed from a MAP3K7 genomic sequence. In some embodiments, the ASO targets a NSAE pre-mRNA transcript from a MAP3K7 genomic sequence comprising a NSAE exon. In some embodiments, the ASO targets a NSAE pre-mRNA transcript from a MAP3K7 genomic sequence comprising an intron flanking the 3′ splice site of the NSAE exon and an intron flanking the 5′ splice site of a NSAE exon. In some embodiments, the ASO targets a NSAE pre-mRNA transcript comprising a sequence selected from the group consisting of premrna_ENST00000369320.1, premrna_ENST00000369325.7, premrna_ENST00000369327.7, premrna_ENST00000369329.8, premrna_ENST00000369332.7, and premrna_ENST00000479630.1. In some embodiments, the ASO targets a MAP3K7 pre-mRNA sequence comprising a NSAE exon. In some embodiments, the ASO targets a MAP3K7 pre-mRNA sequence comprising an intron flanking the 3′ splice site of the NSAE exon. In some embodiments, the ASO targets a MAP3K7 pre-mRNA sequence comprising an intron flanking the 5′ splice site of the NSAE exon. In some embodiments, the transcript is selected from the group consisting of transcript_ENST00000369320.1, transcript_ENST00000369325.7, transcript_ENST00000369327.7, transcript_ENST00000369329.8, transcript_ENST00000369332.7, and transcript_ENST00000479630.1.

[0382] In some embodiments, the MAP3K7 pre-mRNA transcript is encoded by a genetic sequence with at least about 80%, 85%, 90%, 95%, 96%, 97%, 98%, 99% or 100% sequence identity to the Ensembl reference number ENSG00000135341.18 or a complement thereof. In some embodiments, the MAP3K7 pre-mRNA transcript comprises a sequence with at least about 80%, 85%, 90%, 95%, 96%, 97%, 98%, 99% or 100% sequence identity to a MAP3K7 pre-mRNA transcript or a complement thereof described herein.

[0383] In some embodiments, the targeted portion of the MAP3K7 pre-mRNA comprises a sequence with at least 80%, 85%, 90%, 95%, 97%, or 100% sequence identity to a region comprising at least 8 contiguous nucleic acids of a sequence of premrna_ENST00000369320.1, premrna_ENST00000369325.7, premrna_ENST00000369327.7, premrna_ENST00000369329.8, premrna_ENST00000369332.7, premrna_ENST00000479630.1 or a sequence of Table 3 or complements thereof. In some embodiments, the targeted portion of the MAP3K7 pre-mRNA comprises a sequence with at least 80%, 85%, 90%, 95%, 97%, or 100% sequence identity to a region comprising at least 8 contiguous nucleic acids of a sequence selected from the group consisting of SEQ ID NO: 664-SEQ ID NO: 667 or complements thereof. In some embodiments, the targeted portion of the MAP3K7 pre-mRNA comprises a sequence that is complementary to at least 8, 9, 10, 11, 12, 13, 14, 15, 16, 17, 18, 19 or 20 contiguous nucleic acids of a sequence of Table 6A or Table 6B or a complement thereof.

[0384] In some embodiments, the ASOs disclosed herein target a NSAE pre-mRNA transcribed from a MAPK13 genomic sequence. In some embodiments, the ASO targets a NSAE pre-mRNA transcript from a MAPK13 genomic sequence comprising a NSAE exon. In some embodiments, the ASO targets a NSAE pre-mRNA transcript from a MAPK13 genomic sequence comprising an intron flanking the 3′ splice site of the NSAE exon and an intron flanking the 5′ splice site of a NSAE exon. In some embodiments, the ASO targets a NSAE pre-mRNA transcript comprising a sequence selected from the group consisting of premrna_ENST00000211287.9, premrna_ENST00000373759.1, premrna_ENST00000373766.9, premrna_ENST00000476951.5, and premrna_ENST00000490334.1. In some embodiments, the ASO targets a MAPK13 pre-mRNA sequence comprising a NSAE exon. In some embodiments, the ASO targets a MAPK13 pre-mRNA sequence comprising an intron flanking the 3′ splice site of the NSAE exon. In some embodiments, the ASO targets a MAPK13 pre-mRNA sequence comprising an intron flanking the 5′ splice site of the NSAE exon. In some embodiments, the transcript is selected from the group consisting of transcript_ENST00000211287.9, transcript_ENST00000373759.1, transcript_ENST00000373766.9, transcript_ENST00000476951.5, and transcript_ENST00000490334.1.

[0385] In some embodiments, the MAPK13 pre-mRNA transcript is encoded by a genetic sequence with at least about 80%, 85%, 90%, 95%, 96%, 97%, 98%, 99% or 100% sequence identity to the Ensembl reference number ENSG00000156711.17 or a complement thereof. In some embodiments, the MAPK13 pre-mRNA transcript comprises a sequence with at least about 80%, 85%, 90%, 95%, 96%, 97%, 98%, 99% or 100% sequence identity to a MAPK13 pre-mRNA transcript or a complement thereof described herein.

[0386] In some embodiments, the targeted portion of the MAPK13 pre-mRNA comprises a sequence with at least 80%, 85%, 90%, 95%, 97%, or 100% sequence identity to a region comprising at least 8 contiguous nucleic acids of a sequence of premrna_ENST00000211287.9, premrna_ENST00000373759.1, premrna_ENST00000373766.9, premrna_ENST00000476951.5, premrna_ENST00000490334.1 or a sequence of Table 3 or complements thereof. In some embodiments, the targeted portion of the MAPK13 pre-mRNA comprises a sequence with at least 80%, 85%, 90%, 95%, 97%, or 100% sequence identity to a region comprising at least 8 contiguous nucleic acids of a sequence selected from the group consisting of SEQ ID NO: 668-SEQ ID NO: 675 or complements thereof. In some embodiments, the targeted portion of the MAPK13 pre-mRNA comprises a sequence that is complementary to at least 8, 9, 10, 11, 12, 13, 14, 15, 16, 17, 18, 19 or 20 contiguous nucleic acids of a sequence of Table 6A or Table 6B or a complement thereof.

[0387] In some embodiments, the ASOs disclosed herein target a NSAE pre-mRNA transcribed from a MCAT genomic sequence. In some embodiments, the ASO targets a NSAE pre-mRNA transcript from a MCAT genomic sequence comprising a NSAE exon. In some embodiments, the ASO targets a NSAE pre-mRNA transcript from a MCAT genomic sequence comprising an intron flanking the 3′ splice site of the NSAE exon and an intron flanking the 5′ splice site of a NSAE exon. In some embodiments, the ASO targets a NSAE pre-mRNA transcript comprising a sequence selected from the group consisting of premrna_ENST00000290429.11, premrna_ENST00000327555.5, premrna_ENST00000464244.1, and premrna_ENST00000608052.1. In some embodiments, the ASO targets a MCAT pre-mRNA sequence comprising a NSAE exon. In some embodiments, the ASO targets a MCAT pre-mRNA sequence comprising an intron flanking the 3′ splice site of the NSAE exon. In some embodiments, the ASO targets a MCAT pre-mRNA sequence comprising an intron flanking the 5′ splice site of the NSAE exon. In some embodiments, the transcript is selected from the group consisting of transcript_ENST00000290429.11, transcript_ENST00000327555.5, transcript_ENST00000464244.1, and transcript_ENST00000608052.1.

[0388] In some embodiments, the MCAT pre-mRNA transcript is encoded by a genetic sequence with at least about 80%, 85%, 90%, 95%, 96%, 97%, 98%, 99% or 100% sequence identity to the Ensembl reference number ENSG00000100294.13 or a complement thereof. In some embodiments, the MCAT pre-mRNA transcript comprises a sequence with at least about 80%, 85%, 90%, 95%, 96%, 97%, 98%, 99% or 100% sequence identity to a MCAT pre-mRNA transcript or a complement thereof described herein.

[0389] In some embodiments, the targeted portion of the MCAT pre-mRNA comprises a sequence with at least 80%, 85%, 90%, 95%, 97%, or 100% sequence identity to a region comprising at least 8 contiguous nucleic acids of a sequence of premrna_ENST00000290429.11, premrna_ENST00000327555.5, premrna_ENST00000464244.1, premrna_ENST00000608052.1 or a sequence of Table 3 or complements thereof. In some embodiments, the targeted portion of the MCAT pre-mRNA comprises a sequence with at least 80%, 85%, 90%, 95%, 97%, or 100% sequence identity to a region comprising at least 8 contiguous nucleic acids of a sequence selected from the group consisting of SEQ ID NO: 676-SEQ ID NO: 683 or complements thereof. In some embodiments, the targeted portion of the MCAT pre-mRNA comprises a sequence that is complementary to at least 8, 9, 10, 11, 12, 13, 14, 15, 16, 17, 18, 19 or 20 contiguous nucleic acids of a sequence of Table 6A or Table 6B or a complement thereof.

[0390] In some embodiments, the ASOs disclosed herein target a NSAE pre-mRNA transcribed from a MCEE genomic sequence. In some embodiments, the ASO targets a NSAE pre-mRNA transcript from a MCEE genomic sequence comprising a NSAE exon. In some embodiments, the ASO targets a NSAE pre-mRNA transcript from a MCEE genomic sequence comprising an intron flanking the 3′ splice site of the NSAE exon and an intron flanking the 5′ splice site of a NSAE exon. In some embodiments, the ASO targets a NSAE pre-mRNA transcript comprising a sequence selected from the group consisting of premrna_ENST00000244217.6, premrna_ENST00000413592.5, premrna_ENST00000462609.2, premrna_ENST00000486135.1, and premrna_ENST00000494660.6. In some embodiments, the ASO targets a MCEE pre-mRNA sequence comprising a NSAE exon. In some embodiments, the ASO targets a MCEE pre-mRNA sequence comprising an intron flanking the 3′ splice site of the NSAE exon. In some embodiments, the ASO targets a MCEE pre-mRNA sequence comprising an intron flanking the 5′ splice site of the NSAE exon. In some embodiments, the transcript is selected from the group consisting of transcript_ENST00000244217.6, transcript_ENST00000413592.5, transcript_ENST00000462609.2, transcript_ENST00000486135.1, and transcript_ENST00000494660.6.

[0391] In some embodiments, the MCEE pre-mRNA transcript is encoded by a genetic sequence with at least about 80%, 85%, 90%, 95%, 96%, 97%, 98%, 99% or 100% sequence identity to the Ensembl reference number ENSG00000124370.11 or a complement thereof. In some embodiments, the MCEE pre-mRNA transcript comprises a sequence with at least about 80%, 85%, 90%, 95%, 96%, 97%, 98%, 99% or 100% sequence identity to a MCEE pre-mRNA transcript or a complement thereof described herein.

[0392] In some embodiments, the targeted portion of the MCEE pre-mRNA comprises a sequence with at least 80%, 85%, 90%, 95%, 97%, or 100% sequence identity to a region comprising at least 8 contiguous nucleic acids of a sequence of premrna_ENST00000244217.6, premrna_ENST00000413592.5, premrna_ENST00000462609.2, premrna_ENST00000486135.1, premrna_ENST00000494660.6 or a sequence of Table 3 or complements thereof. In some embodiments, the targeted portion of the MCEE pre-mRNA comprises a sequence with at least 80%, 85%, 90%, 95%, 97%, or 100% sequence identity to a region comprising at least 8 contiguous nucleic acids of a sequence selected from the group consisting of SEQ ID NO: 684-SEQ ID NO: 689 or complements thereof. In some embodiments, the targeted portion of the MCEE pre-mRNA comprises a sequence that is complementary to at least 8, 9, 10, 11, 12, 13, 14, 15, 16, 17, 18, 19 or 20 contiguous nucleic acids of a sequence of Table 6A or Table 6B or a complement thereof.

[0393] In some embodiments, the ASOs disclosed herein target a NSAE pre-mRNA transcribed from a MPI genomic sequence. In some embodiments, the ASO targets a NSAE pre-mRNA transcript from a MPI genomic sequence comprising a NSAE exon. In some embodiments, the ASO targets a NSAE pre-mRNA transcript from a MPI genomic sequence comprising an intron flanking the 3′ splice site of the NSAE exon and an intron flanking the 5′ splice site of a NSAE exon. In some embodiments, the ASO targets a NSAE pre-mRNA transcript comprising a sequence selected from the group consisting of premrna_ENST00000323744.10, premrna_ENST00000352410.9, premrna_ENST00000535694.5, premrna_ENST00000561470.5, premrna_ENST00000562606.5, premrna_ENST00000562800.5, premrna_ENST00000563422.5, premrna_ENST00000563786.5, premrna_ENST00000564003.5, premrna_ENST00000564633.5, premrna_ENST00000564692.1, premrna_ENST00000565576.5, premrna_ENST00000566377.5, premrna_ENST00000566556.1, premrna_ENST00000567116.5, premrna_ENST00000567132.5, premrna_ENST00000567177.1, premrna_ENST00000567570.5, premrna_ENST00000568303.1, premrna_ENST00000568828.5, premrna_ENST00000568840.1, premrna_ENST00000568907.5, premrna_ENST00000569233.5, and premrna_ENST00000569931.5. In some embodiments, the ASO targets a MPI pre-mRNA sequence comprising a NSAE exon. In some embodiments, the ASO targets a MPI pre-mRNA sequence comprising an intron flanking the 3′ splice site of the NSAE exon. In some embodiments, the ASO targets a MPI pre-mRNA sequence comprising an intron flanking the 5′ splice site of the NSAE exon. In some embodiments, the transcript is selected from the group consisting of transcript_ENST00000323744.10, transcript_ENST00000352410.9, transcript_ENST00000535694.5, transcript_ENST00000561470.5, transcript_ENST00000562606.5, transcript_ENST00000562800.5, transcript_ENST00000563422.5, transcript_ENST00000563786.5, transcript_ENST00000564003.5, transcript_ENST00000564633.5, transcript_ENST00000564692.1, transcript_ENST00000565576.5, transcript_ENST00000566377.5, transcript_ENST00000566556.1, transcript_ENST00000567116.5, transcript_ENST00000567132.5, transcript_ENST00000567177.1, transcript_ENST00000567570.5, transcript_ENST00000568303.1, transcript_ENST00000568828.5, transcript_ENST00000568840.1, transcript_ENST00000568907.5, transcript_ENST00000569233.5, and transcript_ENST00000569931.5.

[0394] In some embodiments, the MPI pre-mRNA transcript is encoded by a genetic sequence with at least about 80%, 85%, 90%, 95%, 96%, 97%, 98%, 99% or 100% sequence identity to the Ensembl reference number ENSG00000178802.18 or a complement thereof. In some embodiments, the MPI pre-mRNA transcript comprises a sequence with at least about 80%, 85%, 90%, 95%, 96%, 97%, 98%, 99% or 100% sequence identity to a MPI pre-mRNA transcript or a complement thereof described herein.

[0395] In some embodiments, the targeted portion of the MPI pre-mRNA comprises a sequence with at least 80%, 85%, 90%, 95%, 97%, or 100% sequence identity to a region comprising at least 8 contiguous nucleic acids of a sequence of premrna_ENST00000323744.10, premrna_ENST00000352410.9, premrna_ENST00000535694.5, premrna_ENST00000561470.5, premrna_ENST00000562606.5, premrna_ENST00000562800.5, premrna_ENST00000563422.5, premrna_ENST00000563786.5, premrna_ENST00000564003.5, premrna_ENST00000564633.5, premrna_ENST00000564692.1, premrna_ENST00000565576.5, premrna_ENST00000566377.5, premrna_ENST00000566556.1, premrna_ENST00000567116.5, premrna_ENST00000567132.5, premrna_ENST00000567177.1, premrna_ENST00000567570.5, premrna_ENST00000568303.1, premrna_ENST00000568828.5, premrna_ENST00000568840.1, premrna_ENST00000568907.5, premrna_ENST00000569233.5, premrna_ENST00000569931.5 or a sequence of Table 3 or complements thereof. In some embodiments, the targeted portion of the MPI pre-mRNA comprises a sequence with at least 80%, 85%, 90%, 95%, 97%, or 100% sequence identity to a region comprising at least 8 contiguous nucleic acids of a sequence selected from the group consisting of SEQ ID NO: 690-SEQ ID NO: 703 or complements thereof. In some embodiments, the targeted portion of the MPI pre-mRNA comprises a sequence that is complementary to at least 8, 9, 10, 11, 12, 13, 14, 15, 16, 17, 18, 19 or 20 contiguous nucleic acids of a sequence of Table 6A or Table 6B or a complement thereof.

[0396] In some embodiments, the ASOs disclosed herein target a NSAE pre-mRNA transcribed from a MSTO1 genomic sequence. In some embodiments, the ASO targets a NSAE pre-mRNA transcript from a MSTO1 genomic sequence comprising a NSAE exon. In some embodiments, the ASO targets a NSAE pre-mRNA transcript from a MSTO1 genomic sequence comprising an intron flanking the 3′ splice site of the NSAE exon and an intron flanking the 5′ splice site of a NSAE exon. In some embodiments, the ASO targets a NSAE pre-mRNA transcript comprising a sequence selected from the group consisting of premrna_ENST00000245564.7, premrna_ENST00000368341.8, premrna_ENST00000460199.5, premrna_ENST00000462250.2, premrna_ENST00000465137.5, premrna_ENST00000466815.1, premrna_ENST00000471209.1, premrna_ENST00000473327.5, premrna_ENST00000475253.5, premrna_ENST00000478756.1, premrna_ENST00000482284.5, premrna_ENST00000483734.5, premrna_ENST00000483832.5, premrna_ENST00000488901.5, premrna_ENST00000490642.5, premrna_ENST00000490743.5, premrna_ENST00000491308.5, premrna_ENST00000494995.5, and premrna_ENST00000649846.1. In some embodiments, the ASO targets a MSTO1 pre-mRNA sequence comprising a NSAE exon. In some embodiments, the ASO targets a MSTO1 pre-mRNA sequence comprising an intron flanking the 3′ splice site of the NSAE exon. In some embodiments, the ASO targets a MSTO1 pre-mRNA sequence comprising an intron flanking the 5′ splice site of the NSAE exon. In some embodiments, the transcript is selected from the group consisting of transcript_ENST00000245564.7, transcript_ENST00000368341.8, transcript_ENST00000460199.5, transcript_ENST00000462250.2, transcript_ENST00000465137.5, transcript_ENST00000466815.1, transcript_ENST00000471209.1, transcript_ENST00000473327.5, transcript_ENST00000475253.5, transcript_ENST00000478756.1, transcript_ENST00000482284.5, transcript_ENST00000483734.5, transcript_ENST00000483832.5, transcript_ENST00000488901.5, transcript_ENST00000490642.5, transcript_ENST00000490743.5, transcript_ENST00000491308.5, transcript_ENST00000494995.5, and transcript_ENST00000649846.1.

[0397] In some embodiments, the MSTO1 pre-mRNA transcript is encoded by a genetic sequence with at least about 80%, 85%, 90%, 95%, 96%, 97%, 98%, 99% or 100% sequence identity to the Ensembl reference number ENSG00000125459.17 or a complement thereof. In some embodiments, the MSTO1 pre-mRNA transcript comprises a sequence with at least about 80%, 85%, 90%, 95%, 96%, 97%, 98%, 99% or 100% sequence identity to a MSTO1 pre-mRNA transcript or a complement thereof described herein.

[0398] In some embodiments, the targeted portion of the MSTO1 pre-mRNA comprises a sequence with at least 80%, 85%, 90%, 95%, 97%, or 100% sequence identity to a region comprising at least 8 contiguous nucleic acids of a sequence of premrna_ENST00000245564.7, premrna_ENST00000368341.8, premrna_ENST00000460199.5, premrna_ENST00000462250.2, premrna_ENST00000465137.5, premrna_ENST00000466815.1, premrna_ENST00000471209.1, premrna_ENST00000473327.5, premrna_ENST00000475253.5, premrna_ENST00000478756.1, premrna_ENST00000482284.5, premrna_ENST00000483734.5, premrna_ENST00000483832.5, premrna_ENST00000488901.5, premrna_ENST00000490642.5, premrna_ENST00000490743.5, premrna_ENST00000491308.5, premrna_ENST00000494995.5, premrna_ENST00000649846.1 or a sequence of Table 3 or complements thereof. In some embodiments, the targeted portion of the MSTO1 pre-mRNA comprises a sequence with at least 80%, 85%, 90%, 95%, 97%, or 100% sequence identity to a region comprising at least 8 contiguous nucleic acids of a sequence selected from the group consisting of SEQ ID NO: 704-SEQ ID NO: 707 or complements thereof. In some embodiments, the targeted portion of the MSTO1 pre-mRNA comprises a sequence that is complementary to at least 8, 9, 10, 11, 12, 13, 14, 15, 16, 17, 18, 19 or 20 contiguous nucleic acids of a sequence of Table 6A or Table 6B or a complement thereof.

[0399] In some embodiments, the ASOs disclosed herein target a NSAE pre-mRNA transcribed from a NBEAL2 genomic sequence. In some embodiments, the ASO targets a NSAE pre-mRNA transcript from a NBEAL2 genomic sequence comprising a NSAE exon. In some embodiments, the ASO targets a NSAE pre-mRNA transcript from a NBEAL2 genomic sequence comprising an intron flanking the 3′ splice site of the NSAE exon and an intron flanking the 5′ splice site of a NSAE exon. In some embodiments, the ASO targets a NSAE pre-mRNA transcript comprising a sequence selected from the group consisting of premrna_ENST00000416683.5, premrna_ENST00000423436.1, premrna_ENST00000441027.5, premrna_ENST00000443829.5, premrna_ENST00000450053.8, premrna_ENST00000461036.1, premrna_ENST00000469349.1, premrna_ENST00000475689.1, premrna_ENST00000476095.5, premrna_ENST00000477412.1, premrna_ENST00000486870.1, premrna_ENST00000651350.1, premrna_ENST00000651450.1, premrna_ENST00000651453.1, premrna_ENST00000651747.1, premrna_ENST00000652242.1, and premrna_ENST00000652744.1.

[0400] In some embodiments, the ASO targets a NBEAL2 pre-mRNA sequence comprising a NSAE exon. In some embodiments, the ASO targets a NBEAL2 pre-mRNA sequence comprising an intron flanking the 3′ splice site of the NSAE exon. In some embodiments, the ASO targets a NBEAL2 pre-mRNA sequence comprising an intron flanking the 5′ splice site of the NSAE exon. In some embodiments, the transcript is selected from the group consisting of transcript_ENST00000416683.5, transcript_ENST00000423436.1, transcript_ENST00000441027.5, transcript_ENST00000443829.5, transcript_ENST00000450053.8, transcript_ENST00000461036.1, transcript_ENST00000469349.1, transcript_ENST00000475689.1, transcript_ENST00000476095.5, transcript_ENST00000477412.1, transcript_ENST00000486870.1, transcript_ENST00000651350.1, transcript_ENST00000651450.1, transcript_ENST00000651453.1, transcript_ENST00000651747.1, transcript_ENST00000652242.1, and transcript_ENST00000652744.1.

[0401] In some embodiments, the NBEAL2 pre-mRNA transcript is encoded by a genetic sequence with at least about 80%, 85%, 90%, 95%, 96%, 97%, 98%, 99% or 100% sequence identity to the Ensembl reference number ENSG00000160796.18 or a complement thereof. In some embodiments, the NBEAL2 pre-mRNA transcript comprises a sequence with at least about 80%, 85%, 90%, 95%, 96%, 97%, 98%, 99% or 100% sequence identity to a NBEAL2 pre-mRNA transcript or a complement thereof described herein.

[0402] In some embodiments, the targeted portion of the NBEAL2 pre-mRNA comprises a sequence with at least 80%, 85%, 90%, 95%, 97%, or 100% sequence identity to a region comprising at least 8 contiguous nucleic acids of a sequence of premrna_ENST00000416683.5, premrna_ENST00000423436.1, premrna_ENST00000441027.5, premrna_ENST00000443829.5, premrna_ENST00000450053.8, premrna_ENST00000461036.1, premrna_ENST00000469349.1, premrna_ENST00000475689.1, premrna_ENST00000476095.5, premrna_ENST00000477412.1, premrna_ENST00000486870.1, premrna_ENST00000651350.1, premrna_ENST00000651450.1, premrna_ENST00000651453.1, premrna_ENST00000651747.1, premrna_ENST00000652242.1, premrna_ENST00000652744.1, or a sequence of Table 3 or complements thereof. In some embodiments, the targeted portion of the NBEAL2 pre-mRNA comprises a sequence with at least 80%, 85%, 90%, 95%, 97%, or 100% sequence identity to a region comprising at least 8 contiguous nucleic acids of a sequence selected from the group consisting of SEQ ID NO: 708-SEQ ID NO: 711 or complements thereof. In some embodiments, the targeted portion of the NBEAL2 pre-mRNA comprises a sequence that is complementary to at least 8, 9, 10, 11, 12, 13, 14, 15, 16, 17, 18, 19 or 20 contiguous nucleic acids of a sequence of Table 6A or Table 6B or a complement thereof.

[0403] In some embodiments, the ASOs disclosed herein target a NSAE pre-mRNA transcribed from a NLE1 genomic sequence. In some embodiments, the ASO targets a NSAE pre-mRNA transcript from a NLE1 genomic sequence comprising a NSAE exon. In some embodiments, the ASO targets a NSAE pre-mRNA transcript from a NLE1 genomic sequence comprising an intron flanking the 3′ splice site of the NSAE exon and an intron flanking the 5′ splice site of a NSAE exon. In some embodiments, the ASO targets a NSAE pre-mRNA transcript comprising a sequence selected from the group consisting of premrna_ENST00000360831.9, premrna_ENST00000442241.9, premrna_ENST00000586869.5, premrna_ENST00000588019.1, premrna_ENST00000588642.1, premrna_ENST00000589367.5, and premrna_ENST00000593176.1. In some embodiments, the ASO targets a NLE1 pre-mRNA sequence comprising a NSAE exon. In some embodiments, the ASO targets a NLE1 pre-mRNA sequence comprising an intron flanking the 3′ splice site of the NSAE exon. In some embodiments, the ASO targets a NLE1 pre-mRNA sequence comprising an intron flanking the 5′ splice site of the NSAE exon. In some embodiments, the transcript is selected from the group consisting of transcript_ENST00000360831.9, transcript_ENST00000442241.9, transcript_ENST00000586869.5, transcript_ENST00000588019.1, transcript_ENST00000588642.1, transcript_ENST00000589367.5, and transcript_ENST00000593176.1.

[0404] In some embodiments, the NLE1 pre-mRNA transcript is encoded by a genetic sequence with at least about 80%, 85%, 90%, 95%, 96%, 97%, 98%, 99% or 100% sequence identity to the Ensembl reference number ENSG00000073536.18 or a complement thereof. In some embodiments, the NLE1 pre-mRNA transcript comprises a sequence with at least about 80%, 85%, 90%, 95%, 96%, 97%, 98%, 99% or 100% sequence identity to a NLE1 pre-mRNA transcript or a complement thereof described herein.

[0405] In some embodiments, the targeted portion of the NLE1 pre-mRNA comprises a sequence with at least 80%, 85%, 90%, 95%, 97%, or 100% sequence identity to a region comprising at least 8 contiguous nucleic acids of a sequence of premrna_ENST00000360831.9, premrna_ENST00000442241.9, premrna_ENST00000586869.5, premrna_ENST00000588019.1, premrna_ENST00000588642.1, premrna_ENST00000589367.5, premrna_ENST00000593176.1, or a sequence of Table 3 or complements thereof. In some embodiments, the targeted portion of the NLE1 pre-mRNA comprises a sequence with at least 80%, 85%, 90%, 95%, 97%, or 100% sequence identity to a region comprising at least 8 contiguous nucleic acids of a sequence selected from the group consisting of SEQ ID NO: 712-SEQ ID NO: 715 or complements thereof. In some embodiments, the targeted portion of the NLE1 pre-mRNA comprises a sequence that is complementary to at least 8, 9, 10, 11, 12, 13, 14, 15, 16, 17, 18, 19 or 20 contiguous nucleic acids of a sequence of Table 6A or Table 6B or a complement thereof.

[0406] In some embodiments, the ASOs disclosed herein target a NSAE pre-mRNA transcribed from a NLRC5 genomic sequence. In some embodiments, the ASO targets a NSAE pre-mRNA transcript from a NLRC5 genomic sequence comprising a NSAE exon. In some embodiments, the ASO targets a NSAE pre-mRNA transcript from a NLRC5 genomic sequence comprising an intron flanking the 3′ splice site of the NSAE exon and an intron flanking the 5′ splice site of a NSAE exon. In some embodiments, the ASO targets a NSAE pre-mRNA transcript comprising a sequence selected from the group consisting of premrna_ENST00000262510.10, premrna_ENST00000399221.3, premrna_ENST00000436936.5, premrna_ENST00000534927.5, premrna_ENST00000534931.1, premrna_ENST00000535284.1, premrna_ENST00000535658.1, premrna_ENST00000536231.1, premrna_ENST00000537056.5, premrna_ENST00000538059.5, premrna_ENST00000538110.5, premrna_ENST00000538273.5, premrna_ENST00000538453.5, premrna_ENST00000538778.5, premrna_ENST00000538805.5, premrna_ENST00000538930.5, premrna_ENST00000539144.5, premrna_ENST00000539881.5, premrna_ENST00000540182.5, premrna_ENST00000541020.1, premrna_ENST00000543030.5, premrna_ENST00000543049.1, premrna_ENST00000543103.1, premrna_ENST00000543141.5, premrna_ENST00000543402.1, premrna_ENST00000544189.1, premrna_ENST00000544641.5, premrna_ENST00000545081.5, and premrna_ENST00000545349.1. In some embodiments, the ASO targets a NLRC5 pre-mRNA sequence comprising a NSAE exon. In some embodiments, the ASO targets a NLRC5 pre-mRNA sequence comprising an intron flanking the 3′ splice site of the NSAE exon. In some embodiments, the ASO targets a NLRC5 pre-mRNA sequence comprising an intron flanking the 5′ splice site of the NSAE exon. In some embodiments, the transcript is selected from the group consisting of transcript_ENST00000262510.10, transcript_ENST00000399221.3, transcript_ENST00000436936.5, transcript_ENST00000534927.5, transcript_ENST00000534931.1, transcript_ENST00000535284.1, transcript_ENST00000535658.1, transcript_ENST00000536231.1, transcript_ENST00000537056.5, transcript_ENST00000538059.5, transcript_ENST00000538110.5, transcript_ENST00000538273.5, transcript_ENST00000538453.5, transcript_ENST00000538778.5, transcript_ENST00000538805.5, transcript_ENST00000538930.5, transcript_ENST00000539144.5, transcript_ENST00000539881.5, transcript_ENST00000540182.5, transcript_ENST00000541020.1, transcript_ENST00000543030.5, transcript_ENST00000543049.1, transcript_ENST00000543103.1, transcript_ENST00000543141.5, transcript_ENST00000543402.1, transcript_ENST00000544189.1, transcript_ENST00000544641.5, transcript_ENST00000545081.5, transcript_ENST00000545349.1.

[0407] In some embodiments, the NLRC5 pre-mRNA transcript is encoded by a genetic sequence with at least about 80%, 85%, 90%, 95%, 96%, 97%, 98%, 99% or 100% sequence identity to the Ensembl reference number ENSG00000140853.15 or a complement thereof. In some embodiments, the NLRC5 pre-mRNA transcript comprises a sequence with at least about 80%, 85%, 90%, 95%, 96%, 97%, 98%, 99% or 100% sequence identity to a NLRC5 pre-mRNA transcript or a complement thereof described herein.

[0408] In some embodiments, the targeted portion of the NLRC5 pre-mRNA comprises a sequence with at least 80%, 85%, 90%, 95%, 97%, or 100% sequence identity to a region comprising at least 8 contiguous nucleic acids of a sequence of premrna_ENST00000262510.10, premrna_ENST00000399221.3, premrna_ENST00000436936.5, premrna_ENST00000534927.5, premrna_ENST00000534931.1, premrna_ENST00000535284.1, premrna_ENST00000535658.1, premrna_ENST00000536231.1, premrna_ENST00000537056.5, premrna_ENST00000538059.5, premrna_ENST00000538110.5, premrna_ENST00000538273.5, premrna_ENST00000538453.5, premrna_ENST00000538778.5, premrna_ENST00000538805.5, premrna_ENST00000538930.5, premrna_ENST00000539144.5, premrna_ENST00000539881.5, premrna_ENST00000540182.5, premrna_ENST00000541020.1, premrna_ENST00000543030.5, premrna_ENST00000543049.1, premrna_ENST00000543103.1, premrna_ENST00000543141.5, premrna_ENST00000543402.1, premrna_ENST00000544189.1, premrna_ENST00000544641.5, premrna_ENST00000545081.5, premrna_ENST00000545349.1, or a sequence of Table 3 or complements thereof. In some embodiments, the targeted portion of the NLRC5 pre-mRNA comprises a sequence with at least 80%, 85%, 90%, 95%, 97%, or 100% sequence identity to a region comprising at least 8 contiguous nucleic acids of a sequence selected from the group consisting of SEQ ID NO: 716-SEQ ID NO: 719 or complements thereof. In some embodiments, the targeted portion of the NLRC5 pre-mRNA comprises a sequence that is complementary to at least 8, 9, 10, 11, 12, 13, 14, 15, 16, 17, 18, 19 or 20 contiguous nucleic acids of a sequence of Table 6A or Table 6B or a complement thereof.

[0409] In some embodiments, the ASOs disclosed herein target a NSAE pre-mRNA transcribed from a NOM1 genomic sequence. In some embodiments, the ASO targets a NSAE pre-mRNA transcript from a NOM1 genomic sequence comprising a NSAE exon. In some embodiments, the ASO targets a NSAE pre-mRNA transcript from a NOM1 genomic sequence comprising an intron flanking the 3′ splice site of the NSAE exon and an intron flanking the 5′ splice site of a NSAE exon. In some embodiments, the ASO targets a NSAE pre-mRNA transcript comprising a sequence selected from the group consisting of premrna_ENST00000275820.4, premrna_ENST00000460332.1, premrna_ENST00000469271.1, premrna_ENST00000472491.1, premrna_ENST00000475176.1, premrna_ENST00000485661.1, premrna_ENST00000486131.1, and premrna_ENST00000489850.5. In some embodiments, the ASO targets a NOM1 pre-mRNA sequence comprising a NSAE exon. In some embodiments, the ASO targets a NOM1 pre-mRNA sequence comprising an intron flanking the 3′ splice site of the NSAE exon. In some embodiments, the ASO targets a NOM1 pre-mRNA sequence comprising an intron flanking the 5′ splice site of the NSAE exon. In some embodiments, the transcript is selected from the group consisting of transcript_ENST00000275820.4, transcript_ENST00000460332.1, transcript_ENST00000469271.1, transcript_ENST00000472491.1, transcript_ENST00000475176.1, transcript_ENST00000485661.1, transcript_ENST00000486131.1, and transcript_ENST00000489850.5.

[0410] In some embodiments, the NOM1 pre-mRNA transcript is encoded by a genetic sequence with at least about 80%, 85%, 90%, 95%, 96%, 97%, 98%, 99% or 100% sequence identity to the Ensembl reference number ENSG00000146909.8 or a complement thereof. In some embodiments, the NOM1 pre-mRNA transcript comprises a sequence with at least about 80%, 85%, 90%, 95%, 96%, 97%, 98%, 99% or 100% sequence identity to a NOM1 pre-mRNA transcript or a complement thereof described herein.

[0411] In some embodiments, the targeted portion of the NOM1 pre-mRNA comprises a sequence with at least 80%, 85%, 90%, 95%, 97%, or 100% sequence identity to a region comprising at least 8 contiguous nucleic acids of a sequence of premrna_ENST00000275820.4, premrna_ENST00000460332.1, premrna_ENST00000469271.1, premrna_ENST00000472491.1, premrna_ENST00000475176.1, premrna_ENST00000485661.1, premrna_ENST00000486131.1, premrna_ENST00000489850.5 or a sequence of Table 3 or complements thereof. In some embodiments, the targeted portion of the NOM1 pre-mRNA comprises a sequence with at least 80%, 85%, 90%, 95%, 97%, or 100% sequence identity to a region comprising at least 8 contiguous nucleic acids of a sequence selected from the group consisting of SEQ ID NO: 720-SEQ ID NO: 723 or complements thereof. In some embodiments, the targeted portion of the NOM1 pre-mRNA comprises a sequence that is complementary to at least 8, 9, 10, 11, 12, 13, 14, 15, 16, 17, 18, 19 or 20 contiguous nucleic acids of a sequence of Table 6A or Table 6B or a complement thereof.

[0412] In some embodiments, the ASOs disclosed herein target a NSAE pre-mRNA transcribed from a NOP58 genomic sequence. In some embodiments, the ASO targets a NSAE pre-mRNA transcript from a NOP58 genomic sequence comprising a NSAE exon. In some embodiments, the ASO targets a NSAE pre-mRNA transcript from a NOP58 genomic sequence comprising an intron flanking the 3′ splice site of the NSAE exon and an intron flanking the 5′ splice site of a NSAE exon. In some embodiments, the ASO targets a NSAE pre-mRNA transcript comprising a sequence selected from the group consisting of premrna_ENST00000264279.10, premrna_ENST00000426814.5, premrna_ENST00000433543.2, premrna_ENST00000467734.5, premrna_ENST00000472050.5, premrna_ENST00000478508.1, premrna_ENST00000478941.1, premrna_ENST00000488403.5, premrna_ENST00000492688.5, and premrna_ENST00000492740.5. In some embodiments, the ASO targets a NOP58 pre-mRNA sequence comprising a NSAE exon. In some embodiments, the ASO targets a NOP58 pre-mRNA sequence comprising an intron flanking the 3′ splice site of the NSAE exon. In some embodiments, the ASO targets a NOP58 pre-mRNA sequence comprising an intron flanking the 5′ splice site of the NSAE exon. In some embodiments, the transcript is selected from the group consisting of transcript_ENST00000264279.10, transcript_ENST00000426814.5, transcript_ENST00000433543.2, transcript_ENST00000467734.5, transcript_ENST00000472050.5, transcript_ENST00000478508.1, transcript_ENST00000478941.1, transcript_ENST00000488403.5, transcript_ENST00000492688.5, and transcript_ENST00000492740.5.

[0413] In some embodiments, the NOP58 pre-mRNA transcript is encoded by a genetic sequence with at least about 80%, 85%, 90%, 95%, 96%, 97%, 98%, 99% or 100% sequence identity to the Ensembl reference number ENSG00000055044.11 or a complement thereof. In some embodiments, the NOP58 pre-mRNA transcript comprises a sequence with at least about 80%, 85%, 90%, 95%, 96%, 97%, 98%, 99% or 100% sequence identity to a NOP58 pre-mRNA transcript or a complement thereof described herein.

[0414] In some embodiments, the targeted portion of the NOP58 pre-mRNA comprises a sequence with at least 80%, 85%, 90%, 95%, 97%, or 100% sequence identity to a region comprising at least 8 contiguous nucleic acids of a sequence of premrna_ENST00000264279.10, premrna_ENST00000426814.5, premrna_ENST00000433543.2, premrna_ENST00000467734.5, premrna_ENST00000472050.5, premrna_ENST00000478508.1, premrna_ENST00000478941.1, premrna_ENST00000488403.5, premrna_ENST00000492688.5, premrna_ENST00000492740.5 or a sequence of Table 3 or complements thereof. In some embodiments, the targeted portion of the NOP58 pre-mRNA comprises a sequence with at least 80%, 85%, 90%, 95%, 97%, or 100% sequence identity to a region comprising at least 8 contiguous nucleic acids of a sequence selected from the group consisting of SEQ ID NO: 724-SEQ ID NO: 727 or complements thereof. In some embodiments, the targeted portion of the NOP58 pre-mRNA comprises a sequence that is complementary to at least 8, 9, 10, 11, 12, 13, 14, 15, 16, 17, 18, 19 or 20 contiguous nucleic acids of a sequence of Table 6A or Table 6B or a complement thereof.

[0415] In some embodiments, the ASOs disclosed herein target a NSAE pre-mRNA transcribed from a NPHP1 genomic sequence. In some embodiments, the ASO targets a NSAE pre-mRNA transcript from a NPHP1 genomic sequence comprising a NSAE exon. In some embodiments, the ASO targets a NSAE pre-mRNA transcript from a NPHP1 genomic sequence comprising an intron flanking the 3′ splice site of the NSAE exon and an intron flanking the 5′ splice site of a NSAE exon. In some embodiments, the ASO targets a NSAE pre-mRNA transcript comprising a sequence selected from the group consisting of premrna_ENST00000316534.8, premrna_ENST00000355301.8, premrna_ENST00000393272.7, premrna_ENST00000417665.5, premrna_ENST00000418527.1, premrna_ENST00000422492.1, premrna_ENST00000445609.6, premrna_ENST00000449600.1, premrna_ENST00000461707.5, premrna_ENST00000493051.1, and premrna_ENST00000496524.5. In some embodiments, the ASO targets a NPHP1 pre-mRNA sequence comprising a NSAE exon. In some embodiments, the ASO targets a NPHP1 pre-mRNA sequence comprising an intron flanking the 3′ splice site of the NSAE exon. In some embodiments, the ASO targets a NPHP1 pre-mRNA sequence comprising an intron flanking the 5′ splice site of the NSAE exon. In some embodiments, the transcript is selected from the group consisting of transcript_ENST00000316534.8, transcript_ENST00000355301.8, transcript_ENST00000393272.7, transcript_ENST00000417665.5, transcript_ENST00000418527.1, transcript_ENST00000422492.1, transcript_ENST00000445609.6, transcript_ENST00000449600.1, transcript_ENST00000461707.5, transcript_ENST00000493051.1, and transcript_ENST00000496524.5.

[0416] In some embodiments, the NPHP1 pre-mRNA transcript is encoded by a genetic sequence with at least about 80%, 85%, 90%, 95%, 96%, 97%, 98%, 99% or 100% sequence identity to the Ensembl reference number ENSG00000144061.13 or a complement thereof. In some embodiments, the NPHP1 pre-mRNA transcript comprises a sequence with at least about 80%, 85%, 90%, 95%, 96%, 97%, 98%, 99% or 100% sequence identity to a NPHP1 pre-mRNA transcript or a complement thereof described herein.

[0417] In some embodiments, the targeted portion of the NPHP1 pre-mRNA comprises a sequence with at least 80%, 85%, 90%, 95%, 97%, or 100% sequence identity to a region comprising at least 8 contiguous nucleic acids of a sequence of premrna_ENST00000316534.8, premrna_ENST00000355301.8, premrna_ENST00000393272.7, premrna_ENST00000417665.5, premrna_ENST00000418527.1, premrna_ENST00000422492.1, premrna_ENST00000445609.6, premrna_ENST00000449600.1, premrna_ENST00000461707.5, premrna_ENST00000493051.1, premrna_ENST00000496524.5 or a sequence of Table 3 or complements thereof. In some embodiments, the targeted portion of the NPHP1 pre-mRNA comprises a sequence with at least 80%, 85%, 90%, 95%, 97%, or 100% sequence identity to a region comprising at least 8 contiguous nucleic acids of a sequence selected from the group consisting of SEQ ID NO: 728-SEQ ID NO: 733 or complements thereof. In some embodiments, the targeted portion of the NPHP1 pre-mRNA comprises a sequence that is complementary to at least 8, 9, 10, 11, 12, 13, 14, 15, 16, 17, 18, 19 or 20 contiguous nucleic acids of a sequence of Table 6A or Table 6B or a complement thereof.

[0418] In some embodiments, the ASOs disclosed herein target a NSAE pre-mRNA transcribed from a NPR1 genomic sequence. In some embodiments, the ASO targets a NSAE pre-mRNA transcript from a NPR1 genomic sequence comprising a NSAE exon. In some embodiments, the ASO targets a NSAE pre-mRNA transcript from a NPR1 genomic sequence comprising an intron flanking the 3′ splice site of the NSAE exon and an intron flanking the 5′ splice site of a NSAE exon. In some embodiments, the ASO targets a NSAE pre-mRNA transcript comprising a sequence selected from the group consisting of premrna_ENST00000368677.2, premrna_ENST00000368680.4, and premrna_ENST00000413826.1. In some embodiments, the ASO targets a NPR1 pre-mRNA sequence comprising a NSAE exon. In some embodiments, the ASO targets a NPR1 pre-mRNA sequence comprising an intron flanking the 3′ splice site of the NSAE exon. In some embodiments, the ASO targets a NPR1 pre-mRNA sequence comprising an intron flanking the 5′ splice site of the NSAE exon. In some embodiments, the transcript is selected from the group consisting of transcript_ENST00000368677.2, transcript_ENST00000368680.4, and transcript_ENST00000413826.1.

[0419] In some embodiments, the NPR1 pre-mRNA transcript is encoded by a genetic sequence with at least about 80%, 85%, 90%, 95%, 96%, 97%, 98%, 99% or 100% sequence identity to the Ensembl reference number ENSG00000169418.10 or a complement thereof. In some embodiments, the NPR1 pre-mRNA transcript comprises a sequence with at least about 80%, 85%, 90%, 95%, 96%, 97%, 98%, 99% or 100% sequence identity to a NPR1 pre-mRNA transcript or a complement thereof described herein.

[0420] In some embodiments, the targeted portion of the NPR1 pre-mRNA comprises a sequence with at least 80%, 85%, 90%, 95%, 97%, or 100% sequence identity to a region comprising at least 8 contiguous nucleic acids of a sequence of premrna_ENST00000368677.2, premrna_ENST00000368680.4, premrna_ENST00000413826.1 or a sequence of Table 3 or complements thereof. In some embodiments, the targeted portion of the NPR1 pre-mRNA comprises a sequence with at least 80%, 85%, 90%, 95%, 97%, or 100% sequence identity to a region comprising at least 8 contiguous nucleic acids of a sequence selected from the group consisting of SEQ ID NO: 734-SEQ ID NO: 737 or complements thereof. In some embodiments, the targeted portion of the NPR1 pre-mRNA comprises a sequence that is complementary to at least 8, 9, 10, 11, 12, 13, 14, 15, 16, 17, 18, 19 or 20 contiguous nucleic acids of a sequence of Table 6A or Table 6B or a complement thereof.

[0421] In some embodiments, the ASOs disclosed herein target a NSAE pre-mRNA transcribed from a NUP188 genomic sequence. In some embodiments, the ASO targets a NSAE pre-mRNA transcript from a NUP188 genomic sequence comprising a NSAE exon. In some embodiments, the ASO targets a NSAE pre-mRNA transcript from a NUP188 genomic sequence comprising an intron flanking the 3′ splice site of the NSAE exon and an intron flanking the 5′ splice site of a NSAE exon. In some embodiments, the ASO targets a NSAE pre-mRNA transcript comprising a sequence selected from the group consisting of premrna_ENST00000372577.2, premrna_ENST00000464729.1, premrna_ENST00000465344.1, premrna_ENST00000467044.1, premrna_ENST00000477069.5, premrna_ENST00000485158.1, premrna_ENST00000487952.1, premrna_ENST00000491502.1, premrna_ENST00000491990.5, premrna_ENST00000495726.1, and premrna_ENST00000550219.1. In some embodiments, the ASO targets a NUP188 pre-mRNA sequence comprising a NSAE exon. In some embodiments, the ASO targets a NUP188 pre-mRNA sequence comprising an intron flanking the 3′ splice site of the NSAE exon. In some embodiments, the ASO targets a NUP188 pre-mRNA sequence comprising an intron flanking the 5′ splice site of the NSAE exon. In some embodiments, the transcript is selected from the group consisting of transcript_ENST00000372577.2, transcript_ENST00000464729.1, transcript_ENST00000465344.1, transcript_ENST00000467044.1, transcript_ENST00000477069.5, transcript_ENST00000485158.1, transcript_ENST00000487952.1, transcript_ENST00000491502.1, transcript_ENST00000491990.5, transcript_ENST00000495726.1, and transcript_ENST00000550219.1.

[0422] In some embodiments, the NUP188 pre-mRNA transcript is encoded by a genetic sequence with at least about 80%, 85%, 90%, 95%, 96%, 97%, 98%, 99% or 100% sequence identity to the Ensembl reference number ENSG00000095319.14 or a complement thereof. In some embodiments, the NUP188 pre-mRNA transcript comprises a sequence with at least about 80%, 85%, 90%, 95%, 96%, 97%, 98%, 99% or 100% sequence identity to a NUP188 pre-mRNA transcript or a complement thereof described herein.

[0423] In some embodiments, the targeted portion of the NUP188 pre-mRNA comprises a sequence with at least 80%, 85%, 90%, 95%, 97%, or 100% sequence identity to a region comprising at least 8 contiguous nucleic acids of a sequence of premrna_ENST00000372577.2, premrna_ENST00000464729.1, premrna_ENST00000465344.1, premrna_ENST00000467044.1, premrna_ENST00000477069.5, premrna_ENST00000485158.1, premrna_ENST00000487952.1, premrna_ENST00000491502.1, premrna_ENST00000491990.5, premrna_ENST00000495726.1, premrna_ENST00000550219.1 or a sequence of Table 3 or complements thereof. In some embodiments, the targeted portion of the NUP188 pre-mRNA comprises a sequence with at least 80%, 85%, 90%, 95%, 97%, or 100% sequence identity to a region comprising at least 8 contiguous nucleic acids of a sequence selected from the group consisting of SEQ ID NO: 738-SEQ ID NO: 741 or complements thereof. In some embodiments, the targeted portion of the NUP188 pre-mRNA comprises a sequence that is complementary to at least 8, 9, 10, 11, 12, 13, 14, 15, 16, 17, 18, 19 or 20 contiguous nucleic acids of a sequence of Table 6A or Table 6B or a complement thereof.

[0424] In some embodiments, the ASOs disclosed herein target a NSAE pre-mRNA transcribed from a OSGEP genomic sequence. In some embodiments, the ASO targets a NSAE pre-mRNA transcript from a OSGEP genomic sequence comprising a NSAE exon. In some embodiments, the ASO targets a NSAE pre-mRNA transcript from a OSGEP genomic sequence comprising an intron flanking the 3′ splice site of the NSAE exon and an intron flanking the 5′ splice site of a NSAE exon. In some embodiments, the ASO targets a NSAE pre-mRNA transcript comprising a sequence selected from the group consisting of premrna_ENST00000206542.9, premrna_ENST00000553292.1, premrna_ENST00000553640.3, premrna_ENST00000554249.5, premrna_ENST00000554699.1, premrna_ENST00000554915.1, premrna_ENST00000555223.5, premrna_ENST00000555656.5, premrna_ENST00000555785.2, premrna_ENST00000556124.3, premrna_ENST00000556252.1, and premrna_ENST00000556439.1. In some embodiments, the ASO targets a OSGEP pre-mRNA sequence comprising a NSAE exon. In some embodiments, the ASO targets a OSGEP pre-mRNA sequence comprising an intron flanking the 3′ splice site of the NSAE exon. In some embodiments, the ASO targets a OSGEP pre-mRNA sequence comprising an intron flanking the 5′ splice site of the NSAE exon. In some embodiments, the transcript is selected from the group consisting of transcript_ENST00000206542.9, transcript_ENST00000553292.1, transcript_ENST00000553640.3, transcript_ENST00000554249.5, transcript_ENST00000554699.1, transcript_ENST00000554915.1, transcript_ENST00000555223.5, transcript_ENST00000555656.5, transcript_ENST00000555785.2, transcript_ENST00000556124.3, transcript_ENST00000556252.1, and transcript_ENST00000556439.1.

[0425] In some embodiments, the OSGEP pre-mRNA transcript is encoded by a genetic sequence with at least about 80%, 85%, 90%, 95%, 96%, 97%, 98%, 99% or 100% sequence identity to the Ensembl reference number ENSG00000092094.11 or a complement thereof. In some embodiments, the OSGEP pre-mRNA transcript comprises a sequence with at least about 80%, 85%, 90%, 95%, 96%, 97%, 98%, 99% or 100% sequence identity to a OSGEP pre-mRNA transcript or a complement thereof described herein.

[0426] In some embodiments, the targeted portion of the OSGEP pre-mRNA comprises a sequence with at least 80%, 85%, 90%, 95%, 97%, or 100% sequence identity to a region comprising at least 8 contiguous nucleic acids of a sequence of premrna_ENST00000206542.9, premrna_ENST00000553292.1, premrna_ENST00000553640.3, premrna_ENST00000554249.5, premrna_ENST00000554699.1, premrna_ENST00000554915.1, premrna_ENST00000555223.5, premrna_ENST00000555656.5, premrna_ENST00000555785.2, premrna_ENST00000556124.3, premrna_ENST00000556252.1, premrna_ENST00000556439.1, or a sequence of Table 3 or complements thereof. In some embodiments, the targeted portion of the OSGEP pre-mRNA comprises a sequence with at least 80%, 85%, 90%, 95%, 97%, or 100% sequence identity to a region comprising at least 8 contiguous nucleic acids of a sequence selected from the group consisting of SEQ ID NO: 742-SEQ ID NO: 745 or complements thereof. In some embodiments, the targeted portion of the OSGEP pre-mRNA comprises a sequence that is complementary to at least 8, 9, 10, 11, 12, 13, 14, 15, 16, 17, 18, 19 or 20 contiguous nucleic acids of a sequence of Table 6A or Table 6B or a complement thereof.

[0427] In some embodiments, the ASOs disclosed herein target a NSAE pre-mRNA transcribed from a PABPC4 genomic sequence. In some embodiments, the ASO targets a NSAE pre-mRNA transcript from a PABPC4 genomic sequence comprising a NSAE exon. In some embodiments, the ASO targets a NSAE pre-mRNA transcript from a PABPC4 genomic sequence comprising an intron flanking the 3′ splice site of the NSAE exon and an intron flanking the 5′ splice site of a NSAE exon. In some embodiments, the ASO targets a NSAE pre-mRNA transcript comprising a sequence selected from the group consisting of premrna_ENST00000372856.7, premrna_ENST00000372857.7, premrna_ENST00000372858.8, premrna_ENST00000372862.7, premrna_ENST00000421687.6, premrna_ENST00000437136.5, premrna_ENST00000451091.2, premrna_ENST00000461578.1, premrna_ENST00000468476.1, premrna_ENST00000470443.5, premrna_ENST00000474378.1, premrna_ENST00000477556.1, premrna_ENST00000482028.5, premrna_ENST00000483770.1, premrna_ENST00000484555.1, premrna_ENST00000492468.5, premrna_ENST00000492519.1, premrna_ENST00000513632.2, premrna_ENST00000525045.5, premrna_ENST00000525669.5, premrna_ENST00000525751.5, premrna_ENST00000527718.1, premrna_ENST00000529216.1, premma_ENST00000530186.1, and premrna_ENST00000531243.2. In some embodiments, the ASO targets a PABPC4 pre-mRNA sequence comprising a NSAE exon. In some embodiments, the ASO targets a PABPC4 pre-mRNA sequence comprising an intron flanking the 3′ splice site of the NSAE exon. In some embodiments, the ASO targets a PABPC4 pre-mRNA sequence comprising an intron flanking the 5′ splice site of the NSAE exon. In some embodiments, the transcript is selected from the group consisting of transcript_ENST00000372856.7, transcript_ENST00000372857.7, transcript_ENST00000372858.8, transcript_ENST00000372862.7, transcript_ENST00000421687.6, transcript_ENST00000437136.5, transcript_ENST00000451091.2, transcript_ENST00000461578.1, transcript_ENST00000468476.1, transcript_ENST00000470443.5, transcript_ENST00000474378.1, transcript_ENST00000477556.1, transcript_ENST00000482028.5, transcript_ENST00000483770.1, transcript_ENST00000484555.1, transcript_ENST00000492468.5, transcript_ENST00000492519.1, transcript_ENST00000513632.2, transcript_ENST00000525045.5, transcript_ENST00000525669.5, transcript_ENST00000525751.5, transcript_ENST00000527718.1, transcript_ENST00000529216.1, transcript_ENST00000530186.1, and transcript_ENST00000531243.2.

[0428] In some embodiments, the PABPC4 pre-mRNA transcript is encoded by a genetic sequence with at least about 80%, 85%, 90%, 95%, 96%, 97%, 98%, 99% or 100% sequence identity to the Ensembl reference number ENSG00000090621.14 or a complement thereof. In some embodiments, the PABPC4 pre-mRNA transcript comprises a sequence with at least about 80%, 85%, 90%, 95%, 96%, 97%, 98%, 99% or 100% sequence identity to a PABPC4 pre-mRNA transcript or a complement thereof described herein.

[0429] In some embodiments, the targeted portion of the PABPC4 pre-mRNA comprises a sequence with at least 80%, 85%, 90%, 95%, 97%, or 100% sequence identity to a region comprising at least 8 contiguous nucleic acids of a sequence of premrna_ENST00000372856.7, premrna_ENST00000372857.7, premrna_ENST00000372858.8, premrna_ENST00000372862.7, premrna_ENST00000421687.6, premrna_ENST00000437136.5, premrna_ENST00000451091.2, premrna_ENST00000461578.1, premrna_ENST00000468476.1, premrna_ENST00000470443.5, premrna_ENST00000474378.1, premrna_ENST00000477556.1, premrna_ENST00000482028.5, premrna_ENST00000483770.1, premrna_ENST00000484555.1, premrna_ENST00000492468.5, premrna_ENST00000492519.1, premrna_ENST00000513632.2, premrna_ENST00000525045.5, premrna_ENST00000525669.5, premrna_ENST00000525751.5, premrna_ENST00000527718.1, premrna_ENST00000529216.1, premrna_ENST00000530186.1, premrna_ENST00000531243.2 or a sequence of Table 3 or complements thereof. In some embodiments, the targeted portion of the PABPC4 pre-mRNA comprises a sequence with at least 80%, 85%, 90%, 95%, 97%, or 100% sequence identity to a region comprising at least 8 contiguous nucleic acids of a sequence selected from the group consisting of SEQ ID NO: 746-SEQ ID NO: 749 or complements thereof. In some embodiments, the targeted portion of the PABPC4 pre-mRNA comprises a sequence that is complementary to at least 8, 9, 10, 11, 12, 13, 14, 15, 16, 17, 18, 19 or 20 contiguous nucleic acids of a sequence of Table 6A or Table 6B or a complement thereof.

[0430] In some embodiments, the ASOs disclosed herein target a NSAE pre-mRNA transcribed from a PCOLCE genomic sequence. In some embodiments, the ASO targets a NSAE pre-mRNA transcript from a PCOLCE genomic sequence comprising a NSAE exon. In some embodiments, the ASO targets a NSAE pre-mRNA transcript from a PCOLCE genomic sequence comprising an intron flanking the 3′ splice site of the NSAE exon and an intron flanking the 5′ splice site of a NSAE exon. In some embodiments, the ASO targets a NSAE pre-mRNA transcript comprising a sequence selected from the group consisting of premrna_ENST00000223061.6, premrna_ENST00000460002.1, premrna_ENST00000462260.1, premrna_ENST00000468214.1, premrna_ENST00000472348.1, premrna_ENST00000482863.1, premrna_ENST00000486440.5, premrna_ENST00000487172.1, premrna_ENST00000490909.1, and premrna_ENST00000496269.1. In some embodiments, the ASO targets a PCOLCE pre-mRNA sequence comprising a NSAE exon. In some embodiments, the ASO targets a PCOLCE pre-mRNA sequence comprising an intron flanking the 3′ splice site of the NSAE exon. In some embodiments, the ASO targets a PCOLCE pre-mRNA sequence comprising an intron flanking the 5′ splice site of the NSAE exon. In some embodiments, the transcript is selected from the group consisting of transcript_ENST00000223061.6, transcript_ENST00000460002.1, transcript_ENST00000462260.1, transcript_ENST00000468214.1, transcript_ENST00000472348.1, transcript_ENST00000482863.1, transcript_ENST00000486440.5, transcript_ENST00000487172.1, transcript_ENST00000490909.1, and transcript_ENST00000496269.1.

[0431] In some embodiments, the PCOLCE pre-mRNA transcript is encoded by a genetic sequence with at least about 80%, 85%, 90%, 95%, 96%, 97%, 98%, 99% or 100% sequence identity to the Ensembl reference number ENSG00000106333.13 or ENSG00000224729.6 or a complement thereof. In some embodiments, the PCOLCE pre-mRNA transcript comprises a sequence with at least about 80%, 85%, 90%, 95%, 96%, 97%, 98%, 99% or 100% sequence identity to a PCOLCE pre-mRNA transcript or a complement thereof described herein.

[0432] In some embodiments, the targeted portion of the PCOLCE pre-mRNA comprises a sequence with at least 80%, 85%, 90%, 95%, 97%, or 100% sequence identity to a region comprising at least 8 contiguous nucleic acids of a sequence of premrna_ENST00000223061.6, premrna_ENST00000460002.1, premrna_ENST00000462260.1, premrna_ENST00000468214.1, premrna_ENST00000472348.1, premrna_ENST00000482863.1, premrna_ENST00000486440.5, premrna_ENST00000487172.1, premrna_ENST00000490909.1, premrna_ENST00000496269.1 or a sequence of Table 3 or complements thereof. In some embodiments, the targeted portion of the PCOLCE pre-mRNA comprises a sequence with at least 80%, 85%, 90%, 95%, 97%, or 100% sequence identity to a region comprising at least 8 contiguous nucleic acids of a sequence selected from the group consisting of SEQ ID NO: 750-SEQ ID NO: 753 or complements thereof. In some embodiments, the targeted portion of the PCOLCE pre-mRNA comprises a sequence that is complementary to at least 8, 9, 10, 11, 12, 13, 14, 15, 16, 17, 18, 19 or 20 contiguous nucleic acids of a sequence of Table 6A or Table 6B or a complement thereof.

[0433] In some embodiments, the ASOs disclosed herein target a NSAE pre-mRNA transcribed from a PHKA2 genomic sequence. In some embodiments, the ASO targets a NSAE pre-mRNA transcript from a PHKA2 genomic sequence comprising a NSAE exon. In some embodiments, the ASO targets a NSAE pre-mRNA transcript from a PHKA2 genomic sequence comprising an intron flanking the 3′ splice site of the NSAE exon and an intron flanking the 5′ splice site of a NSAE exon. In some embodiments, the ASO targets a NSAE pre-mRNA transcript comprising a sequence selected from the group consisting of premrna_ENST00000379942.5, premrna_ENST00000464455.1, premrna_ENST00000469485.5, premrna_ENST00000469645.5, premrna_ENST00000473597.1, premrna_ENST00000473739.5, premrna_ENST00000481718.1, and premrna_ENST00000486231.2. In some embodiments, the ASO targets a PHKA2 pre-mRNA sequence comprising a NSAE exon. In some embodiments, the ASO targets a PHKA2 pre-mRNA sequence comprising an intron flanking the 3′ splice site of the NSAE exon. In some embodiments, the ASO targets a PHKA2 pre-mRNA sequence comprising an intron flanking the 5′ splice site of the NSAE exon. In some embodiments, the transcript is selected from the group consisting of transcript_ENST00000379942.5, transcript_ENST00000464455.1, transcript_ENST00000469485.5, transcript_ENST00000469645.5, transcript_ENST00000473597.1, transcript_ENST00000473739.5, transcript_ENST00000481718.1, and transcript_ENST00000486231.2.

[0434] In some embodiments, the PHKA2 pre-mRNA transcript is encoded by a genetic sequence with at least about 80%, 85%, 90%, 95%, 96%, 97%, 98%, 99% or 100% sequence identity to the Ensembl reference number ENSG00000044446.12 or a complement thereof. In some embodiments, the PHKA2 pre-mRNA transcript comprises a sequence with at least about 80%, 85%, 90%, 95%, 96%, 97%, 98%, 99% or 100% sequence identity to a PHKA2 pre-mRNA transcript or a complement thereof described herein.

[0435] In some embodiments, the targeted portion of the PHKA2 pre-mRNA comprises a sequence with at least 80%, 85%, 90%, 95%, 97%, or 100% sequence identity to a region comprising at least 8 contiguous nucleic acids of a sequence of premrna_ENST00000379942.5, premrna_ENST00000464455.1, premrna_ENST00000469485.5, premrna_ENST00000469645.5, premrna_ENST00000473597.1, premrna_ENST00000473739.5, premrna_ENST00000481718.1, premrna_ENST00000486231.2 or a sequence of Table 3 or complements thereof. In some embodiments, the targeted portion of the PHKA2 pre-mRNA comprises a sequence with at least 80%, 85%, 90%, 95%, 97%, or 100% sequence identity to a region comprising at least 8 contiguous nucleic acids of a sequence selected from the group consisting of SEQ ID NO: 754-SEQ ID NO: 757 or complements thereof. In some embodiments, the targeted portion of the PHKA2 pre-mRNA comprises a sequence that is complementary to at least 8, 9, 10, 11, 12, 13, 14, 15, 16, 17, 18, 19 or 20 contiguous nucleic acids of a sequence of Table 6A or Table 6B or a complement thereof.

[0436] In some embodiments, the ASOs disclosed herein target a NSAE pre-mRNA transcribed from a PIDD1 genomic sequence. In some embodiments, the ASO targets a NSAE pre-mRNA transcript from a PIDD1 genomic sequence comprising a NSAE exon. In some embodiments, the ASO targets a NSAE pre-mRNA transcript from a PIDD1 genomic sequence comprising an intron flanking the 3′ splice site of the NSAE exon and an intron flanking the 5′ splice site of a NSAE exon. In some embodiments, the ASO targets a NSAE pre-mRNA transcript comprising a sequence selected from the group consisting of premrna_ENST00000347755.10, premrna_ENST00000411829.6, premrna_ENST00000524486.5, premrna_ENST00000525028.6, premrna_ENST00000527357.5, premrna_ENST00000527812.1, premrna_ENST00000528122.1, premrna_ENST00000530911.1, premrna_ENST00000531286.5, premrna_ENST00000534525.5, and premrna_ENST00000534649.1. In some embodiments, the ASO targets a PIDD1 pre-mRNA sequence comprising a NSAE exon. In some embodiments, the ASO targets a PIDD1 pre-mRNA sequence comprising an intron flanking the 3′ splice site of the NSAE exon. In some embodiments, the ASO targets a PIDD1 pre-mRNA sequence comprising an intron flanking the 5′ splice site of the NSAE exon. In some embodiments, the transcript is selected from the group consisting of transcript_ENST00000347755.10, transcript_ENST00000411829.6, transcript_ENST00000524486.5, transcript_ENST00000525028.6, transcript_ENST00000527357.5, transcript_ENST00000527812.1, transcript_ENST00000528122.1, transcript_ENST00000530911.1, transcript_ENST00000531286.5, transcript_ENST00000534525.5, and transcript_ENST00000534649.1.

[0437] In some embodiments, the PIDD1 pre-mRNA transcript is encoded by a genetic sequence with at least about 80%, 85%, 90%, 95%, 96%, 97%, 98%, 99% or 100% sequence identity to the Ensembl reference number ENSG00000177595.18 or a complement thereof. In some embodiments, the PIDD1 pre-mRNA transcript comprises a sequence with at least about 80%, 85%, 90%, 95%, 96%, 97%, 98%, 99% or 100% sequence identity to a PIDD1 pre-mRNA transcript or a complement thereof described herein.

[0438] In some embodiments, the targeted portion of the PIDD1 pre-mRNA comprises a sequence with at least 80%, 85%, 90%, 95%, 97%, or 100% sequence identity to a region comprising at least 8 contiguous nucleic acids of a sequence of premrna_ENST00000347755.10, premrna_ENST00000411829.6, premrna_ENST00000524486.5, premrna_ENST00000525028.6, premrna_ENST00000527357.5, premrna_ENST00000527812.1, premrna_ENST00000528122.1, premrna_ENST00000530911.1, premrna_ENST00000531286.5, premrna_ENST00000534525.5, premrna_ENST00000534649.1 or a sequence of Table 3 or complements thereof. In some embodiments, the targeted portion of the PIDD1 pre-mRNA comprises a sequence with at least 80%, 85%, 90%, 95%, 97%, or 100% sequence identity to a region comprising at least 8 contiguous nucleic acids of a sequence selected from the group consisting of SEQ ID NO: 758-SEQ ID NO: 765 or complements thereof. In some embodiments, the targeted portion of the PIDD1 pre-mRNA comprises a sequence that is complementary to at least 8, 9, 10, 11, 12, 13, 14, 15, 16, 17, 18, 19 or 20 contiguous nucleic acids of a sequence of Table 6A or Table 6B or a complement thereof.

[0439] In some embodiments, the ASOs disclosed herein target a NSAE pre-mRNA transcribed from a PKD1 genomic sequence. In some embodiments, the ASO targets a NSAE pre-mRNA transcript from a PKD1 genomic sequence comprising a NSAE exon. In some embodiments, the ASO targets a NSAE pre-mRNA transcript from a PKD1 genomic sequence comprising an intron flanking the 3′ splice site of the NSAE exon and an intron flanking the 5′ splice site of a NSAE exon. In some embodiments, the ASO targets a NSAE pre-mRNA transcript comprising a sequence selected from the group consisting of premrna_ENST00000262304.9, premrna_ENST00000415938.7, premrna_ENST00000423118.5, premrna_ENST00000468674.5, premrna_ENST00000469241.2, premrna_ENST00000469851.1, premrna_ENST00000471603.6, premrna_ENST00000472577.1, premrna_ENST00000472659.1, premrna_ENST00000473780.2, premrna_ENST00000474088.1, premrna_ENST00000475889.1, premrna_ENST00000480227.5, premrna_ENST00000483024.1, premrna_ENST00000483558.5, premrna_ENST00000483731.5, premrna_ENST00000483814.1, premrna_ENST00000485120.1, premrna_ENST00000486339.6, premrna_ENST00000487932.5, premrna_ENST00000488185.2, premrna_ENST00000496574.6, premrna_ENST00000561668.5, premrna_ENST00000561991.5, premrna_ENST00000562297.5, premrna_ENST00000562425.1, premrna_ENST00000564313.1, premrna_ENST00000564865.5, premrna_ENST00000564890.1, premrna_ENST00000565639.6, premrna_ENST00000566784.5, premrna_ENST00000566905.5, premrna_ENST00000567355.1, premrna_ENST00000567946.1, premrna_ENST00000568591.5, premrna_ENST00000568796.1, premrna_ENST00000569983.5, premrna_ENST00000570150.1, premrna_ENST00000570193.5, and premrna_ENST00000570253.5. In some embodiments, the ASO targets a PKD1 pre-mRNA sequence comprising a NSAE exon. In some embodiments, the ASO targets a PKD1 pre-mRNA sequence comprising an intron flanking the 3′ splice site of the NSAE exon. In some embodiments, the ASO targets a PKD1 pre-mRNA sequence comprising an intron flanking the 5′ splice site of the NSAE exon. In some embodiments, the transcript is selected from the group consisting of transcript_ENST00000262304.9, transcript_ENST00000415938.7, transcript_ENST00000423118.5, transcript_ENST00000468674.5, transcript_ENST00000469241.2, transcript_ENST00000469851.1, transcript_ENST00000471603.6, transcript_ENST00000472577.1, transcript_ENST00000472659.1, transcript_ENST00000473780.2, transcript_ENST00000474088.1, transcript_ENST00000475889.1, transcript_ENST00000480227.5, transcript_ENST00000483024.1, transcript_ENST00000483558.5, transcript_ENST00000483731.5, transcript_ENST00000483814.1, transcript_ENST00000485120.1, transcript_ENST00000486339.6, transcript_ENST00000487932.5, transcript_ENST00000488185.2, transcript_ENST00000496574.6, transcript_ENST00000561668.5, transcript_ENST00000561991.5, transcript_ENST00000562297.5, transcript_ENST00000562425.1, transcript_ENST00000564313.1, transcript_ENST00000564865.5, transcript_ENST00000564890.1, transcript_ENST00000565639.6, transcript_ENST00000566784.5, transcript_ENST00000566905.5, transcript_ENST00000567355.1, transcript_ENST00000567946.1, transcript_ENST00000568591.5, transcript_ENST00000568796.1, transcript_ENST00000569983.5, transcript_ENST00000570150.1, transcript_ENST00000570193.5, and transcript_ENST00000570253.5.

[0440] In some embodiments, the PKD1 pre-mRNA transcript is encoded by a genetic sequence with at least about 80%, 85%, 90%, 95%, 96%, 97%, 98%, 99% or 100% sequence identity to the Ensembl reference number ENSG00000008710.20 or a complement thereof. In some embodiments, the PKD1 pre-mRNA transcript comprises a sequence with at least about 80%, 85%, 90%, 95%, 96%, 97%, 98%, 99% or 100% sequence identity to a PKD1 pre-mRNA transcript or a complement thereof described herein.

[0441] In some embodiments, the targeted portion of the PKD1 pre-mRNA comprises a sequence with at least 80%, 85%, 90%, 95%, 97%, or 100% sequence identity to a region comprising at least 8 contiguous nucleic acids of a sequence of premrna_ENST00000262304.9, premrna_ENST00000415938.7, premrna_ENST00000423118.5, premrna_ENST00000468674.5, premrna_ENST00000469241.2, premrna_ENST00000469851.1, premrna_ENST00000471603.6, premrna_ENST00000472577.1, premrna_ENST00000472659.1, premrna_ENST00000473780.2, premrna_ENST00000474088.1, premrna_ENST00000475889.1, premrna_ENST00000480227.5, premrna_ENST00000483024.1, premrna_ENST00000483558.5, premrna_ENST00000483731.5, premrna_ENST00000483814.1, premrna_ENST00000485120.1, premrna_ENST00000486339.6, premrna_ENST00000487932.5, premrna_ENST00000488185.2, premrna_ENST00000496574.6, premrna_ENST00000561668.5, premrna_ENST00000561991.5, premrna_ENST00000562297.5, premrna_ENST00000562425.1, premrna_ENST00000564313.1, premrna_ENST00000564865.5, premrna_ENST00000564890.1, premrna_ENST00000565639.6, premrna_ENST00000566784.5, premrna_ENST00000566905.5, premrna_ENST00000567355.1, premrna_ENST00000567946.1, premrna_ENST00000568591.5, premrna_ENST00000568796.1, premrna_ENST00000569983.5, premrna_ENST00000570150.1, premrna_ENST00000570193.5, premrna_ENST00000570253.5 or a sequence of Table 3 or complements thereof. In some embodiments, the targeted portion of the PKD1 pre-mRNA comprises a sequence with at least 80%, 85%, 90%, 95%, 97%, or 100% sequence identity to a region comprising at least 8 contiguous nucleic acids of a sequence selected from the group consisting of SEQ ID NO: 766-SEQ ID NO: 769 or complements thereof. In some embodiments, the targeted portion of the PKD1 pre-mRNA comprises a sequence that is complementary to at least 8, 9, 10, 11, 12, 13, 14, 15, 16, 17, 18, 19 or 20 contiguous nucleic acids of a sequence of Table 6A or Table 6B or a complement thereof.

[0442] In some embodiments, the ASOs disclosed herein target a NSAE pre-mRNA transcribed from a PLA2G6 genomic sequence. In some embodiments, the ASO targets a NSAE pre-mRNA transcript from a PLA2G6 genomic sequence comprising a NSAE exon. In some embodiments, the ASO targets a NSAE pre-mRNA transcript from a PLA2G6 genomic sequence comprising an intron flanking the 3′ splice site of the NSAE exon and an intron flanking the 5′ splice site of a NSAE exon. In some embodiments, the ASO targets a NSAE pre-mRNA transcript comprising a sequence selected from the group consisting of premrna_ENST00000332509.8, premrna_ENST00000335539.7, premrna_ENST00000402064.5, premrna_ENST00000417303.6, premrna_ENST00000420435.5, premrna_ENST00000426674.1, premrna_ENST00000427114.6, premrna_ENST00000427453.5, premrna_ENST00000430886.5, premrna_ENST00000435484.5, premrna_ENST00000436218.6, premrna_ENST00000445591.5, premrna_ENST00000447598.6, premrna_ENST00000448094.5, premrna_ENST00000452542.5, premrna_ENST00000452794.5, premrna_ENST00000452972.1, premrna_ENST00000454670.1, premrna_ENST00000455341.2, premrna_ENST00000463287.1, premrna_ENST00000471636.5, premrna_ENST00000479641.5, premrna_ENST00000480154.1, premrna_ENST00000490473.1, premrna_ENST00000491986.1, premrna_ENST00000496409.1, premrna_ENST00000498338.1, premrna_ENST00000594306.1, premrna_ENST00000655142.1, premrna_ENST00000660610.1, premrna_ENST00000663895.1, premrna_ENST00000664587.1, premrna_ENST00000665987.1, premrna_ENST00000667521.1, premrna_ENST00000668208.1, premrna_ENST00000668499.1, premrna_ENST00000668949.1, premrna_ENST00000671093.1, and premrna_ENST00000673413.1. In some embodiments, the ASO targets a PLA2G6 pre-mRNA sequence comprising a NSAE exon. In some embodiments, the ASO targets a PLA2G6 pre-mRNA sequence comprising an intron flanking the 3′ splice site of the NSAE exon. In some embodiments, the ASO targets a PLA2G6 pre-mRNA sequence comprising an intron flanking the 5′ splice site of the NSAE exon. In some embodiments, the transcript is selected from the group consisting of transcript_ENST00000332509.8, transcript_ENST00000335539.7, transcript_ENST00000402064.5, transcript_ENST00000417303.6, transcript_ENST00000420435.5, transcript_ENST00000426674.1, transcript_ENST00000427114.6, transcript_ENST00000427453.5, transcript_ENST00000430886.5, transcript_ENST00000435484.5, transcript_ENST00000436218.6, transcript_ENST00000445591.5, transcript_ENST00000447598.6, transcript_ENST00000448094.5, transcript_ENST00000452542.5, transcript_ENST00000452794.5, transcript_ENST00000452972.1, transcript_ENST00000454670.1, transcript_ENST00000455341.2, transcript_ENST00000463287.1, transcript_ENST00000471636.5, transcript_ENST00000479641.5, transcript_ENST00000480154.1, transcript_ENST00000490473.1, transcript_ENST00000491986.1, transcript_ENST00000496409.1, transcript_ENST00000498338.1, transcript_ENST00000594306.1, transcript_ENST00000655142.1, transcript_ENST00000660610.1, transcript_ENST00000663895.1, transcript_ENST00000664587.1, transcript_ENST00000665987.1, transcript_ENST00000667521.1, transcript_ENST00000668208.1, transcript_ENST00000668499.1, transcript_ENST00000668949.1, transcript_ENST00000671093.1, and transcript_ENST00000673413.1.

[0443] In some embodiments, the PLA2G6 pre-mRNA transcript is encoded by a genetic sequence with at least about 80%, 85%, 90%, 95%, 96%, 97%, 98%, 99% or 100% sequence identity to the Ensembl reference number ENSG00000184381.20 or a complement thereof. In some embodiments, the PLA2G6 pre-mRNA transcript comprises a sequence with at least about 80%, 85%, 90%, 95%, 96%, 97%, 98%, 99% or 100% sequence identity to a PLA2G6 pre-mRNA transcript or a complement thereof described herein.

[0444] In some embodiments, the targeted portion of the PLA2G6 pre-mRNA comprises a sequence with at least 80%, 85%, 90%, 95%, 97%, or 100% sequence identity to a region comprising at least 8 contiguous nucleic acids of a sequence of premrna_ENST00000332509.8, premrna_ENST00000335539.7, premrna_ENST00000402064.5, premrna_ENST00000417303.6, premrna_ENST00000420435.5, premrna_ENST00000426674.1, premrna_ENST00000427114.6, premrna_ENST00000427453.5, premrna_ENST00000430886.5, premrna_ENST00000435484.5, premrna_ENST00000436218.6, premrna_ENST00000445591.5, premrna_ENST00000447598.6, premrna_ENST00000448094.5, premrna_ENST00000452542.5, premrna_ENST00000452794.5, premrna_ENST00000452972.1, premrna_ENST00000454670.1, premrna_ENST00000455341.2, premrna_ENST00000463287.1, premrna_ENST00000471636.5, premrna_ENST00000479641.5, premrna_ENST00000480154.1, premrna_ENST00000490473.1, premrna_ENST00000491986.1, premrna_ENST00000496409.1, premrna_ENST00000498338.1, premrna_ENST00000594306.1, premrna_ENST00000655142.1, premrna_ENST00000660610.1, premrna_ENST00000663895.1, premrna_ENST00000664587.1, premrna_ENST00000665987.1, premrna_ENST00000667521.1, premrna_ENST00000668208.1, premrna_ENST00000668499.1, premrna_ENST00000668949.1, premrna_ENST00000671093.1, premrna_ENST00000673413.1 or a sequence of Table 3 or complements thereof. In some embodiments, the targeted portion of the PLA2G6 pre-mRNA comprises a sequence with at least 80%, 85%, 90%, 95%, 97%, or 100% sequence identity to a region comprising at least 8 contiguous nucleic acids of a sequence selected from the group consisting of SEQ ID NO: 770-SEQ ID NO: 775 or complements thereof. In some embodiments, the targeted portion of the PLA2G6 pre-mRNA comprises a sequence that is complementary to at least 8, 9, 10, 11, 12, 13, 14, 15, 16, 17, 18, 19 or 20 contiguous nucleic acids of a sequence of Table 6A or Table 6B or a complement thereof.

[0445] In some embodiments, the ASOs disclosed herein target a NSAE pre-mRNA transcribed from a PLD2 genomic sequence. In some embodiments, the ASO targets a NSAE pre-mRNA transcript from a PLD2 genomic sequence comprising a NSAE exon. In some embodiments, the ASO targets a NSAE pre-mRNA transcript from a PLD2 genomic sequence comprising an intron flanking the 3′ splice site of the NSAE exon and an intron flanking the 5′ splice site of a NSAE exon. In some embodiments, the ASO targets a NSAE pre-mRNA transcript comprising a sequence selected from the group consisting of premrna_ENST00000263088.11, premrna_ENST00000571273.5, premrna_ENST00000572127.1, premrna_ENST00000572199.1, premrna_ENST00000572940.5, premrna_ENST00000573258.1, premrna_ENST00000574268.1, premrna_ENST00000574796.1, premrna_ENST00000575246.6, premrna_ENST00000575316.1, premrna_ENST00000575813.5, premrna_ENST00000575945.1, premrna_ENST00000576329.1, premrna_ENST00000576864.1, and premrna_ENST00000576983.5. In some embodiments, the ASO targets a PLD2 pre-mRNA sequence comprising a NSAE exon. In some embodiments, the ASO targets a PLD2 pre-mRNA sequence comprising an intron flanking the 3′ splice site of the NSAE exon. In some embodiments, the ASO targets a PLD2 pre-mRNA sequence comprising an intron flanking the 5′ splice site of the NSAE exon. In some embodiments, the transcript is selected from the group consisting of transcript_ENST00000263088.11, transcript_ENST00000571273.5, transcript_ENST00000572127.1, transcript_ENST00000572199.1, transcript_ENST00000572940.5, transcript_ENST00000573258.1, transcript_ENST00000574268.1, transcript_ENST00000574796.1, transcript_ENST00000575246.6, transcript_ENST00000575316.1, transcript_ENST00000575813.5, transcript_ENST00000575945.1, transcript_ENST00000576329.1, transcript_ENST00000576864.1, and transcript_ENST00000576983.5.

[0446] In some embodiments, the PLD2 pre-mRNA transcript is encoded by a genetic sequence with at least about 80%, 85%, 90%, 95%, 96%, 97%, 98%, 99% or 100% sequence identity to the Ensembl reference number ENSG00000129219.14 or a complement thereof. In some embodiments, the PLD2 pre-mRNA transcript comprises a sequence with at least about 80%, 85%, 90%, 95%, 96%, 97%, 98%, 99% or 100% sequence identity to a PLD2 pre-mRNA transcript or a complement thereof described herein.

[0447] In some embodiments, the targeted portion of the PLD2 pre-mRNA comprises a sequence with at least 80%, 85%, 90%, 95%, 97%, or 100% sequence identity to a region comprising at least 8 contiguous nucleic acids of a sequence of premrna_ENST00000263088.11, premrna_ENST00000571273.5, premrna_ENST00000572127.1, premrna_ENST00000572199.1, premrna_ENST00000572940.5, premrna_ENST00000573258.1, premrna_ENST00000574268.1, premrna_ENST00000574796.1, premrna_ENST00000575246.6, premrna_ENST00000575316.1, premrna_ENST00000575813.5, premrna_ENST00000575945.1, premrna_ENST00000576329.1, premrna_ENST00000576864.1, premrna_ENST00000576983.5 or a sequence of Table 3 or complements thereof. In some embodiments, the targeted portion of the PLD2 pre-mRNA comprises a sequence with at least 80%, 85%, 90%, 95%, 97%, or 100% sequence identity to a region comprising at least 8 contiguous nucleic acids of a sequence selected from the group consisting of SEQ ID NO: 776-SEQ ID NO: 787 or complements thereof. In some embodiments, the targeted portion of the PLD2 pre-mRNA comprises a sequence that is complementary to at least 8, 9, 10, 11, 12, 13, 14, 15, 16, 17, 18, 19 or 20 contiguous nucleic acids of a sequence of Table 6A or Table 6B or a complement thereof.

[0448] In some embodiments, the ASOs disclosed herein target a NSAE pre-mRNA transcribed from a PLEKHG5 genomic sequence. In some embodiments, the ASO targets a NSAE pre-mRNA transcript from a PLEKHG5 genomic sequence comprising a NSAE exon. In some embodiments, the ASO targets a NSAE pre-mRNA transcript from a PLEKHG5 genomic sequence comprising an intron flanking the 3′ splice site of the NSAE exon and an intron flanking the 5′ splice site of a NSAE exon. In some embodiments, the ASO targets a NSAE pre-mRNA transcript comprising a sequence selected from the group consisting of premrna_ENST00000340850.9, premrna_ENST00000377725.5, premrna_ENST00000377728.7, premrna_ENST00000377732.5, premrna_ENST00000377740.4, premrna_ENST00000377748.5, premrna_ENST00000400913.5, premrna_ENST00000400915.7, premrna_ENST00000487949.4, premrna_ENST00000489097.5, premrna_ENST00000535355.5, premrna_ENST00000537245.5, and premrna_ENST00000673471.1. In some embodiments, the ASO targets a PLEKHG5 pre-mRNA sequence comprising a NSAE exon. In some embodiments, the ASO targets a PLEKHG5 pre-mRNA sequence comprising an intron flanking the 3′ splice site of the NSAE exon. In some embodiments, the ASO targets a PLEKHG5 pre-mRNA sequence comprising an intron flanking the 5′ splice site of the NSAE exon. In some embodiments, the transcript is selected from the group consisting of transcript_ENST00000340850.9, transcript_ENST00000377725.5, transcript_ENST00000377728.7, transcript_ENST00000377732.5, transcript_ENST00000377740.4, transcript_ENST00000377748.5, transcript_ENST00000400913.5, transcript_ENST00000400915.7, transcript_ENST00000487949.4, transcript_ENST00000489097.5, transcript_ENST00000535355.5, transcript_ENST00000537245.5, and transcript_ENST00000673471.1.

[0449] In some embodiments, the PLEKHG5 pre-mRNA transcript is encoded by a genetic sequence with at least about 80%, 85%, 90%, 95%, 96%, 97%, 98%, 99% or 100% sequence identity to the Ensembl reference number ENSG00000171680.22 or a complement thereof. In some embodiments, the PLEKHG5 pre-mRNA transcript comprises a sequence with at least about 80%, 85%, 90%, 95%, 96%, 97%, 98%, 99% or 100% sequence identity to a PLEKHG5 pre-mRNA transcript or a complement thereof described herein.

[0450] In some embodiments, the targeted portion of the PLEKHG5 pre-mRNA comprises a sequence with at least 80%, 85%, 90%, 95%, 97%, or 100% sequence identity to a region comprising at least 8 contiguous nucleic acids of a sequence of premrna_ENST00000340850.9, premrna_ENST00000377725.5, premrna_ENST00000377728.7, premrna_ENST00000377732.5, premrna_ENST00000377740.4, premrna_ENST00000377748.5, premrna_ENST00000400913.5, premrna_ENST00000400915.7, premrna_ENST00000487949.4, premrna_ENST00000489097.5, premrna_ENST00000535355.5, premrna_ENST00000537245.5, premrna_ENST00000673471.1 or a sequence of Table 3 or complements thereof. In some embodiments, the targeted portion of the PLEKHG5 pre-mRNA comprises a sequence with at least 80%, 85%, 90%, 95%, 97%, or 100% sequence identity to a region comprising at least 8 contiguous nucleic acids of a sequence selected from the group consisting of SEQ ID NO: 788-SEQ ID NO: 791 or complements thereof. In some embodiments, the targeted portion of the PLEKHG5 pre-mRNA comprises a sequence that is complementary to at least 8, 9, 10, 11, 12, 13, 14, 15, 16, 17, 18, 19 or 20 contiguous nucleic acids of a sequence of Table 6A or Table 6B or a complement thereof.

[0451] In some embodiments, the ASOs disclosed herein target a NSAE pre-mRNA transcribed from a PNPO genomic sequence. In some embodiments, the ASO targets a NSAE pre-mRNA transcript from a PNPO genomic sequence comprising a NSAE exon. In some embodiments, the ASO targets a NSAE pre-mRNA transcript from a PNPO genomic sequence comprising an intron flanking the 3′ splice site of the NSAE exon and an intron flanking the 5′ splice site of a NSAE exon. In some embodiments, the ASO targets a NSAE pre-mRNA transcript comprising a sequence selected from the group consisting of premrna_ENST00000225573.5, premrna_ENST00000434554.7, premrna_ENST00000582171.6, premrna_ENST00000583245.6, premrna_ENST00000583599.6, premrna_ENST00000584061.6, premrna_ENST00000584806.2, premrna_ENST00000585320.5, premrna_ENST00000641285.1, premrna_ENST00000641305.1, premrna_ENST00000641323.1, premrna_ENST00000641427.1, premrna_ENST00000641511.1, premrna_ENST00000641703.1, premrna_ENST00000641709.1, premrna_ENST00000641856.1, and premrna_ENST00000642017.1. In some embodiments, the ASO targets a PNPO pre-mRNA sequence comprising a NSAE exon. In some embodiments, the ASO targets a PNPO pre-mRNA sequence comprising an intron flanking the 3′ splice site of the NSAE exon. In some embodiments, the ASO targets a PNPO pre-mRNA sequence comprising an intron flanking the 5′ splice site of the NSAE exon. In some embodiments, the transcript is selected from the group consisting of transcript_ENST00000225573.5, transcript_ENST00000434554.7, transcript_ENST00000582171.6, transcript_ENST00000583245.6, transcript_ENST00000583599.6, transcript_ENST00000584061.6, transcript_ENST00000584806.2, transcript_ENST00000585320.5, transcript_ENST00000641285.1, transcript_ENST00000641305.1, transcript_ENST00000641323.1, transcript_ENST00000641427.1, transcript_ENST00000641511.1, transcript_ENST00000641703.1, transcript_ENST00000641709.1, transcript_ENST00000641856.1, and transcript_ENST00000642017.1.

[0452] In some embodiments, the PNPO pre-mRNA transcript is encoded by a genetic sequence with at least about 80%, 85%, 90%, 95%, 96%, 97%, 98%, 99% or 100% sequence identity to the Ensembl reference number ENSG00000108439.11 or a complement thereof. In some embodiments, the PNPO pre-mRNA transcript comprises a sequence with at least about 80%, 85%, 90%, 95%, 96%, 97%, 98%, 99% or 100% sequence identity to a PNPO pre-mRNA transcript or a complement thereof described herein.

[0453] In some embodiments, the targeted portion of the PNPO pre-mRNA comprises a sequence with at least 80%, 85%, 90%, 95%, 97%, or 100% sequence identity to a region comprising at least 8 contiguous nucleic acids of a sequence of premrna_ENST00000225573.5, premrna_ENST00000434554.7, premrna_ENST00000582171.6, premrna_ENST00000583245.6, premrna_ENST00000583599.6, premrna_ENST00000584061.6, premrna_ENST00000584806.2, premrna_ENST00000585320.5, premrna_ENST00000641285.1, premrna_ENST00000641305.1, premrna_ENST00000641323.1, premrna_ENST00000641427.1, premrna_ENST00000641511.1, premrna_ENST00000641703.1, premrna_ENST00000641709.1, premrna_ENST00000641856.1, premrna_ENST00000642017.1, or a sequence of Table 3 or complements thereof. In some embodiments, the targeted portion of the PNPO pre-mRNA comprises a sequence with at least 80%, 85%, 90%, 95%, 97%, or 100% sequence identity to a region comprising at least 8 contiguous nucleic acids of a sequence selected from the group consisting of SEQ ID NO: 792-SEQ ID NO: 803 or complements thereof. In some embodiments, the targeted portion of the PNPO pre-mRNA comprises a sequence that is complementary to at least 8, 9, 10, 11, 12, 13, 14, 15, 16, 17, 18, 19 or 20 contiguous nucleic acids of a sequence of Table 6A or Table 6B or a complement thereof.

[0454] In some embodiments, the ASOs disclosed herein target a NSAE pre-mRNA transcribed from a POLE genomic sequence. In some embodiments, the ASO targets a NSAE pre-mRNA transcript from a POLE genomic sequence comprising a NSAE exon. In some embodiments, the ASO targets a NSAE pre-mRNA transcript from a POLE genomic sequence comprising an intron flanking the 3′ splice site of the NSAE exon and an intron flanking the 5′ splice site of a NSAE exon. In some embodiments, the ASO targets a POLE pre-mRNA sequence comprising a NSAE exon. In some embodiments, the ASO targets a POLE pre-mRNA sequence comprising an intron flanking the 3′ splice site of the NSAE exon. In some embodiments, the ASO targets a POLE pre-mRNA sequence comprising an intron flanking the 5′ splice site of the NSAE exon.

[0455] In some embodiments, the POLE pre-mRNA transcript is encoded by a genetic sequence with at least about 80%, 85%, 90%, 95%, 96%, 97%, 98%, 99% or 100% sequence identity to the Ensembl reference number ENSG00000177084.18 or a complement thereof. In some embodiments, the POLE pre-mRNA transcript comprises a sequence with at least about 80%, 85%, 90%, 95%, 96%, 97%, 98%, 99% or 100% sequence identity to a POLE pre-mRNA transcript or a complement thereof described herein.

[0456] In some embodiments, the targeted portion of the POLE pre-mRNA comprises a sequence with at least 80%, 85%, 90%, 95%, 97%, or 100% sequence identity to a region comprising at least 8 contiguous nucleic acids of a sequence of Table 3 or complements thereof. In some embodiments, the targeted portion of the POLE pre-mRNA comprises a sequence with at least 80%, 85%, 90%, 95%, 97%, or 100% sequence identity to a region comprising at least 8 contiguous nucleic acids of a sequence selected from the group consisting of SEQ ID NO: 804-SEQ ID NO: 807 or complements thereof. In some embodiments, the targeted portion of the POLE pre-mRNA comprises a sequence that is complementary to at least 8, 9, 10, 11, 12, 13, 14, 15, 16, 17, 18, 19 or 20 contiguous nucleic acids of a sequence of Table 6A or Table 6B or a complement thereof.

[0457] In some embodiments, the ASOs disclosed herein target a NSAE pre-mRNA transcribed from a PON2 genomic sequence. In some embodiments, the ASO targets a NSAE pre-mRNA transcript from a PON2 genomic sequence comprising a NSAE exon. In some embodiments, the ASO targets a NSAE pre-mRNA transcript from a PON2 genomic sequence comprising an intron flanking the 3′ splice site of the NSAE exon and an intron flanking the 5′ splice site of a NSAE exon. In some embodiments, the ASO targets a NSAE pre-mRNA transcript comprising a sequence selected from the group consisting of premrna_ENST00000222572.8, premrna_ENST00000433091.6, premrna_ENST00000446142.5, premrna_ENST00000455123.5, premrna_ENST00000459842.1, premrna_ENST00000460873.5, premrna_ENST00000469716.1, premrna_ENST00000469926.5, premrna_ENST00000471883.1, premrna_ENST00000478801.5, premrna_ENST00000483292.5, premrna_ENST00000490778.5, premrna_ENST00000491069.5, premrna_ENST00000493290.5, premrna_ENST00000493469.5, premrna_ENST00000632034.1, premrna_ENST00000633192.1, and premrna_ENST00000633531.1. In some embodiments, the ASO targets a PON2 pre-mRNA sequence comprising a NSAE exon. In some embodiments, the ASO targets a PON2 pre-mRNA sequence comprising an intron flanking the 3′ splice site of the NSAE exon. In some embodiments, the ASO targets a PON2 pre-mRNA sequence comprising an intron flanking the 5′ splice site of the NSAE exon. In some embodiments, the transcript is selected from the group consisting of transcript_ENST00000222572.8, transcript_ENST00000433091.6, transcript_ENST00000446142.5, transcript_ENST00000455123.5, transcript_ENST00000459842.1, transcript_ENST00000460873.5, transcript_ENST00000469716.1, transcript_ENST00000469926.5, transcript_ENST00000471883.1, transcript_ENST00000478801.5, transcript_ENST00000483292.5, transcript_ENST00000490778.5, transcript_ENST00000491069.5, transcript_ENST00000493290.5, transcript_ENST00000493469.5, transcript_ENST00000632034.1, transcript_ENST00000633192.1, and transcript_ENST00000633531.1.

[0458] In some embodiments, the PON2 pre-mRNA transcript is encoded by a genetic sequence with at least about 80%, 85%, 90%, 95%, 96%, 97%, 98%, 99% or 100% sequence identity to the Ensembl reference number ENSG00000105854.13 or a complement thereof. In some embodiments, the PON2 pre-mRNA transcript comprises a sequence with at least about 80%, 85%, 90%, 95%, 96%, 97%, 98%, 99% or 100% sequence identity to a PON2 pre-mRNA transcript or a complement thereof described herein.

[0459] In some embodiments, the targeted portion of the PON2 pre-mRNA comprises a sequence with at least 80%, 85%, 90%, 95%, 97%, or 100% sequence identity to a region comprising at least 8 contiguous nucleic acids of a sequence of premrna_ENST00000222572.8, premrna_ENST00000433091.6, premrna_ENST00000446142.5, premrna_ENST00000455123.5, premrna_ENST00000459842.1, premrna_ENST00000460873.5, premrna_ENST00000469716.1, premrna_ENST00000469926.5, premrna_ENST00000471883.1, premrna_ENST00000478801.5, premrna_ENST00000483292.5, premrna_ENST00000490778.5, premrna_ENST00000491069.5, premrna_ENST00000493290.5, premrna_ENST00000493469.5, premrna_ENST00000632034.1, premrna_ENST00000633192.1, premrna_ENST00000633531.1 or a sequence of Table 3 or complements thereof. In some embodiments, the targeted portion of the PON2 pre-mRNA comprises a sequence with at least 80%, 85%, 90%, 95%, 97%, or 100% sequence identity to a region comprising at least 8 contiguous nucleic acids of a sequence selected from the group consisting of SEQ ID NO: 808-SEQ ID NO: 811 or complements thereof. In some embodiments, the targeted portion of the PON2 pre-mRNA comprises a sequence that is complementary to at least 8, 9, 10, 11, 12, 13, 14, 15, 16, 17, 18, 19 or 20 contiguous nucleic acids of a sequence of Table 6A or Table 6B or a complement thereof.

[0460] In some embodiments, the ASOs disclosed herein target a NSAE pre-mRNA transcribed from a PRMT7 genomic sequence. In some embodiments, the ASO targets a NSAE pre-mRNA transcript from a PRMT7 genomic sequence comprising a NSAE exon. In some embodiments, the ASO targets a NSAE pre-mRNA transcript from a PRMT7 genomic sequence comprising an intron flanking the 3′ splice site of the NSAE exon and an intron flanking the 5′ splice site of a NSAE exon. In some embodiments, the ASO targets a NSAE pre-mRNA transcript comprising a sequence selected from the group consisting of premrna_ENST00000339507.9, premrna_ENST00000441236.2, premrna_ENST00000449359.7, premrna_ENST00000561806.5, premrna_ENST00000562050.5, premrna_ENST00000562381.7, premrna_ENST00000562456.1, premrna_ENST00000563443.1, premrna_ENST00000563520.5, premrna_ENST00000563562.5, premrna_ENST00000563608.2, premrna_ENST00000564050.6, premrna_ENST00000564441.5, premrna_ENST00000565356.5, premrna_ENST00000565745.5, premrna_ENST00000565761.1, premrna_ENST00000565983.5, premrna_ENST00000566341.5, premrna_ENST00000566430.2, premrna_ENST00000566657.5, premrna_ENST00000566687.1, premrna_ENST00000566708.1, premrna_ENST00000567542.5, premrna_ENST00000568463.1, premrna_ENST00000568975.5, premrna_ENST00000569047.7, and premrna_ENST00000569571.5. In some embodiments, the ASO targets a PRMT7 pre-mRNA sequence comprising a NSAE exon. In some embodiments, the ASO targets a PRMT7 pre-mRNA sequence comprising an intron flanking the 3′ splice site of the NSAE exon. In some embodiments, the ASO targets a PRMT7 pre-mRNA sequence comprising an intron flanking the 5′ splice site of the NSAE exon. In some embodiments, the transcript is selected from the group consisting of transcript_ENST00000339507.9, transcript_ENST00000441236.2, transcript_ENST00000449359.7, transcript_ENST00000561806.5, transcript_ENST00000562050.5, transcript_ENST00000562381.7, transcript_ENST00000562456.1, transcript_ENST00000563443.1, transcript_ENST00000563520.5, transcript_ENST00000563562.5, transcript_ENST00000563608.2, transcript_ENST00000564050.6, transcript_ENST00000564441.5, transcript_ENST00000565356.5, transcript_ENST00000565745.5, transcript_ENST00000565761.1, transcript_ENST00000565983.5, transcript_ENST00000566341.5, transcript_ENST00000566430.2, transcript_ENST00000566657.5, transcript_ENST00000566687.1, transcript_ENST00000566708.1, transcript_ENST00000567542.5, transcript_ENST00000568463.1, transcript_ENST00000568975.5, transcript_ENST00000569047.7, and transcript_ENST00000569571.5.

[0461] In some embodiments, the PRMT7 pre-mRNA transcript is encoded by a genetic sequence with at least about 80%, 85%, 90%, 95%, 96%, 97%, 98%, 99% or 100% sequence identity to the Ensembl reference number ENSG00000132600.16 or a complement thereof. In some embodiments, the PRMT7 pre-mRNA transcript comprises a sequence with at least about 80%, 85%, 90%, 95%, 96%, 97%, 98%, 99% or 100% sequence identity to a PRMT7 pre-mRNA transcript or a complement thereof described herein.

[0462] In some embodiments, the targeted portion of the PRMT7 pre-mRNA comprises a sequence with at least 80%, 85%, 90%, 95%, 97%, or 100% sequence identity to a region comprising at least 8 contiguous nucleic acids of a sequence of premrna_ENST00000339507.9, premrna_ENST00000441236.2, premrna_ENST00000449359.7, premrna_ENST00000561806.5, premrna_ENST00000562050.5, premrna_ENST00000562381.7, premrna_ENST00000562456.1, premrna_ENST00000563443.1, premrna_ENST00000563520.5, premrna_ENST00000563562.5, premrna_ENST00000563608.2, premrna_ENST00000564050.6, premrna_ENST00000564441.5, premrna_ENST00000565356.5, premrna_ENST00000565745.5, premrna_ENST00000565761.1, premrna_ENST00000565983.5, premrna_ENST00000566341.5, premrna_ENST00000566430.2, premrna_ENST00000566657.5, premrna_ENST00000566687.1, premrna_ENST00000566708.1, premrna_ENST00000567542.5, premrna_ENST00000568463.1, premrna_ENST00000568975.5, premrna_ENST00000569047.7, premrna_ENST00000569571.5 or a sequence of Table 3 or complements thereof. In some embodiments, the targeted portion of the PRMT7 pre-mRNA comprises a sequence with at least 80%, 85%, 90%, 95%, 97%, or 100% sequence identity to a region comprising at least 8 contiguous nucleic acids of a sequence selected from the group consisting of SEQ ID NO: 812-SEQ ID NO: 815 or complements thereof. In some embodiments, the targeted portion of the PRMT7 pre-mRNA comprises a sequence that is complementary to at least 8, 9, 10, 11, 12, 13, 14, 15, 16, 17, 18, 19 or 20 contiguous nucleic acids of a sequence of Table 6A or Table 6B or a complement thereof.

[0463] In some embodiments, the ASOs disclosed herein target a NSAE pre-mRNA transcribed from a PRODH genomic sequence. In some embodiments, the ASO targets a NSAE pre-mRNA transcript from a PRODH genomic sequence comprising a NSAE exon. In some embodiments, the ASO targets a NSAE pre-mRNA transcript from a PRODH genomic sequence comprising an intron flanking the 3′ splice site of the NSAE exon and an intron flanking the 5′ splice site of a NSAE exon. In some embodiments, the ASO targets a NSAE pre-mRNA transcript comprising a sequence selected from the group consisting of premrna_ENST00000313755.9, premrna_ENST00000334029.6, premrna_ENST00000357068.10, premrna_ENST00000399694.1, premrna_ENST00000420436.5, premrna_ENST00000429300.5, premrna_ENST00000438924.5, premrna_ENST00000446371.1, premrna_ENST00000450579.1, premrna_ENST00000457083.1, premrna_ENST00000482858.5, premrna_ENST00000491604.5, premrna_ENST00000496625.1, premrna_ENST00000609229.1, and premrna_ENST00000610940.4. In some embodiments, the ASO targets a PRODH pre-mRNA sequence comprising a NSAE exon. In some embodiments, the ASO targets a PRODH pre-mRNA sequence comprising an intron flanking the 3′ splice site of the NSAE exon. In some embodiments, the ASO targets a PRODH pre-mRNA sequence comprising an intron flanking the 5′ splice site of the NSAE exon. In some embodiments, the transcript is selected from the group consisting of transcript_ENST00000313755.9, transcript_ENST00000334029.6, transcript_ENST00000357068.10, transcript_ENST00000399694.1, transcript_ENST00000420436.5, transcript_ENST00000429300.5, transcript_ENST00000438924.5, transcript_ENST00000446371.1, transcript_ENST00000450579.1, transcript_ENST00000457083.1, transcript_ENST00000482858.5, transcript_ENST00000491604.5, transcript_ENST00000496625.1, transcript_ENST00000609229.1, and transcript_ENST00000610940.4.

[0464] In some embodiments, the PRODH pre-mRNA transcript is encoded by a genetic sequence with at least about 80%, 85%, 90%, 95%, 96%, 97%, 98%, 99% or 100% sequence identity to the Ensembl reference number ENSG00000100033.16 or a complement thereof. In some embodiments, the PRODH pre-mRNA transcript comprises a sequence with at least about 80%, 85%, 90%, 95%, 96%, 97%, 98%, 99% or 100% sequence identity to a PRODH pre-mRNA transcript or a complement thereof described herein.

[0465] In some embodiments, the targeted portion of the PRODH pre-mRNA comprises a sequence with at least 80%, 85%, 90%, 95%, 97%, or 100% sequence identity to a region comprising at least 8 contiguous nucleic acids of a sequence of premrna_ENST00000313755.9, premrna_ENST00000334029.6, premrna_ENST00000357068.10, premrna_ENST00000399694.1, premrna_ENST00000420436.5, premrna_ENST00000429300.5, premrna_ENST00000438924.5, premrna_ENST00000446371.1, premrna_ENST00000450579.1, premrna_ENST00000457083.1, premrna_ENST00000482858.5, premrna_ENST00000491604.5, premrna_ENST00000496625.1, premrna_ENST00000609229.1, premrna_ENST00000610940.4, or a sequence of Table 3 or complements thereof. In some embodiments, the targeted portion of the PRODH pre-mRNA comprises a sequence with at least 80%, 85%, 90%, 95%, 97%, or 100% sequence identity to a region comprising at least 8 contiguous nucleic acids of a sequence selected from the group consisting of SEQ ID NO: 816-SEQ ID NO: 819 or complements thereof. In some embodiments, the targeted portion of the PRODH pre-mRNA comprises a sequence that is complementary to at least 8, 9, 10, 11, 12, 13, 14, 15, 16, 17, 18, 19 or 20 contiguous nucleic acids of a sequence of Table 6A or Table 6B or a complement thereof.

[0466] In some embodiments, the ASOs disclosed herein target a NSAE pre-mRNA transcribed from a PRPF3 genomic sequence. In some embodiments, the ASO targets a NSAE pre-mRNA transcript from a PRPF3 genomic sequence comprising a NSAE exon. In some embodiments, the ASO targets a NSAE pre-mRNA transcript from a PRPF3 genomic sequence comprising an intron flanking the 3′ splice site of the NSAE exon and an intron flanking the 5′ splice site of a NSAE exon. In some embodiments, the ASO targets a NSAE pre-mRNA transcript comprising a sequence selected from the group consisting of premrna_ENST00000324862.7, premrna_ENST00000467329.5, premrna_ENST00000467514.1, premrna_ENST00000470824.1, premrna_ENST00000476970.1, premrna_ENST00000493553.1, and premrna_ENST00000496202.5. In some embodiments, the ASO targets a PRPF3 pre-mRNA sequence comprising a NSAE exon. In some embodiments, the ASO targets a PRPF3 pre-mRNA sequence comprising an intron flanking the 3′ splice site of the NSAE exon. In some embodiments, the ASO targets a PRPF3 pre-mRNA sequence comprising an intron flanking the 5′ splice site of the NSAE exon. In some embodiments, the transcript is selected from the group consisting of transcript_ENST00000324862.7, transcript_ENST00000467329.5, transcript_ENST00000467514.1, transcript_ENST00000470824.1, transcript_ENST00000476970.1, transcript_ENST00000493553.1, and transcript_ENST00000496202.5.

[0467] In some embodiments, the PRPF3 pre-mRNA transcript is encoded by a genetic sequence with at least about 80%, 85%, 90%, 95%, 96%, 97%, 98%, 99% or 100% sequence identity to the Ensembl reference number ENSG00000117360.13 or a complement thereof. In some embodiments, the PRPF3 pre-mRNA transcript comprises a sequence with at least about 80%, 85%, 90%, 95%, 96%, 97%, 98%, 99% or 100% sequence identity to a PRPF3 pre-mRNA transcript or a complement thereof described herein.

[0468] In some embodiments, the targeted portion of the PRPF3 pre-mRNA comprises a sequence with at least 80%, 85%, 90%, 95%, 97%, or 100% sequence identity to a region comprising at least 8 contiguous nucleic acids of a sequence of premrna_ENST00000324862.7, premrna_ENST00000467329.5, premrna_ENST00000467514.1, premrna_ENST00000470824.1, premrna_ENST00000476970.1, premrna_ENST00000493553.1, premrna_ENST00000496202.5, or a sequence of Table 3 or complements thereof. In some embodiments, the targeted portion of the PRPF3 pre-mRNA comprises a sequence with at least 80%, 85%, 90%, 95%, 97%, or 100% sequence identity to a region comprising at least 8 contiguous nucleic acids of a sequence selected from the group consisting of SEQ ID NO: 820-SEQ ID NO: 823 or complements thereof. In some embodiments, the targeted portion of the PRPF3 pre-mRNA comprises a sequence that is complementary to at least 8, 9, 10, 11, 12, 13, 14, 15, 16, 17, 18, 19 or 20 contiguous nucleic acids of a sequence of Table 6A or Table 6B or a complement thereof.

[0469] In some embodiments, the ASOs disclosed herein target a NSAE pre-mRNA transcribed from a PRPF4 genomic sequence. In some embodiments, the ASO targets a NSAE pre-mRNA transcript from a PRPF4 genomic sequence comprising a NSAE exon. In some embodiments, the ASO targets a NSAE pre-mRNA transcript from a PRPF4 genomic sequence comprising an intron flanking the 3′ splice site of the NSAE exon and an intron flanking the 5′ splice site of a NSAE exon. In some embodiments, the ASO targets a NSAE pre-mRNA transcript comprising a sequence selected from the group consisting of premrna_ENST00000374198.4, premrna_ENST00000374199.8, and premrna_ENST00000488937.1. In some embodiments, the ASO targets a PRPF4 pre-mRNA sequence comprising a NSAE exon. In some embodiments, the ASO targets a PRPF4 pre-mRNA sequence comprising an intron flanking the 3′ splice site of the NSAE exon. In some embodiments, the ASO targets a PRPF4 pre-mRNA sequence comprising an intron flanking the 5′ splice site of the NSAE exon. In some embodiments, the transcript is selected from the group consisting of transcript_ENST00000374198.4, transcript_ENST00000374199.8, and transcript_ENST00000488937.1

[0470] In some embodiments, the PRPF4 pre-mRNA transcript is encoded by a genetic sequence with at least about 80%, 85%, 90%, 95%, 96%, 97%, 98%, 99% or 100% sequence identity to the Ensembl reference number ENSG00000136875.13 or a complement thereof. In some embodiments, the PRPF4 pre-mRNA transcript comprises a sequence with at least about 80%, 85%, 90%, 95%, 96%, 97%, 98%, 99% or 100% sequence identity to a PRPF4 pre-mRNA transcript or a complement thereof described herein.

[0471] In some embodiments, the targeted portion of the PRPF4 pre-mRNA comprises a sequence with at least 80%, 85%, 90%, 95%, 97%, or 100% sequence identity to a region comprising at least 8 contiguous nucleic acids of a sequence of premrna_ENST00000374198.4, premrna_ENST00000374199.8, premrna_ENST00000488937.1, or a sequence of Table 3 or complements thereof. In some embodiments, the targeted portion of the PRPF4 pre-mRNA comprises a sequence with at least 80%, 85%, 90%, 95%, 97%, or 100% sequence identity to a region comprising at least 8 contiguous nucleic acids of a sequence selected from the group consisting of SEQ ID NO: 824-SEQ ID NO: 827 or complements thereof. In some embodiments, the targeted portion of the PRPF4 pre-mRNA comprises a sequence that is complementary to at least 8, 9, 10, 11, 12, 13, 14, 15, 16, 17, 18, 19 or 20 contiguous nucleic acids of a sequence of Table 6A or Table 6B or a complement thereof.

[0472] In some embodiments, the ASOs disclosed herein target a NSAE pre-mRNA transcribed from a PYCR1 genomic sequence. In some embodiments, the ASO targets a NSAE pre-mRNA transcript from a PYCR1 genomic sequence comprising a NSAE exon. In some embodiments, the ASO targets a NSAE pre-mRNA transcript from a PYCR1 genomic sequence comprising an intron flanking the 3′ splice site of the NSAE exon and an intron flanking the 5′ splice site of a NSAE exon. In some embodiments, the ASO targets a NSAE pre-mRNA transcript comprising a sequence selected from the group consisting of premrna_ENST00000329875.13, premrna_ENST00000337943.9, premrna_ENST00000402252.6, premrna_ENST00000403172.8, premrna_ENST00000405481.8, premrna_ENST00000577624.5, premrna_ENST00000577756.5, premrna_ENST00000579366.5, premrna_ENST00000579698.5, premrna_ENST00000581271.5, premrna_ENST00000582198.5, premrna_ENST00000583564.5, premrna_ENST00000584848.5, premrna_ENST00000585215.5, premrna_ENST00000585244.1, premrna_ENST00000619204.4, and premrna_ENST00000629768.2. In some embodiments, the ASO targets a PYCR1 pre-mRNA sequence comprising a NSAE exon. In some embodiments, the ASO targets a PYCR1 pre-mRNA sequence comprising an intron flanking the 3′ splice site of the NSAE exon. In some embodiments, the ASO targets a PYCR1 pre-mRNA sequence comprising an intron flanking the 5′ splice site of the NSAE exon. In some embodiments, the transcript is selected from the group consisting of transcript_ENST00000329875.13, transcript_ENST00000337943.9, transcript_ENST00000402252.6, transcript_ENST00000403172.8, transcript_ENST00000405481.8, transcript_ENST00000577624.5, transcript_ENST00000577756.5, transcript_ENST00000579366.5, transcript_ENST00000579698.5, transcript_ENST00000581271.5, transcript_ENST00000582198.5, transcript_ENST00000583564.5, transcript_ENST00000584848.5, transcript_ENST00000585215.5, transcript_ENST00000585244.1, transcript_ENST00000619204.4, and transcript_ENST00000629768.2.

[0473] In some embodiments, the PYCR1 pre-mRNA transcript is encoded by a genetic sequence with at least about 80%, 85%, 90%, 95%, 96%, 97%, 98%, 99% or 100% sequence identity to the Ensembl reference number ENSG00000183010.17 or a complement thereof. In some embodiments, the PYCR1 pre-mRNA transcript comprises a sequence with at least about 80%, 85%, 90%, 95%, 96%, 97%, 98%, 99% or 100% sequence identity to a PYCR1 pre-mRNA transcript or a complement thereof described herein.

[0474] In some embodiments, the targeted portion of the PYCR1 pre-mRNA comprises a sequence with at least 80%, 85%, 90%, 95%, 97%, or 100% sequence identity to a region comprising at least 8 contiguous nucleic acids of a sequence of premrna_ENST00000329875.13, premrna_ENST00000337943.9, premrna_ENST00000402252.6, premrna_ENST00000403172.8, premrna_ENST00000405481.8, premrna_ENST00000577624.5, premrna_ENST00000577756.5, premrna_ENST00000579366.5, premrna_ENST00000579698.5, premrna_ENST00000581271.5, premrna_ENST00000582198.5, premrna_ENST00000583564.5, premrna_ENST00000584848.5, premrna_ENST00000585215.5, premrna_ENST00000585244.1, premrna_ENST00000619204.4, premrna_ENST00000629768.2 or a sequence of Table 3 or complements thereof. In some embodiments, the targeted portion of the PYCR1 pre-mRNA comprises a sequence with at least 80%, 85%, 90%, 95%, 97%, or 100% sequence identity to a region comprising at least 8 contiguous nucleic acids of a sequence selected from the group consisting of SEQ ID NO: 828-SEQ ID NO: 831 or complements thereof. In some embodiments, the targeted portion of the PYCR1 pre-mRNA comprises a sequence that is complementary to at least 8, 9, 10, 11, 12, 13, 14, 15, 16, 17, 18, 19 or 20 contiguous nucleic acids of a sequence of Table 6A or Table 6B or a complement thereof.

[0475] In some embodiments, the ASOs disclosed herein target a NSAE pre-mRNA transcribed from a RAD52 genomic sequence. In some embodiments, the ASO targets a NSAE pre-mRNA transcript from a RAD52 genomic sequence comprising a NSAE exon. In some embodiments, the ASO targets a NSAE pre-mRNA transcript from a RAD52 genomic sequence comprising an intron flanking the 3′ splice site of the NSAE exon and an intron flanking the 5′ splice site of a NSAE exon. In some embodiments, the ASO targets a NSAE pre-mRNA transcript comprising a sequence selected from the group consisting of premrna_ENST00000228345.9, premrna_ENST00000358495.8, premrna_ENST00000397230.6, premrna_ENST00000430095.6, premrna_ENST00000461568.5, premrna_ENST00000463750.5, premrna_ENST00000468231.5, premrna_ENST00000481052.5, premrna_ENST00000488642.6, premrna_ENST00000535376.5, premrna_ENST00000536177.5, premrna_ENST00000541619.1, premrna_ENST00000542297.1, premrna_ENST00000542584.5, premrna_ENST00000542785.5, premrna_ENST00000543912.5, premrna_ENST00000544742.5, premrna_ENST00000545564.5, and premrna_ENST00000545967.1.

[0476] In some embodiments, the ASO targets a RAD52 pre-mRNA sequence comprising a NSAE exon. In some embodiments, the ASO targets a RAD52 pre-mRNA sequence comprising an intron flanking the 3′ splice site of the NSAE exon. In some embodiments, the ASO targets a RAD52 pre-mRNA sequence comprising an intron flanking the 5′ splice site of the NSAE exon. In some embodiments, the transcript is selected from the group consisting of transcript_ENST00000228345.9, transcript_ENST00000358495.8, transcript_ENST00000397230.6, transcript_ENST00000430095.6, transcript_ENST00000461568.5, transcript_ENST00000463750.5, transcript_ENST00000468231.5, transcript_ENST00000481052.5, transcript_ENST00000488642.6, transcript_ENST00000535376.5, transcript_ENST00000536177.5, transcript_ENST00000541619.1, transcript_ENST00000542297.1, transcript_ENST00000542584.5, transcript_ENST00000542785.5, transcript_ENST00000543912.5, transcript_ENST00000544742.5, transcript_ENST00000545564.5, and transcript_ENST00000545967.1.

[0477] In some embodiments, the RAD52 pre-mRNA transcript is encoded by a genetic sequence with at least about 80%, 85%, 90%, 95%, 96%, 97%, 98%, 99% or 100% sequence identity to the Ensembl reference number ENSG00000002016.18 or a complement thereof. In some embodiments, the RAD52 pre-mRNA transcript comprises a sequence with at least about 80%, 85%, 90%, 95%, 96%, 97%, 98%, 99% or 100% sequence identity to a RAD52 pre-mRNA transcript or a complement thereof described herein.

[0478] In some embodiments, the targeted portion of the RAD52 pre-mRNA comprises a sequence with at least 80%, 85%, 90%, 95%, 97%, or 100% sequence identity to a region comprising at least 8 contiguous nucleic acids of a sequence of premrna_ENST00000228345.9, premrna_ENST00000358495.8, premrna_ENST00000397230.6, premrna_ENST00000430095.6, premrna_ENST00000461568.5, premrna_ENST00000463750.5, premrna_ENST00000468231.5, premrna_ENST00000481052.5, premrna_ENST00000488642.6, premrna_ENST00000535376.5, premrna_ENST00000536177.5, premrna_ENST00000541619.1, premrna_ENST00000542297.1, premrna_ENST00000542584.5, premrna_ENST00000542785.5, premrna_ENST00000543912.5, premrna_ENST00000544742.5, premrna_ENST00000545564.5, premrna_ENST00000545967.1, or a sequence of Table 3 or complements thereof. In some embodiments, the targeted portion of the RAD52 pre-mRNA comprises a sequence with at least 80%, 85%, 90%, 95%, 97%, or 100% sequence identity to a region comprising at least 8 contiguous nucleic acids of a sequence selected from the group consisting of SEQ ID NO: 832-SEQ ID NO: 839 or complements thereof. In some embodiments, the targeted portion of the RAD52 pre-mRNA comprises a sequence that is complementary to at least 8, 9, 10, 11, 12, 13, 14, 15, 16, 17, 18, 19 or 20 contiguous nucleic acids of a sequence of Table 6A or Table 6B or a complement thereof.

[0479] In some embodiments, the ASOs disclosed herein target a NSAE pre-mRNA transcribed from a REXO1 genomic sequence. In some embodiments, the ASO targets a NSAE pre-mRNA transcript from a REXO1 genomic sequence comprising a NSAE exon. In some embodiments, the ASO targets a NSAE pre-mRNA transcript from a REXO1 genomic sequence comprising an intron flanking the 3′ splice site of the NSAE exon and an intron flanking the 5′ splice site of a NSAE exon. In some embodiments, the ASO targets a NSAE pre-mRNA transcript comprising a sequence selected from the group consisting of premrna_ENST00000170168.9, premrna_ENST00000586291.1, premrna_ENST00000586343.2, premrna_ENST00000587404.1, premrna_ENST00000587524.1, premrna_ENST00000588743.2, premrna_ENST00000590936.5, and premrna_ENST00000643515.1. In some embodiments, the ASO targets a REXO1 pre-mRNA sequence comprising a NSAE exon. In some embodiments, the ASO targets a REXO1 pre-mRNA sequence comprising an intron flanking the 3′ splice site of the NSAE exon. In some embodiments, the ASO targets a REXO1 pre-mRNA sequence comprising an intron flanking the 5′ splice site of the NSAE exon. In some embodiments, the transcript is selected from the group consisting of transcript_ENST00000170168.9, transcript_ENST00000586291.1, transcript_ENST00000586343.2, transcript_ENST00000587404.1, transcript_ENST00000587524.1, transcript_ENST00000588743.2, transcript_ENST00000590936.5, and transcript_ENST00000643515.1.

[0480] In some embodiments, the REXO1 pre-mRNA transcript is encoded by a genetic sequence with at least about 80%, 85%, 90%, 95%, 96%, 97%, 98%, 99% or 100% sequence identity to the Ensembl reference number ENSG00000079313.15 or a complement thereof. In some embodiments, the REXO1 pre-mRNA transcript comprises a sequence with at least about 80%, 85%, 90%, 95%, 96%, 97%, 98%, 99% or 100% sequence identity to a REXO1 pre-mRNA transcript or a complement thereof described herein.

[0481] In some embodiments, the targeted portion of the REXO1 pre-mRNA comprises a sequence with at least 80%, 85%, 90%, 95%, 97%, or 100% sequence identity to a region comprising at least 8 contiguous nucleic acids of a sequence of premrna_ENST00000170168.9, premrna_ENST00000586291.1, premrna_ENST00000586343.2, premrna_ENST00000587404.1, premrna_ENST00000587524.1, premrna_ENST00000588743.2, premrna_ENST00000590936.5, premrna_ENST00000643515.1 or a sequence of Table 3 or complements thereof. In some embodiments, the targeted portion of the REXO1 pre-mRNA comprises a sequence with at least 80%, 85%, 90%, 95%, 97%, or 100% sequence identity to a region comprising at least 8 contiguous nucleic acids of a sequence selected from the group consisting of SEQ ID NO: 840-SEQ ID NO: 847 or complements thereof. In some embodiments, the targeted portion of the REXO1 pre-mRNA comprises a sequence that is complementary to at least 8, 9, 10, 11, 12, 13, 14, 15, 16, 17, 18, 19 or 20 contiguous nucleic acids of a sequence of Table 6A or Table 6B or a complement thereof.

[0482] In some embodiments, the ASOs disclosed herein target a NSAE pre-mRNA transcribed from a RFX5 genomic sequence. In some embodiments, the ASO targets a NSAE pre-mRNA transcript from a RFX5 genomic sequence comprising a NSAE exon. In some embodiments, the ASO targets a NSAE pre-mRNA transcript from a RFX5 genomic sequence comprising an intron flanking the 3′ splice site of the NSAE exon and an intron flanking the 5′ splice site of a NSAE exon. In some embodiments, the ASO targets a NSAE pre-mRNA transcript comprising a sequence selected from the group consisting of premrna_ENST00000290524.8, premrna_ENST00000368870.6, premrna_ENST00000392746.7, premrna_ENST00000412774.5, premrna_ENST00000421986.5, premrna_ENST00000422595.5, premrna_ENST00000430227.5, premrna_ENST00000435314.5, premrna_ENST00000436271.5, premrna_ENST00000436637.5, premrna_ENST00000437327.5, premrna_ENST00000444392.5, premrna_ENST00000450506.5, premrna_ENST00000452456.1, premrna_ENST00000452671.6, premrna_ENST00000458484.5, premrna_ENST00000469513.5, premrna_ENST00000475144.1, premrna_ENST00000478564.5, premrna_ENST00000479681.5, and premrna_ENST00000494217.5. In some embodiments, the ASO targets a RFX5 pre-mRNA sequence comprising a NSAE exon. In some embodiments, the ASO targets a RFX5 pre-mRNA sequence comprising an intron flanking the 3′ splice site of the NSAE exon. In some embodiments, the ASO targets a RFX5 pre-mRNA sequence comprising an intron flanking the 5′ splice site of the NSAE exon. In some embodiments, the transcript is selected from the group consisting of transcript_ENST00000290524.8, transcript_ENST00000368870.6, transcript_ENST00000392746.7, transcript_ENST00000412774.5, transcript_ENST00000421986.5, transcript_ENST00000422595.5, transcript_ENST00000430227.5, transcript_ENST00000435314.5, transcript_ENST00000436271.5, transcript_ENST00000436637.5, transcript_ENST00000437327.5, transcript_ENST00000444392.5, transcript_ENST00000450506.5, transcript_ENST00000452456.1, transcript_ENST00000452671.6, transcript_ENST00000458484.5, transcript_ENST00000469513.5, transcript_ENST00000475144.1, transcript_ENST00000478564.5, transcript_ENST00000479681.5, and transcript_ENST00000494217.5.

[0483] In some embodiments, the RFX5 pre-mRNA transcript is encoded by a genetic sequence with at least about 80%, 85%, 90%, 95%, 96%, 97%, 98%, 99% or 100% sequence identity to the Ensembl reference number ENSG00000143390.17 or a complement thereof. In some embodiments, the RFX5 pre-mRNA transcript comprises a sequence with at least about 80%, 85%, 90%, 95%, 96%, 97%, 98%, 99% or 100% sequence identity to a RFX5 pre-mRNA transcript or a complement thereof described herein.

[0484] In some embodiments, the targeted portion of the RFX5 pre-mRNA comprises a sequence with at least 80%, 85%, 90%, 95%, 97%, or 100% sequence identity to a region comprising at least 8 contiguous nucleic acids of a sequence of premrna_ENST00000290524.8, premrna_ENST00000368870.6, premrna_ENST00000392746.7, premrna_ENST00000412774.5, premrna_ENST00000421986.5, premrna_ENST00000422595.5, premrna_ENST00000430227.5, premrna_ENST00000435314.5, premrna_ENST00000436271.5, premrna_ENST00000436637.5, premrna_ENST00000437327.5, premrna_ENST00000444392.5, premrna_ENST00000450506.5, premrna_ENST00000452456.1, premrna_ENST00000452671.6, premrna_ENST00000458484.5, premrna_ENST00000469513.5, premrna_ENST00000475144.1, premrna_ENST00000478564.5, premrna_ENST00000479681.5, premrna_ENST00000494217.5 or a sequence of Table 3 or complements thereof. In some embodiments, the targeted portion of the RFX5 pre-mRNA comprises a sequence with at least 80%, 85%, 90%, 95%, 97%, or 100% sequence identity to a region comprising at least 8 contiguous nucleic acids of a sequence selected from the group consisting of SEQ ID NO: 848-SEQ ID NO: 853 or complements thereof. In some embodiments, the targeted portion of the RFX5 pre-mRNA comprises a sequence that is complementary to at least 8, 9, 10, 11, 12, 13, 14, 15, 16, 17, 18, 19 or 20 contiguous nucleic acids of a sequence of Table 6A or Table 6B or a complement thereof.

[0485] In some embodiments, the ASOs disclosed herein target a NSAE pre-mRNA transcribed from a RHBDF2 genomic sequence. In some embodiments, the ASO targets a NSAE pre-mRNA transcript from a RHBDF2 genomic sequence comprising a NSAE exon. In some embodiments, the ASO targets a NSAE pre-mRNA transcript from a RHBDF2 genomic sequence comprising an intron flanking the 3′ splice site of the NSAE exon and an intron flanking the 5′ splice site of a NSAE exon. In some embodiments, the ASO targets a NSAE pre-mRNA transcript comprising a sequence selected from the group consisting of premrna_ENST00000313080.8, premrna_ENST00000585701.5, premrna_ENST00000585989.5, premrna_ENST00000587640.1, premrna_ENST00000589526.5, premrna_ENST00000589582.5, premrna_ENST00000590168.5, premrna_ENST00000590288.1, premrna_ENST00000590322.1, premrna_ENST00000591192.1, premrna_ENST00000591255.5, premrna_ENST00000591697.5, premrna_ENST00000591860.1, premrna_ENST00000591879.1, premrna_ENST00000591885.5, premrna_ENST00000592123.5, premrna_ENST00000592378.5, and premrna_ENST00000593103.1. In some embodiments, the ASO targets a RHBDF2 pre-mRNA sequence comprising a NSAE exon. In some embodiments, the ASO targets a RHBDF2 pre-mRNA sequence comprising an intron flanking the 3′ splice site of the NSAE exon. In some embodiments, the ASO targets a RHBDF2 pre-mRNA sequence comprising an intron flanking the 5′ splice site of the NSAE exon. In some embodiments, the transcript is selected from the group consisting of transcript_ENST00000313080.8, transcript_ENST00000585701.5, transcript_ENST00000585989.5, transcript_ENST00000587640.1, transcript_ENST00000589526.5, transcript_ENST00000589582.5, transcript_ENST00000590168.5, transcript_ENST00000590288.1, transcript_ENST00000590322.1, transcript_ENST00000591192.1, transcript_ENST00000591255.5, transcript_ENST00000591697.5, transcript_ENST00000591860.1, transcript_ENST00000591879.1, transcript_ENST00000591885.5, transcript_ENST00000592123.5, transcript_ENST00000592378.5, and transcript_ENST00000593103.1.

[0486] In some embodiments, the RHBDF2 pre-mRNA transcript is encoded by a genetic sequence with at least about 80%, 85%, 90%, 95%, 96%, 97%, 98%, 99% or 100% sequence identity to the Ensembl reference number ENSG00000129667.12 or a complement thereof. In some embodiments, the RHBDF2 pre-mRNA transcript comprises a sequence with at least about 80%, 85%, 90%, 95%, 96%, 97%, 98%, 99% or 100% sequence identity to a RHBDF2 pre-mRNA transcript or a complement thereof described herein.

[0487] In some embodiments, the targeted portion of the RHBDF2 pre-mRNA comprises a sequence with at least 80%, 85%, 90%, 95%, 97%, or 100% sequence identity to a region comprising at least 8 contiguous nucleic acids of a sequence of premrna_ENST00000313080.8, premrna_ENST00000585701.5, premrna_ENST00000585989.5, premrna_ENST00000587640.1, premrna_ENST00000589526.5, premrna_ENST00000589582.5, premrna_ENST00000590168.5, premrna_ENST00000590288.1, premrna_ENST00000590322.1, premrna_ENST00000591192.1, premrna_ENST00000591255.5, premrna_ENST00000591697.5, premrna_ENST00000591860.1, premrna_ENST00000591879.1, premrna_ENST00000591885.5, premrna_ENST00000592123.5, premrna_ENST00000592378.5, premrna_ENST00000593103.1 or a sequence of Table 3 or complements thereof. In some embodiments, the targeted portion of the RHBDF2 pre-mRNA comprises a sequence with at least 80%, 85%, 90%, 95%, 97%, or 100% sequence identity to a region comprising at least 8 contiguous nucleic acids of a sequence selected from the group consisting of SEQ ID NO: 854-SEQ ID NO: 857 or complements thereof. In some embodiments, the targeted portion of the RHBDF2 pre-mRNA comprises a sequence that is complementary to at least 8, 9, 10, 11, 12, 13, 14, 15, 16, 17, 18, 19 or 20 contiguous nucleic acids of a sequence of Table 6A or Table 6B or a complement thereof.

[0488] In some embodiments, the ASOs disclosed herein target a NSAE pre-mRNA transcribed from a RMND1 genomic sequence. In some embodiments, the ASO targets a NSAE pre-mRNA transcript from a RMND1 genomic sequence comprising a NSAE exon. In some embodiments, the ASO targets a NSAE pre-mRNA transcript from a RMND1 genomic sequence comprising an intron flanking the 3′ splice site of the NSAE exon and an intron flanking the 5′ splice site of a NSAE exon. In some embodiments, the ASO targets a NSAE pre-mRNA transcript comprising a sequence selected from the group consisting of premrna_ENST00000336451.8, premrna_ENST00000444024.3, premrna_ENST00000491268.2, premrna_ENST00000622845.5, premrna_ENST00000643550.1, premrna_ENST00000643564.1, premrna_ENST00000644054.1, premrna_ENST00000644711.1, premrna_ENST00000645367.1, premrna_ENST00000645895.1, premrna_ENST00000645917.1, and premrna_ENST00000646926.1. In some embodiments, the ASO targets a RMND1 pre-mRNA sequence comprising a NSAE exon. In some embodiments, the ASO targets a RMND1 pre-mRNA sequence comprising an intron flanking the 3′ splice site of the NSAE exon. In some embodiments, the ASO targets a RMND1 pre-mRNA sequence comprising an intron flanking the 5′ splice site of the NSAE exon. In some embodiments, the transcript is selected from the group consisting of transcript_ENST00000336451.8, transcript_ENST00000444024.3, transcript_ENST00000491268.2, transcript_ENST00000622845.5, transcript_ENST00000643550.1, transcript_ENST00000643564.1, transcript_ENST00000644054.1, transcript_ENST00000644711.1, transcript_ENST00000645367.1, transcript_ENST00000645895.1, transcript_ENST00000645917.1, and transcript_ENST00000646926.1.

[0489] In some embodiments, the RMND1 pre-mRNA transcript is encoded by a genetic sequence with at least about 80%, 85%, 90%, 95%, 96%, 97%, 98%, 99% or 100% sequence identity to the Ensembl reference number ENSG00000155906.19 or a complement thereof. In some embodiments, the RMND1 pre-mRNA transcript comprises a sequence with at least about 80%, 85%, 90%, 95%, 96%, 97%, 98%, 99% or 100% sequence identity to a RMND1 pre-mRNA transcript or a complement thereof described herein.

[0490] In some embodiments, the targeted portion of the RMND1 pre-mRNA comprises a sequence with at least 80%, 85%, 90%, 95%, 97%, or 100% sequence identity to a region comprising at least 8 contiguous nucleic acids of a sequence of premrna_ENST00000336451.8, premrna_ENST00000444024.3, premrna_ENST00000491268.2, premrna_ENST00000622845.5, premrna_ENST00000643550.1, premrna_ENST00000643564.1, premrna_ENST00000644054.1, premrna_ENST00000644711.1, premrna_ENST00000645367.1, premrna_ENST00000645895.1, premrna_ENST00000645917.1, premrna_ENST00000646926.1 or a sequence of Table 3 or complements thereof. In some embodiments, the targeted portion of the RMND1 pre-mRNA comprises a sequence with at least 80%, 85%, 90%, 95%, 97%, or 100% sequence identity to a region comprising at least 8 contiguous nucleic acids of a sequence selected from the group consisting of SEQ ID NO: 858-SEQ ID NO: 861 or complements thereof. In some embodiments, the targeted portion of the RMND1 pre-mRNA comprises a sequence that is complementary to at least 8, 9, 10, 11, 12, 13, 14, 15, 16, 17, 18, 19 or 20 contiguous nucleic acids of a sequence of Table 6A or Table 6B or a complement thereof.

[0491] In some embodiments, the ASOs disclosed herein target a NSAE pre-mRNA transcribed from a ROBO3 genomic sequence. In some embodiments, the ASO targets a NSAE pre-mRNA transcript from a ROBO3 genomic sequence comprising a NSAE exon. In some embodiments, the ASO targets a NSAE pre-mRNA transcript from a ROBO3 genomic sequence comprising an intron flanking the 3′ splice site of the NSAE exon and an intron flanking the 5′ splice site of a NSAE exon. In some embodiments, the ASO targets a NSAE pre-mRNA transcript comprising a sequence selected from the group consisting of premrna_ENST00000397801.6, premrna_ENST00000524971.1, premrna_ENST00000525304.5, premrna_ENST00000525448.5, premrna_ENST00000525482.5, premrna_ENST00000526551.5, premrna_ENST00000527196.5, premrna_ENST00000527245.5, premrna_ENST00000528068.5, premrna_ENST00000528144.5, premrna_ENST00000528820.5, premrna_ENST00000529658.5, premrna_ENST00000530647.5, premrna_ENST00000531075.5, premrna_ENST00000531119.1, premrna_ENST00000531545.5, premrna_ENST00000531888.1, premrna_ENST00000532472.1, premrna_ENST00000534598.5, premrna_ENST00000538940.5, and premrna_ENST00000543966.5.

[0492] In some embodiments, the ASO targets a ROBO3 pre-mRNA sequence comprising a NSAE exon. In some embodiments, the ASO targets a ROBO3 pre-mRNA sequence comprising an intron flanking the 3′ splice site of the NSAE exon. In some embodiments, the ASO targets a ROBO3 pre-mRNA sequence comprising an intron flanking the 5′ splice site of the NSAE exon. In some embodiments, the transcript is selected from the group consisting of transcript_ENST00000397801.6, transcript_ENST00000524971.1, transcript_ENST00000525304.5, transcript_ENST00000525448.5, transcript_ENST00000525482.5, transcript_ENST00000526551.5, transcript_ENST00000527196.5, transcript_ENST00000527245.5, transcript_ENST00000528068.5, transcript_ENST00000528144.5, transcript_ENST00000528820.5, transcript_ENST00000529658.5, transcript_ENST00000530647.5, transcript_ENST00000531075.5, transcript_ENST00000531119.1, transcript_ENST00000531545.5, transcript_ENST00000531888.1, transcript_ENST00000532472.1, transcript_ENST00000534598.5, transcript_ENST00000538940.5, and transcript_ENST00000543966.5.

[0493] In some embodiments, the ROBO3 pre-mRNA transcript is encoded by a genetic sequence with at least about 80%, 85%, 90%, 95%, 96%, 97%, 98%, 99% or 100% sequence identity to the Ensembl reference number ENSG00000154134.15 or a complement thereof. In some embodiments, the ROBO3 pre-mRNA transcript comprises a sequence with at least about 80%, 85%, 90%, 95%, 96%, 97%, 98%, 99% or 100% sequence identity to a ROBO3 pre-mRNA transcript or a complement thereof described herein.

[0494] In some embodiments, the targeted portion of the ROBO3 pre-mRNA comprises a sequence with at least 80%, 85%, 90%, 95%, 97%, or 100% sequence identity to a region comprising at least 8 contiguous nucleic acids of a sequence of premrna_ENST00000397801.6, premrna_ENST00000524971.1, premrna_ENST00000525304.5, premrna_ENST00000525448.5, premrna_ENST00000525482.5, premrna_ENST00000526551.5, premrna_ENST00000527196.5, premrna_ENST00000527245.5, premrna_ENST00000528068.5, premrna_ENST00000528144.5, premrna_ENST00000528820.5, premrna_ENST00000529658.5, premrna_ENST00000530647.5, premrna_ENST00000531075.5, premrna_ENST00000531119.1, premrna_ENST00000531545.5, premrna_ENST00000531888.1, premrna_ENST00000532472.1, premrna_ENST00000534598.5, premrna_ENST00000538940.5, premrna_ENST00000543966.5, or a sequence of Table 3 or complements thereof. In some embodiments, the targeted portion of the ROBO3 pre-mRNA comprises a sequence with at least 80%, 85%, 90%, 95%, 97%, or 100% sequence identity to a region comprising at least 8 contiguous nucleic acids of a sequence selected from the group consisting of SEQ ID NO: 862-SEQ ID NO: 871 or complements thereof. In some embodiments, the targeted portion of the ROBO3 pre-mRNA pre-mRNA comprises a sequence that is complementary to at least 8, 9, 10, 11, 12, 13, 14, 15, 16, 17, 18, 19 or 20 contiguous nucleic acids of a sequence of Table 6A or Table 6B or a complement thereof.

[0495] In some embodiments, the ASOs disclosed herein target a NSAE pre-mRNA transcribed from a RPGRIP1 genomic sequence. In some embodiments, the ASO targets a NSAE pre-mRNA transcript from a RPGRIP1 genomic sequence comprising a NSAE exon. In some embodiments, the ASO targets a NSAE pre-mRNA transcript from a RPGRIP1 genomic sequence comprising an intron flanking the 3′ splice site of the NSAE exon and an intron flanking the 5′ splice site of a NSAE exon. In some embodiments, the ASO targets a NSAE pre-mRNA transcript comprising a sequence selected from the group consisting of premrna_ENST00000382933.8, premrna_ENST00000400017.6, premrna_ENST00000553500.5, premrna_ENST00000553927.1, premrna_ENST00000554303.1, premrna_ENST00000554750.1, premrna_ENST00000555322.5, premrna_ENST00000555489.5, premrna_ENST00000555587.5, premrna_ENST00000556336.5, premrna_ENST00000557351.1, premrna_ENST00000557606.1, and premrna_ENST00000557771.5. In some embodiments, the ASO targets a RPGRIP1 pre-mRNA sequence comprising a NSAE exon. In some embodiments, the ASO targets a RPGRIP1 pre-mRNA sequence comprising an intron flanking the 3′ splice site of the NSAE exon. In some embodiments, the ASO targets a RPGRIP1 pre-mRNA sequence comprising an intron flanking the 5′ splice site of the NSAE exon. In some embodiments, the transcript is selected from the group consisting of transcript_ENST00000382933.8, transcript_ENST00000400017.6, transcript_ENST00000553500.5, transcript_ENST00000553927.1, transcript_ENST00000554303.1, transcript_ENST00000554750.1, transcript_ENST00000555322.5, transcript_ENST00000555489.5, transcript_ENST00000555587.5, transcript_ENST00000556336.5, transcript_ENST00000557351.1, transcript_ENST00000557606.1, and transcript_ENST00000557771.5.

[0496] In some embodiments, the RPGRIP1 pre-mRNA transcript is encoded by a genetic sequence with at least about 80%, 85%, 90%, 95%, 96%, 97%, 98%, 99% or 100% sequence identity to the Ensembl reference number ENSG00000092200.12 or a complement thereof. In some embodiments, the RPGRIP1 pre-mRNA transcript comprises a sequence with at least about 80%, 85%, 90%, 95%, 96%, 97%, 98%, 99% or 100% sequence identity to a RPGRIP1 pre-mRNA transcript or a complement thereof described herein.

[0497] In some embodiments, the targeted portion of the RPGRIP1 pre-mRNA comprises a sequence with at least 80%, 85%, 90%, 95%, 97%, or 100% sequence identity to a region comprising at least 8 contiguous nucleic acids of a sequence of premrna_ENST00000382933.8, premrna_ENST00000400017.6, premrna_ENST00000553500.5, premrna_ENST00000553927.1, premrna_ENST00000554303.1, premrna_ENST00000554750.1, premrna_ENST00000555322.5, premrna_ENST00000555489.5, premrna_ENST00000555587.5, premrna_ENST00000556336.5, premrna_ENST00000557351.1, premrna_ENST00000557606.1, premrna_ENST00000557771.5 or a sequence of Table 3 or complements thereof. In some embodiments, the targeted portion of the RPGRIP1 pre-mRNA comprises a sequence with at least 80%, 85%, 90%, 95%, 97%, or 100% sequence identity to a region comprising at least 8 contiguous nucleic acids of a sequence selected from the group consisting of SEQ ID NO: 872-SEQ ID NO: 879 or complements thereof. In some embodiments, the targeted portion of the RPGRIP1 pre-mRNA comprises a sequence that is complementary to at least 8, 9, 10, 11, 12, 13, 14, 15, 16, 17, 18, 19 or 20 contiguous nucleic acids of a sequence of Table 6A or Table 6B or a complement thereof.

[0498] In some embodiments, the ASOs disclosed herein target a NSAE pre-mRNA transcribed from a RTTN genomic sequence. In some embodiments, the ASO targets a NSAE pre-mRNA transcript from a RTTN genomic sequence comprising a NSAE exon. In some embodiments, the ASO targets a NSAE pre-mRNA transcript from a RTTN genomic sequence comprising an intron flanking the 3′ splice site of the NSAE exon and an intron flanking the 5′ splice site of a NSAE exon. In some embodiments, the ASO targets a NSAE pre-mRNA transcript comprising a sequence selected from the group consisting of premrna_ENST00000255674.11, premrna_ENST00000578780.2, premrna_ENST00000579021.1, premrna_ENST00000579986.6, premrna_ENST00000580034.2, premrna_ENST00000581161.5, premrna_ENST00000581583.1, premrna_ENST00000581709.1, premrna_ENST00000583043.5, premrna_ENST00000583765.1, premrna_ENST00000638251.1, premrna_ENST00000638298.1, premrna_ENST00000638799.1, premrna_ENST00000639128.1, premrna_ENST00000639487.1, premrna_ENST00000640376.1, premrna_ENST00000640393.1, premrna_ENST00000640408.1, premrna_ENST00000640525.1, premrna_ENST00000640654.1, premrna_ENST00000640736.1, premrna_ENST00000640769.2, and premrna_ENST00000640931.1.

[0499] In some embodiments, the ASO targets a RTTN pre-mRNA sequence comprising a NSAE exon. In some embodiments, the ASO targets a RTTN pre-mRNA sequence comprising an intron flanking the 3′ splice site of the NSAE exon. In some embodiments, the ASO targets a RTTN pre-mRNA sequence comprising an intron flanking the 5′ splice site of the NSAE exon. In some embodiments, the transcript is selected from the group consisting of transcript_ENST00000255674.11, transcript_ENST00000578780.2, transcript_ENST00000579021.1, transcript_ENST00000579986.6, transcript_ENST00000580034.2, transcript_ENST00000581161.5, transcript_ENST00000581583.1, transcript_ENST00000581709.1, transcript_ENST00000583043.5, transcript_ENST00000583765.1, transcript_ENST00000638251.1, transcript_ENST00000638298.1, transcript_ENST00000638799.1, transcript_ENST00000639128.1, transcript_ENST00000639487.1, transcript_ENST00000640376.1, transcript_ENST00000640393.1, transcript_ENST00000640408.1, transcript_ENST00000640525.1, transcript_ENST00000640654.1, transcript_ENST00000640736.1, transcript_ENST00000640769.2, and transcript_ENST00000640931.1.

[0500] In some embodiments, the RTTN pre-mRNA transcript is encoded by a genetic sequence with at least about 80%, 85%, 90%, 95%, 96%, 97%, 98%, 99% or 100% sequence identity to the Ensembl reference number ENSG00000176225.14 or a complement thereof. In some embodiments, the RTTN pre-mRNA transcript comprises a sequence with at least about 80%, 85%, 90%, 95%, 96%, 97%, 98%, 99% or 100% sequence identity to a RTTN pre-mRNA transcript or a complement thereof described herein.

[0501] In some embodiments, the targeted portion of the RTTN pre-mRNA comprises a sequence with at least 80%, 85%, 90%, 95%, 97%, or 100% sequence identity to a region comprising at least 8 contiguous nucleic acids of a sequence of premrna_ENST00000255674.11, premrna_ENST00000578780.2, premrna_ENST00000579021.1, premrna_ENST00000579986.6, premrna_ENST00000580034.2, premrna_ENST00000581161.5, premrna_ENST00000581583.1, premrna_ENST00000581709.1, premrna_ENST00000583043.5, premrna_ENST00000583765.1, premrna_ENST00000638251.1, premrna_ENST00000638298.1, premrna_ENST00000638799.1, premrna_ENST00000639128.1, premrna_ENST00000639487.1, premrna_ENST00000640376.1, premrna_ENST00000640393.1, premrna_ENST00000640408.1, premrna_ENST00000640525.1, premrna_ENST00000640654.1, premrna_ENST00000640736.1, premrna_ENST00000640769.2, premrna_ENST00000640931.1, or a sequence of Table 3 or complements thereof. In some embodiments, the targeted portion of the RTTN pre-mRNA comprises a sequence with at least 80%, 85%, 90%, 95%, 97%, or 100% sequence identity to a region comprising at least 8 contiguous nucleic acids of a sequence selected from the group consisting of SEQ ID NO: 880-SEQ ID NO: 883 or complements thereof. In some embodiments, the targeted portion of the RTTN pre-mRNA comprises a sequence that is complementary to at least 8, 9, 10, 11, 12, 13, 14, 15, 16, 17, 18, 19 or 20 contiguous nucleic acids of a sequence of Table 6A or Table 6B or a complement thereof.

[0502] In some embodiments, the ASOs disclosed herein target a NSAE pre-mRNA transcribed from a RUFY3 genomic sequence. In some embodiments, the ASO targets a NSAE pre-mRNA transcript from a RUFY3 genomic sequence comprising a NSAE exon. In some embodiments, the ASO targets a NSAE pre-mRNA transcript from a RUFY3 genomic sequence comprising an intron flanking the 3′ splice site of the NSAE exon and an intron flanking the 5′ splice site of a NSAE exon. In some embodiments, the ASO targets a NSAE pre-mRNA transcript comprising a sequence selected from the group consisting of premrna_ENST00000226328.8, premrna_ENST00000381006.8, premrna_ENST00000417478.6, premrna_ENST00000502653.5, premrna_ENST00000503025.5, premrna_ENST00000503876.5, premrna_ENST00000504805.6, premrna_ENST00000507333.5, premrna_ENST00000512103.5, premrna_ENST00000512331.5, premrna_ENST00000513593.1, premrna_ENST00000513597.5, premrna_ENST00000514898.1, premrna_ENST00000515442.1, and premrna_ENST00000515479.5. In some embodiments, the ASO targets a RUFY3 pre-mRNA sequence comprising a NSAE exon. In some embodiments, the ASO targets a RUFY3 pre-mRNA sequence comprising an intron flanking the 3′ splice site of the NSAE exon. In some embodiments, the ASO targets a RUFY3 pre-mRNA sequence comprising an intron flanking the 5′ splice site of the NSAE exon. In some embodiments, the transcript is selected from the group consisting of transcript_ENST00000226328.8, transcript_ENST00000381006.8, transcript_ENST00000417478.6, transcript_ENST00000502653.5, transcript_ENST00000503025.5, transcript_ENST00000503876.5, transcript_ENST00000504805.6, transcript_ENST00000507333.5, transcript_ENST00000512103.5, transcript_ENST00000512331.5, transcript_ENST00000513593.1, transcript_ENST00000513597.5, transcript_ENST00000514898.1, transcript_ENST00000515442.1, and transcript_ENST00000515479.5.

[0503] In some embodiments, the RUFY3 pre-mRNA transcript is encoded by a genetic sequence with at least about 80%, 85%, 90%, 95%, 96%, 97%, 98%, 99% or 100% sequence identity to the Ensembl reference number ENSG00000018189.13 or a complement thereof. In some embodiments, the RUFY3 pre-mRNA transcript comprises a sequence with at least about 80%, 85%, 90%, 95%, 96%, 97%, 98%, 99% or 100% sequence identity to a RUFY3 pre-mRNA transcript or a complement thereof described herein.

[0504] In some embodiments, the targeted portion of the RUFY3 pre-mRNA comprises a sequence with at least 80%, 85%, 90%, 95%, 97%, or 100% sequence identity to a region comprising at least 8 contiguous nucleic acids of a sequence of premrna_ENST00000226328.8, premrna_ENST00000381006.8, premrna_ENST00000417478.6, premrna_ENST00000502653.5, premrna_ENST00000503025.5, premrna_ENST00000503876.5, premrna_ENST00000504805.6, premrna_ENST00000507333.5, premrna_ENST00000512103.5, premrna_ENST00000512331.5, premrna_ENST00000513593.1, premrna_ENST00000513597.5, premrna_ENST00000514898.1, premrna_ENST00000515442.1, premrna_ENST00000515479.5 or a sequence of Table 3 or complements thereof. In some embodiments, the targeted portion of the RUFY3 pre-mRNA comprises a sequence with at least 80%, 85%, 90%, 95%, 97%, or 100% sequence identity to a region comprising at least 8 contiguous nucleic acids of a sequence selected from the group consisting of SEQ ID NO: 884-SEQ ID NO: 887 or complements thereof. In some embodiments, the targeted portion of the RUFY3 pre-mRNA comprises a sequence that is complementary to at least 8, 9, 10, 11, 12, 13, 14, 15, 16, 17, 18, 19 or 20 contiguous nucleic acids of a sequence of Table 6A or Table 6B or a complement thereof.

[0505] In some embodiments, the ASOs disclosed herein target a NSAE pre-mRNA transcribed from a SEMA3B genomic sequence. In some embodiments, the ASO targets a NSAE pre-mRNA transcript from a SEMA3B genomic sequence comprising a NSAE exon. In some embodiments, the ASO targets a NSAE pre-mRNA transcript from a SEMA3B genomic sequence comprising an intron flanking the 3′ splice site of the NSAE exon and an intron flanking the 5′ splice site of a NSAE exon. In some embodiments, the ASO targets a NSAE pre-mRNA transcript comprising a sequence selected from the group consisting of premrna_ENST00000416295.1, premrna_ENST00000418576.3, premrna_ENST00000419007.5, premrna_ENST00000433753.4, premrna_ENST00000434030.1, premrna_ENST00000439487.5, premrna_ENST00000441915.5, premrna_ENST00000456210.5, premrna_ENST00000456560.6, premrna_ENST00000611067.4, premrna_ENST00000612509.4, premrna_ENST00000616701.5, premrna_ENST00000618865.4, premrna_ENST00000619119.4, and premrna_ENST00000621029.4. In some embodiments, the ASO targets a SEMA3B pre-mRNA sequence comprising a NSAE exon. In some embodiments, the ASO targets a SEMA3B pre-mRNA sequence comprising an intron flanking the 3′ splice site of the NSAE exon. In some embodiments, the ASO targets a SEMA3B pre-mRNA sequence comprising an intron flanking the 5′ splice site of the NSAE exon. In some embodiments, the transcript is selected from the group consisting of transcript_ENST00000416295.1, transcript_ENST00000418576.3, transcript_ENST00000419007.5, transcript_ENST00000433753.4, transcript_ENST00000434030.1, transcript_ENST00000439487.5, transcript_ENST00000441915.5, transcript_ENST00000456210.5, transcript_ENST00000456560.6, transcript_ENST00000611067.4, transcript_ENST00000612509.4, transcript_ENST00000616701.5, transcript_ENST00000618865.4, transcript_ENST00000619119.4, and transcript_ENST00000621029.4.

[0506] In some embodiments, the SEMA3B pre-mRNA transcript is encoded by a genetic sequence with at least about 80%, 85%, 90%, 95%, 96%, 97%, 98%, 99% or 100% sequence identity to the Ensembl reference number ENSG00000012171.20 or ENSG00000232352.1 or a complement thereof. In some embodiments, the SEMA3B pre-mRNA transcript comprises a sequence with at least about 80%, 85%, 90%, 95%, 96%, 97%, 98%, 99% or 100% sequence identity to a SEMA3B pre-mRNA transcript or a complement thereof described herein.

[0507] In some embodiments, the targeted portion of the SEMA3B pre-mRNA comprises a sequence with at least 80%, 85%, 90%, 95%, 97%, or 100% sequence identity to a region comprising at least 8 contiguous nucleic acids of a sequence of premrna_ENST00000416295.1, premrna_ENST00000418576.3, premrna_ENST00000419007.5, premrna_ENST00000433753.4, premrna_ENST00000434030.1, premrna_ENST00000439487.5, premrna_ENST00000441915.5, premrna_ENST00000456210.5, premrna_ENST00000456560.6, premrna_ENST00000611067.4, premrna_ENST00000612509.4, premrna_ENST00000616701.5, premrna_ENST00000618865.4, premrna_ENST00000619119.4, premrna_ENST00000621029.4 or a sequence of Table 3 or complements thereof. In some embodiments, the targeted portion of the SEMA3B pre-mRNA comprises a sequence with at least 80%, 85%, 90%, 95%, 97%, or 100% sequence identity to a region comprising at least 8 contiguous nucleic acids of a sequence selected from the group consisting of SEQ ID NO: 888-SEQ ID NO: 891 or complements thereof. In some embodiments, the targeted portion of the SEMA3B pre-mRNA pre-mRNA comprises a sequence that is complementary to at least 8, 9, 10, 11, 12, 13, 14, 15, 16, 17, 18, 19 or 20 contiguous nucleic acids of a sequence of Table 6A or Table 6B or a complement thereof.

[0508] In some embodiments, the ASOs disclosed herein target a NSAE pre-mRNA transcribed from a SEMA3F genomic sequence. In some embodiments, the ASO targets a NSAE pre-mRNA transcript from a SEMA3F genomic sequence comprising a NSAE exon. In some embodiments, the ASO targets a NSAE pre-mRNA transcript from a SEMA3F genomic sequence comprising an intron flanking the 3′ splice site of the NSAE exon and an intron flanking the 5′ splice site of a NSAE exon. In some embodiments, the ASO targets a NSAE pre-mRNA transcript comprising a sequence selected from the group consisting of premrna_ENST00000002829.8, premrna_ENST00000413852.5, premrna_ENST00000414301.5, premrna_ENST00000420831.1, premrna_ENST00000426511.5, premrna_ENST00000434342.5, premrna_ENST00000450338.5, premrna_ENST00000470737.1, and premrna_ENST00000493743.1. In some embodiments, the ASO targets a SEMA3F pre-mRNA sequence comprising a NSAE exon. In some embodiments, the ASO targets a SEMA3F pre-mRNA sequence comprising an intron flanking the 3′ splice site of the NSAE exon. In some embodiments, the ASO targets a SEMA3F pre-mRNA sequence comprising an intron flanking the 5′ splice site of the NSAE exon. In some embodiments, the transcript is selected from the group consisting of transcript_ENST00000002829.8, transcript_ENST00000413852.5, transcript_ENST00000414301.5, transcript_ENST00000420831.1, transcript_ENST00000426511.5, transcript_ENST00000434342.5, transcript_ENST00000450338.5, transcript_ENST00000470737.1, and transcript_ENST00000493743.1.

[0509] In some embodiments, the SEMA3F pre-mRNA transcript is encoded by a genetic sequence with at least about 80%, 85%, 90%, 95%, 96%, 97%, 98%, 99% or 100% sequence identity to the Ensembl reference number ENSG00000001617.12 or ENSG00000235016.1 or a complement thereof. In some embodiments, the SEMA3F pre-mRNA transcript comprises a sequence with at least about 80%, 85%, 90%, 95%, 96%, 97%, 98%, 99% or 100% sequence identity to a SEMA3F pre-mRNA transcript or a complement thereof described herein.

[0510] In some embodiments, the targeted portion of the SEMA3F pre-mRNA comprises a sequence with at least 80%, 85%, 90%, 95%, 97%, or 100% sequence identity to a region comprising at least 8 contiguous nucleic acids of a sequence of premrna_ENST00000002829.8, premrna_ENST00000413852.5, premrna_ENST00000414301.5, premrna_ENST00000420831.1, premrna_ENST00000426511.5, premrna_ENST00000434342.5, premrna_ENST00000450338.5, premrna_ENST00000470737.1, premrna_ENST00000493743.1 or a sequence of Table 3 or complements thereof. In some embodiments, the targeted portion of the SEMA3F pre-mRNA comprises a sequence with at least 80%, 85%, 90%, 95%, 97%, or 100% sequence identity to a region comprising at least 8 contiguous nucleic acids of a sequence selected from the group consisting of SEQ ID NO: 892-SEQ ID NO: 895 or complements thereof. In some embodiments, the targeted portion of the SEMA3F pre-mRNA comprises a sequence that is complementary to at least 8, 9, 10, 11, 12, 13, 14, 15, 16, 17, 18, 19 or 20 contiguous nucleic acids of a sequence of Table 6A or Table 6B or a complement thereof.

[0511] In some embodiments, the ASOs disclosed herein target a NSAE pre-mRNA transcribed from a SH2D3A genomic sequence. In some embodiments, the ASO targets a NSAE pre-mRNA transcript from a SH2D3A genomic sequence comprising a NSAE exon. In some embodiments, the ASO targets a NSAE pre-mRNA transcript from a SH2D3A genomic sequence comprising an intron flanking the 3′ splice site of the NSAE exon and an intron flanking the 5′ splice site of a NSAE exon. In some embodiments, the ASO targets a NSAE pre-mRNA transcript comprising a sequence selected from the group consisting of premrna_ENST00000245908.11, premrna_ENST00000437152.7, premrna_ENST00000595369.1, premrna_ENST00000595681.5, premrna_ENST00000597168.1, premrna_ENST00000597254.1, premrna_ENST00000597687.1, and premrna_ENST00000599563.5. In some embodiments, the ASO targets a SH2D3A pre-mRNA sequence comprising a NSAE exon. In some embodiments, the ASO targets a SH2D3A pre-mRNA sequence comprising an intron flanking the 3′ splice site of the NSAE exon. In some embodiments, the ASO targets a SH2D3A pre-mRNA sequence comprising an intron flanking the 5′ splice site of the NSAE exon. In some embodiments, the transcript is selected from the group consisting of transcript_ENST00000245908.11, transcript_ENST00000437152.7, transcript_ENST00000595369.1, transcript_ENST00000595681.5, transcript_ENST00000597168.1, transcript_ENST00000597254.1, transcript_ENST00000597687.1, and transcript_ENST00000599563.5.

[0512] In some embodiments, the SH2D3A pre-mRNA transcript is encoded by a genetic sequence with at least about 80%, 85%, 90%, 95%, 96%, 97%, 98%, 99% or 100% sequence identity to the Ensembl reference number ENSG00000125731.13 or a complement thereof. In some embodiments, the SH2D3A pre-mRNA transcript comprises a sequence with at least about 80%, 85%, 90%, 95%, 96%, 97%, 98%, 99% or 100% sequence identity to a SH2D3A pre-mRNA transcript or a complement thereof described herein.

[0513] In some embodiments, the targeted portion of the SH2D3A pre-mRNA comprises a sequence with at least 80%, 85%, 90%, 95%, 97%, or 100% sequence identity to a region comprising at least 8 contiguous nucleic acids of a sequence of premrna_ENST00000245908.11, premrna_ENST00000437152.7, premrna_ENST00000595369.1, premrna_ENST00000595681.5, premrna_ENST00000597168.1, premrna_ENST00000597254.1, premrna_ENST00000597687.1, premrna_ENST00000599563.5 or a sequence of Table 3 or complements thereof. In some embodiments, the targeted portion of the SH2D3A pre-mRNA comprises a sequence with at least 80%, 85%, 90%, 95%, 97%, or 100% sequence identity to a region comprising at least 8 contiguous nucleic acids of a sequence selected from the group consisting of SEQ ID NO: 896-SEQ ID NO: 901 or complements thereof. In some embodiments, the targeted portion of the SH2D3A pre-mRNA comprises a sequence that is complementary to at least 8, 9, 10, 11, 12, 13, 14, 15, 16, 17, 18, 19 or 20 contiguous nucleic acids of a sequence of Table 6A or Table 6B or a complement thereof.

[0514] In some embodiments, the ASOs disclosed herein target a NSAE pre-mRNA transcribed from a SIK3 genomic sequence. In some embodiments, the ASO targets a NSAE pre-mRNA transcript from a SIK3 genomic sequence comprising a NSAE exon. In some embodiments, the ASO targets a NSAE pre-mRNA transcript from a SIK3 genomic sequence comprising an intron flanking the 3′ splice site of the NSAE exon and an intron flanking the 5′ splice site of a NSAE exon. In some embodiments, the ASO targets a NSAE pre-mRNA transcript comprising a sequence selected from the group consisting of premrna_ENST00000375300.6, premrna_ENST00000413553.1, premrna_ENST00000415541.5, premrna_ENST00000445177.5, premrna_ENST00000446921.6, premrna_ENST00000454905.5, premrna_ENST00000465421.5, premrna_ENST00000472648.1, premrna_ENST00000480222.1, premrna_ENST00000480468.1, premrna_ENST00000485363.1, premrna_ENST00000488337.5, and premrna_ENST00000497049.5. In some embodiments, the ASO targets a SIK3 pre-mRNA sequence comprising a NSAE exon. In some embodiments, the ASO targets a SIK3 pre-mRNA sequence comprising an intron flanking the 3′ splice site of the NSAE exon. In some embodiments, the ASO targets a SIK3 pre-mRNA sequence comprising an intron flanking the 5′ splice site of the NSAE exon. In some embodiments, the transcript is selected from the group consisting of transcript_ENST00000375300.6, transcript_ENST00000413553.1, transcript_ENST00000415541.5, transcript_ENST00000445177.5, transcript_ENST00000446921.6, transcript_ENST00000454905.5, transcript_ENST00000465421.5, transcript_ENST00000472648.1, transcript_ENST00000480222.1, transcript_ENST00000480468.1, transcript_ENST00000485363.1, transcript_ENST00000488337.5, and transcript_ENST00000497049.5.

[0515] In some embodiments, the SIK3 pre-mRNA transcript is encoded by a genetic sequence with at least about 80%, 85%, 90%, 95%, 96%, 97%, 98%, 99% or 100% sequence identity to the Ensembl reference number ENSG00000160584.16 or a complement thereof. In some embodiments, the SIK3 pre-mRNA transcript comprises a sequence with at least about 80%, 85%, 90%, 95%, 96%, 97%, 98%, 99% or 100% sequence identity to a SIK3 pre-mRNA transcript or a complement thereof described herein.

[0516] In some embodiments, the targeted portion of the SIK3 pre-mRNA comprises a sequence with at least 80%, 85%, 90%, 95%, 97%, or 100% sequence identity to a region comprising at least 8 contiguous nucleic acids of a sequence of premrna_ENST00000375300.6, premrna_ENST00000413553.1, premrna_ENST00000415541.5, premrna_ENST00000445177.5, premrna_ENST00000446921.6, premrna_ENST00000454905.5, premrna_ENST00000465421.5, premrna_ENST00000472648.1, premrna_ENST00000480222.1, premrna_ENST00000480468.1, premrna_ENST00000485363.1, premrna_ENST00000488337.5, premrna_ENST00000497049.5, or a sequence of Table 3 or complements thereof. In some embodiments, the targeted portion of the SIK3 pre-mRNA comprises a sequence with at least 80%, 85%, 90%, 95%, 97%, or 100% sequence identity to a region comprising at least 8 contiguous nucleic acids of a sequence selected from the group consisting of SEQ ID NO: 902-SEQ ID NO: 905 or complements thereof. In some embodiments, the targeted portion of the SIK3 pre-mRNA comprises a sequence that is complementary to at least 8, 9, 10, 11, 12, 13, 14, 15, 16, 17, 18, 19 or 20 contiguous nucleic acids of a sequence of Table 6A or Table 6B or a complement thereof.

[0517] In some embodiments, the ASOs disclosed herein target a NSAE pre-mRNA transcribed from a SIRT3 genomic sequence. In some embodiments, the ASO targets a NSAE pre-mRNA transcript from a SIRT3 genomic sequence comprising a NSAE exon. In some embodiments, the ASO targets a NSAE pre-mRNA transcript from a SIRT3 genomic sequence comprising an intron flanking the 3′ splice site of the NSAE exon and an intron flanking the 5′ splice site of a NSAE exon. In some embodiments, the ASO targets a NSAE pre-mRNA transcript comprising a sequence selected from the group consisting of premrna_ENST00000382743.9, premrna_ENST00000524564.5, premrna_ENST00000525237.1, premrna_ENST00000525319.5, premrna_ENST00000525776.1, premrna_ENST00000526854.5, premrna_ENST00000528469.1, premrna_ENST00000528702.5, premrna_ENST00000529055.5, premrna_ENST00000529382.5, premrna_ENST00000529937.1, premrna_ENST00000530067.1, premrna_ENST00000531753.5, premrna_ENST00000532837.5, premrna_ENST00000532956.5, and premrna_ENST00000534381.1. In some embodiments, the ASO targets a SIRT3 pre-mRNA sequence comprising a NSAE exon. In some embodiments, the ASO targets a SIRT3 pre-mRNA sequence comprising an intron flanking the 3′ splice site of the NSAE exon. In some embodiments, the ASO targets a SIRT3 pre-mRNA sequence comprising an intron flanking the 5′ splice site of the NSAE exon. In some embodiments, the transcript is selected from the group consisting of transcript_ENST00000382743.9, transcript_ENST00000524564.5, transcript_ENST00000525237.1, transcript_ENST00000525319.5, transcript_ENST00000525776.1, transcript_ENST00000526854.5, transcript_ENST00000528469.1, transcript_ENST00000528702.5, transcript_ENST00000529055.5, transcript_ENST00000529382.5, transcript_ENST00000529937.1, transcript_ENST00000530067.1, transcript_ENST00000531753.5, transcript_ENST00000532837.5, transcript_ENST00000532956.5, and transcript_ENST00000534381.1.

[0518] In some embodiments, the SIRT3 pre-mRNA transcript is encoded by a genetic sequence with at least about 80%, 85%, 90%, 95%, 96%, 97%, 98%, 99% or 100% sequence identity to the Ensembl reference number ENSG00000142082.15 or a complement thereof. In some embodiments, the SIRT3 pre-mRNA transcript comprises a sequence with at least about 80%, 85%, 90%, 95%, 96%, 97%, 98%, 99% or 100% sequence identity to a SIRT3 pre-mRNA transcript or a complement thereof described herein.

[0519] In some embodiments, the targeted portion of the SIRT3 pre-mRNA comprises a sequence with at least 80%, 85%, 90%, 95%, 97%, or 100% sequence identity to a region comprising at least 8 contiguous nucleic acids of a sequence of premrna_ENST00000382743.9, premrna_ENST00000524564.5, premrna_ENST00000525237.1, premrna_ENST00000525319.5, premrna_ENST00000525776.1, premrna_ENST00000526854.5, premrna_ENST00000528469.1, premrna_ENST00000528702.5, premrna_ENST00000529055.5, premrna_ENST00000529382.5, premrna_ENST00000529937.1, premrna_ENST00000530067.1, premrna_ENST00000531753.5, premrna_ENST00000532837.5, premrna_ENST00000532956.5, premrna_ENST00000534381.1 or a sequence of Table 3 or complements thereof. In some embodiments, the targeted portion of the SIRT3 pre-mRNA comprises a sequence with at least 80%, 85%, 90%, 95%, 97%, or 100% sequence identity to a region comprising at least 8 contiguous nucleic acids of a sequence selected from the group consisting of SEQ ID NO: 906-SEQ ID NO: 909 or complements thereof. In some embodiments, the targeted portion of the SIRT3 pre-mRNA comprises a sequence that is complementary to at least 8, 9, 10, 11, 12, 13, 14, 15, 16, 17, 18, 19 or 20 contiguous nucleic acids of a sequence of Table 6A or Table 6B or a complement thereof.

[0520] In some embodiments, the ASOs disclosed herein target a NSAE pre-mRNA transcribed from a SKIV2L genomic sequence. In some embodiments, the ASO targets a NSAE pre-mRNA transcript from a SKIV2L genomic sequence comprising a NSAE exon. In some embodiments, the ASO targets a NSAE pre-mRNA transcript from a SKIV2L genomic sequence comprising an intron flanking the 3′ splice site of the NSAE exon and an intron flanking the 5′ splice site of a NSAE exon. In some embodiments, the ASO targets a NSAE pre-mRNA transcript comprising a sequence selected from the group consisting of premrna_ENST00000375394.7, premrna_ENST00000461073.5, premrna_ENST00000461915.5, premrna_ENST00000465703.5, premrna_ENST00000466290.1, premrna_ENST00000470453.1, premrna_ENST00000471818.1, premrna_ENST00000474839.5, premrna_ENST00000483553.5, premrna_ENST00000484835.1, premrna_ENST00000485349.5, premrna_ENST00000488648.5, premrna_ENST00000491994.1, premrna_ENST00000492900.1, premma_ENST00000494058.5, and premrna_ENST00000628157.1. In some embodiments, the ASO targets a SKIV2L pre-mRNA sequence comprising a NSAE exon. In some embodiments, the ASO targets a SKIV2L pre-mRNA sequence comprising an intron flanking the 3′ splice site of the NSAE exon. In some embodiments, the ASO targets a SKIV2L pre-mRNA sequence comprising an intron flanking the 5′ splice site of the NSAE exon. In some embodiments, the transcript is selected from the group consisting of transcript_ENST00000375394.7, transcript_ENST00000461073.5, transcript_ENST00000461915.5, transcript_ENST00000465703.5, transcript_ENST00000466290.1, transcript_ENST00000470453.1, transcript_ENST00000471818.1, transcript_ENST00000474839.5, transcript_ENST00000483553.5, transcript_ENST00000484835.1, transcript_ENST00000485349.5, transcript_ENST00000488648.5, transcript_ENST00000491994.1, transcript_ENST00000492900.1, transcript_ENST00000494058.5, and transcript_ENST00000628157.1.

[0521] In some embodiments, the SKIV2L pre-mRNA transcript is encoded by a genetic sequence with at least about 80%, 85%, 90%, 95%, 96%, 97%, 98%, 99% or 100% sequence identity to the Ensembl reference number ENSG00000204351.12, ENSG00000206353.11, ENSG00000228896.9, ENSG00000232616.9, ENSG00000223493.9, or ENSG00000225737.9 or a complement thereof. In some embodiments, the SKIV2L pre-mRNA transcript comprises a sequence with at least about 80%, 85%, 90%, 95%, 96%, 97%, 98%, 99% or 100% sequence identity to a SKIV2L pre-mRNA transcript or a complement thereof described herein.

[0522] In some embodiments, the targeted portion of the SKIV2L pre-mRNA comprises a sequence with at least 80%, 85%, 90%, 95%, 97%, or 100% sequence identity to a region comprising at least 8 contiguous nucleic acids of a sequence of premrna_ENST00000375394.7, premrna_ENST00000461073.5, premrna_ENST00000461915.5, premrna_ENST00000465703.5, premrna_ENST00000466290.1, premrna_ENST00000470453.1, premrna_ENST00000471818.1, premrna_ENST00000474839.5, premrna_ENST00000483553.5, premrna_ENST00000484835.1, premrna_ENST00000485349.5, premrna_ENST00000488648.5, premrna_ENST00000491994.1, premrna_ENST00000492900.1, premrna_ENST00000494058.5, premrna_ENST00000628157.1 or a sequence of Table 3 or complements thereof. In some embodiments, the targeted portion of the SKIV2L pre-mRNA comprises a sequence with at least 80%, 85%, 90%, 95%, 97%, or 100% sequence identity to a region comprising at least 8 contiguous nucleic acids of a sequence selected from the group consisting of SEQ ID NO: 910-SEQ ID NO: 913 or complements thereof. In some embodiments, the targeted portion of the SKIV2L pre-mRNA comprises a sequence that is complementary to at least 8, 9, 10, 11, 12, 13, 14, 15, 16, 17, 18, 19 or 20 contiguous nucleic acids of a sequence of Table 6A or Table 6B or a complement thereof.

[0523] In some embodiments, the ASOs disclosed herein target a NSAE pre-mRNA transcribed from a SLC2A13 genomic sequence. In some embodiments, the ASO targets a NSAE pre-mRNA transcript from a SLC2A13 genomic sequence comprising a NSAE exon. In some embodiments, the ASO targets a NSAE pre-mRNA transcript from a SLC2A13 genomic sequence comprising an intron flanking the 3′ splice site of the NSAE exon and an intron flanking the 5′ splice site of a NSAE exon. In some embodiments, the ASO targets a NSAE pre-mRNA transcript comprising a sequence selected from the group consisting of premrna_ENST00000280871.9, premrna_ENST00000380858.1, premrna_ENST00000465517.1, and premrna_ENST00000505338.1. In some embodiments, the ASO targets a SLC2A13 pre-mRNA sequence comprising a NSAE exon. In some embodiments, the ASO targets a SLC2A13 pre-mRNA sequence comprising an intron flanking the 3′ splice site of the NSAE exon. In some embodiments, the ASO targets a SLC2A13 pre-mRNA sequence comprising an intron flanking the 5′ splice site of the NSAE exon. In some embodiments, the transcript is selected from the group consisting of transcript_ENST00000280871.9, transcript_ENST00000380858.1, transcript_ENST00000465517.1, and transcript_ENST00000505338.1.

[0524] In some embodiments, the SLC2A13 pre-mRNA transcript is encoded by a genetic sequence with at least about 80%, 85%, 90%, 95%, 96%, 97%, 98%, 99% or 100% sequence identity to the Ensembl reference number ENSG00000151229.13 or a complement thereof. In some embodiments, the SLC2A13 pre-mRNA transcript comprises a sequence with at least about 80%, 85%, 90%, 95%, 96%, 97%, 98%, 99% or 100% sequence identity to a SLC2A13 pre-mRNA transcript or a complement thereof described herein.

[0525] In some embodiments, the targeted portion of the SLC2A13 pre-mRNA comprises a sequence with at least 80%, 85%, 90%, 95%, 97%, or 100% sequence identity to a region comprising at least 8 contiguous nucleic acids of a sequence of premrna_ENST00000280871.9, premrna_ENST00000380858.1, premrna_ENST00000465517.1, premrna_ENST00000505338.1 or a sequence of Table 3 or complements thereof. In some embodiments, the targeted portion of the SLC2A13 pre-mRNA comprises a sequence with at least 80%, 85%, 90%, 95%, 97%, or 100% sequence identity to a region comprising at least 8 contiguous nucleic acids of a sequence selected from the group consisting of SEQ ID NO: 914-SEQ ID NO: 917 or complements thereof. In some embodiments, the targeted portion of the SLC2A13 pre-mRNA comprises a sequence that is complementary to at least 8, 9, 10, 11, 12, 13, 14, 15, 16, 17, 18, 19 or 20 contiguous nucleic acids of a sequence of Table 6A or Table 6B or a complement thereof.

[0526] In some embodiments, the ASOs disclosed herein target a NSAE pre-mRNA transcribed from a SLC12A7 genomic sequence. In some embodiments, the ASO targets a NSAE pre-mRNA transcript from a SLC12A7 genomic sequence comprising a NSAE exon. In some embodiments, the ASO targets a NSAE pre-mRNA transcript from a SLC12A7 genomic sequence comprising an intron flanking the 3′ splice site of the NSAE exon and an intron flanking the 5′ splice site of a NSAE exon. In some embodiments, the ASO targets a NSAE pre-mRNA transcript comprising a sequence selected from the group consisting of premrna_ENST00000264930.10, premrna_ENST00000504576.2, premrna_ENST00000510943.3, premrna_ENST00000513223.2, premrna_ENST00000514994.1, and premrna_ENST00000634447.1. In some embodiments, the ASO targets a SLC12A7 pre-mRNA sequence comprising a NSAE exon. In some embodiments, the ASO targets a SLC12A7 pre-mRNA sequence comprising an intron flanking the 3′ splice site of the NSAE exon. In some embodiments, the ASO targets a SLC12A7 pre-mRNA sequence comprising an intron flanking the 5′ splice site of the NSAE exon. In some embodiments, the transcript is selected from the group consisting of transcript_ENST00000264930.10, transcript_ENST00000504576.2, transcript_ENST00000510943.3, transcript_ENST00000513223.2, transcript_ENST00000514994.1, and transcript_ENST00000634447.1.

[0527] In some embodiments, the SLC12A7 pre-mRNA transcript is encoded by a genetic sequence with at least about 80%, 85%, 90%, 95%, 96%, 97%, 98%, 99% or 100% sequence identity to the Ensembl reference number ENSG00000113504.21 or ENSG00000276482.3 or a complement thereof. In some embodiments, the SLC12A7 pre-mRNA transcript comprises a sequence with at least about 80%, 85%, 90%, 95%, 96%, 97%, 98%, 99% or 100% sequence identity to a SLC12A7 pre-mRNA transcript or a complement thereof described herein.

[0528] In some embodiments, the targeted portion of the SLC12A7 pre-mRNA comprises a sequence with at least 80%, 85%, 90%, 95%, 97%, or 100% sequence identity to a region comprising at least 8 contiguous nucleic acids of a sequence of premrna_ENST00000264930.10, premrna_ENST00000504576.2, premrna_ENST00000510943.3, premrna_ENST00000513223.2, premrna_ENST00000514994.1, premrna_ENST00000634447.1, or a sequence of Table 3 or complements thereof. In some embodiments, the targeted portion of the SLC12A7 pre-mRNA comprises a sequence with at least 80%, 85%, 90%, 95%, 97%, or 100% sequence identity to a region comprising at least 8 contiguous nucleic acids of a sequence selected from the group consisting of SEQ ID NO: 918-SEQ ID NO: 921 or complements thereof. In some embodiments, the targeted portion of the SLC12A7 pre-mRNA comprises a sequence that is complementary to at least 8, 9, 10, 11, 12, 13, 14, 15, 16, 17, 18, 19 or 20 contiguous nucleic acids of a sequence of Table 6A or Table 6B or a complement thereof.

[0529] In some embodiments, the ASOs disclosed herein target a NSAE pre-mRNA transcribed from a SLC22A3 genomic sequence. In some embodiments, the ASO targets a NSAE pre-mRNA transcript from a SLC22A3 genomic sequence comprising a NSAE exon. In some embodiments, the ASO targets a NSAE pre-mRNA transcript from a SLC22A3 genomic sequence comprising an intron flanking the 3′ splice site of the NSAE exon and an intron flanking the 5′ splice site of a NSAE exon. In some embodiments, the ASO targets a NSAE pre-mRNA transcript comprising a sequence of premrna_ENST00000275300.3. In some embodiments, the ASO targets a SLC22A3 pre-mRNA sequence comprising a NSAE exon. In some embodiments, the ASO targets a SLC22A3 pre-mRNA sequence comprising an intron flanking the 3′ splice site of the NSAE exon. In some embodiments, the ASO targets a SLC22A3 pre-mRNA sequence comprising an intron flanking the 5′ splice site of the NSAE exon. In some embodiments, the transcript is selected from the group consisting of transcript_ENST00000275300.3.

[0530] In some embodiments, the SLC22A3 pre-mRNA transcript is encoded by a genetic sequence with at least about 80%, 85%, 90%, 95%, 96%, 97%, 98%, 99% or 100% sequence identity to the Ensembl reference number ENSG00000146477.6 or a complement thereof. In some embodiments, the SLC22A3 pre-mRNA transcript comprises a sequence with at least about 80%, 85%, 90%, 95%, 96%, 97%, 98%, 99% or 100% sequence identity to a SLC22A3 pre-mRNA transcript or a complement thereof described herein.

[0531] In some embodiments, the targeted portion of the SLC22A3 pre-mRNA comprises a sequence with at least 80%, 85%, 90%, 95%, 97%, or 100% sequence identity to a region comprising at least 8 contiguous nucleic acids of a sequence of premrna_ENST00000275300.3 or a sequence of Table 3 or complements thereof. In some embodiments, the targeted portion of the SLC22A3 pre-mRNA comprises a sequence with at least 80%, 85%, 90%, 95%, 97%, or 100% sequence identity to a region comprising at least 8 contiguous nucleic acids of a sequence selected from the group consisting of SEQ ID NO: 922-SEQ ID NO: 925 or complements thereof. In some embodiments, the targeted portion of the SLC22A3 pre-mRNA comprises a sequence that is complementary to at least 8, 9, 10, 11, 12, 13, 14, 15, 16, 17, 18, 19 or 20 contiguous nucleic acids of a sequence of Table 6A or Table 6B or a complement thereof.

[0532] In some embodiments, the ASOs disclosed herein target a NSAE pre-mRNA transcribed from a SLC25A13 genomic sequence. In some embodiments, the ASO targets a NSAE pre-mRNA transcript from a SLC25A13 genomic sequence comprising a NSAE exon. In some embodiments, the ASO targets a NSAE pre-mRNA transcript from a SLC25A13 genomic sequence comprising an intron flanking the 3′ splice site of the NSAE exon and an intron flanking the 5′ splice site of a NSAE exon. In some embodiments, the ASO targets a NSAE pre-mRNA transcript comprising a sequence selected from the group consisting of premrna_ENST00000265631.9, premrna_ENST00000416240.6, premrna_ENST00000472162.2, premrna_ENST00000484495.5, premrna_ENST00000487710.1, premrna_ENST00000490072.5, premrna_ENST00000492869.1, and premrna_ENST00000494085.1. In some embodiments, the ASO targets a SLC25A13 pre-mRNA sequence comprising a NSAE exon. In some embodiments, the ASO targets a SLC25A13 pre-mRNA sequence comprising an intron flanking the 3′ splice site of the NSAE exon. In some embodiments, the ASO targets a SLC25A13 pre-mRNA sequence comprising an intron flanking the 5′ splice site of the NSAE exon. In some embodiments, the transcript is selected from the group consisting of transcript_ENST00000265631.9, transcript_ENST00000416240.6, transcript_ENST00000472162.2, transcript_ENST00000484495.5, transcript_ENST00000487710.1, transcript_ENST00000490072.5, transcript_ENST00000492869.1, and transcript_ENST00000494085.1.

[0533] In some embodiments, the SLC25A13 pre-mRNA transcript is encoded by a genetic sequence with at least about 80%, 85%, 90%, 95%, 96%, 97%, 98%, 99% or 100% sequence identity to the Ensembl reference number ENSG00000004864.14 or a complement thereof. In some embodiments, the SLC25A13 pre-mRNA transcript comprises a sequence with at least about 80%, 85%, 90%, 95%, 96%, 97%, 98%, 99% or 100% sequence identity to a SLC25A13 pre-mRNA transcript or a complement thereof described herein.

[0534] In some embodiments, the targeted portion of the SLC25A13 pre-mRNA comprises a sequence with at least 80%, 85%, 90%, 95%, 97%, or 100% sequence identity to a region comprising at least 8 contiguous nucleic acids of a sequence of premrna_ENST00000265631.9, premrna_ENST00000416240.6, premrna_ENST00000472162.2, premrna_ENST00000484495.5, premrna_ENST00000487710.1, premrna_ENST00000490072.5, premrna_ENST00000492869.1, premrna_ENST00000494085.1 or a sequence of Table 3 or complements thereof. In some embodiments, the targeted portion of the SLC25A13 pre-mRNA comprises a sequence with at least 80%, 85%, 90%, 95%, 97%, or 100% sequence identity to a region comprising at least 8 contiguous nucleic acids of a sequence selected from the group consisting of SEQ ID NO: 926-SEQ ID NO: 929 or complements thereof. In some embodiments, the targeted portion of the SLC25A13 pre-mRNA comprises a sequence that is complementary to at least 8, 9, 10, 11, 12, 13, 14, 15, 16, 17, 18, 19 or 20 contiguous nucleic acids of a sequence of Table 6A or Table 6B or a complement thereof.

[0535] In some embodiments, the ASOs disclosed herein target a NSAE pre-mRNA transcribed from a SLC25A37 genomic sequence. In some embodiments, the ASO targets a NSAE pre-mRNA transcript from a SLC25A37 genomic sequence comprising a NSAE exon. In some embodiments, the ASO targets a NSAE pre-mRNA transcript from a SLC25A37 genomic sequence comprising an intron flanking the 3′ splice site of the NSAE exon and an intron flanking the 5′ splice site of a NSAE exon. In some embodiments, the ASO targets a NSAE pre-mRNA transcript comprising a sequence selected from the group consisting of premrna_ENST00000290075.10, premrna_ENST00000417331.6, premrna_ENST00000517923.1, premrna_ENST00000518881.5, premrna_ENST00000519192.1, premrna_ENST00000519973.6, premrna_ENST00000520654.1, premrna_ENST00000520949.1, premrna_ENST00000521637.1, premrna_ENST00000522164.5, premrna_ENST00000523883.5, and premrna_ENST00000523930.1. In some embodiments, the ASO targets a SLC25A37 pre-mRNA sequence comprising a NSAE exon. In some embodiments, the ASO targets a SLC25A37 pre-mRNA sequence comprising an intron flanking the 3′ splice site of the NSAE exon. In some embodiments, the ASO targets a SLC25A37 pre-mRNA sequence comprising an intron flanking the 5′ splice site of the NSAE exon. In some embodiments, the transcript is selected from the group consisting of transcript_ENST00000290075.10, transcript_ENST00000417331.6, transcript_ENST00000517923.1, transcript_ENST00000518881.5, transcript_ENST00000519192.1, transcript_ENST00000519973.6, transcript_ENST00000520654.1, transcript_ENST00000520949.1, transcript_ENST00000521637.1, transcript_ENST00000522164.5, transcript_ENST00000523883.5, and transcript_ENST00000523930.1.

[0536] In some embodiments, the SLC25A37 pre-mRNA transcript is encoded by a genetic sequence with at least about 80%, 85%, 90%, 95%, 96%, 97%, 98%, 99% or 100% sequence identity to the Ensembl reference number ENSG00000147454.14 or a complement thereof. In some embodiments, the SLC25A37 pre-mRNA transcript comprises a sequence with at least about 80%, 85%, 90%, 95%, 96%, 97%, 98%, 99% or 100% sequence identity to a SLC25A37 pre-mRNA transcript or a complement thereof described herein.

[0537] In some embodiments, the targeted portion of the SLC25A37 pre-mRNA comprises a sequence with at least 80%, 85%, 90%, 95%, 97%, or 100% sequence identity to a region comprising at least 8 contiguous nucleic acids of a sequence of premrna_ENST00000290075.10, premrna_ENST00000417331.6, premrna_ENST00000517923.1, premrna_ENST00000518881.5, premrna_ENST00000519192.1, premrna_ENST00000519973.6, premrna_ENST00000520654.1, premrna_ENST00000520949.1, premrna_ENST00000521637.1, premrna_ENST00000522164.5, premrna_ENST00000523883.5, premrna_ENST00000523930.1 or a sequence of Table 3 or complements thereof. In some embodiments, the targeted portion of the SLC25A37 pre-mRNA comprises a sequence with at least 80%, 85%, 90%, 95%, 97%, or 100% sequence identity to a region comprising at least 8 contiguous nucleic acids of a sequence selected from the group consisting of SEQ ID NO: 930-SEQ ID NO: 933 or complements thereof. In some embodiments, the targeted portion of the SLC25A37 pre-mRNA comprises a sequence that is complementary to at least 8, 9, 10, 11, 12, 13, 14, 15, 16, 17, 18, 19 or 20 contiguous nucleic acids of a sequence of Table 6A or Table 6B or a complement thereof.

[0538] In some embodiments, the ASOs disclosed herein target a NSAE pre-mRNA transcribed from a SLC27A5 genomic sequence. In some embodiments, the ASO targets a NSAE pre-mRNA transcript from a SLC27A5 genomic sequence comprising a NSAE exon. In some embodiments, the ASO targets a NSAE pre-mRNA transcript from a SLC27A5 genomic sequence comprising an intron flanking the 3′ splice site of the NSAE exon and an intron flanking the 5′ splice site of a NSAE exon. In some embodiments, the ASO targets a NSAE pre-mRNA transcript comprising a sequence selected from the group consisting of premrna_ENST00000263093.7, premrna_ENST00000593745.1, premrna_ENST00000594683.1, premrna_ENST00000594786.1, premrna_ENST00000595851.5, premrna_ENST00000599700.1, premrna_ENST00000601355.1, and premrna_ENST00000601997.1. In some embodiments, the ASO targets a SLC27A5 pre-mRNA sequence comprising a NSAE exon. In some embodiments, the ASO targets a SLC27A5 pre-mRNA sequence comprising an intron flanking the 3′ splice site of the NSAE exon. In some embodiments, the ASO targets a SLC27A5 pre-mRNA sequence comprising an intron flanking the 5′ splice site of the NSAE exon. In some embodiments, the transcript is selected from the group consisting of transcript_ENST00000263093.7, transcript_ENST00000593745.1, transcript_ENST00000594683.1, transcript_ENST00000594786.1, transcript_ENST00000595851.5, transcript_ENST00000599700.1, transcript_ENST00000601355.1, and transcript_ENST00000601997.1.

[0539] In some embodiments, the SLC27A5 pre-mRNA transcript is encoded by a genetic sequence with at least about 80%, 85%, 90%, 95%, 96%, 97%, 98%, 99% or 100% sequence identity to the Ensembl reference number ENSG00000083807.10 or a complement thereof. In some embodiments, the SLC27A5 pre-mRNA transcript comprises a sequence with at least about 80%, 85%, 90%, 95%, 96%, 97%, 98%, 99% or 100% sequence identity to a SLC27A5 pre-mRNA transcript or a complement thereof described herein.

[0540] In some embodiments, the targeted portion of the SLC27A5 pre-mRNA comprises a sequence with at least 80%, 85%, 90%, 95%, 97%, or 100% sequence identity to a region comprising at least 8 contiguous nucleic acids of a sequence of premrna_ENST00000263093.7, premrna_ENST00000593745.1, premrna_ENST00000594683.1, premrna_ENST00000594786.1, premrna_ENST00000595851.5, premrna_ENST00000599700.1, premrna_ENST00000601355.1, premrna_ENST00000601997.1, or a sequence of Table 3 or complements thereof. In some embodiments, the targeted portion of the SLC27A5 pre-mRNA comprises a sequence with at least 80%, 85%, 90%, 95%, 97%, or 100% sequence identity to a region comprising at least 8 contiguous nucleic acids of a sequence selected from the group consisting of SEQ ID NO: 934-SEQ ID NO: 937 or complements thereof. In some embodiments, the targeted portion of the SLC27A5 pre-mRNA comprises a sequence that is complementary to at least 8, 9, 10, 11, 12, 13, 14, 15, 16, 17, 18, 19 or 20 contiguous nucleic acids of a sequence of Table 6A or Table 6B or a complement thereof.

[0541] In some embodiments, the ASOs disclosed herein target a NSAE pre-mRNA transcribed from a SLC30A9 genomic sequence. In some embodiments, the ASO targets a NSAE pre-mRNA transcript from a SLC30A9 genomic sequence comprising a NSAE exon. In some embodiments, the ASO targets a NSAE pre-mRNA transcript from a SLC30A9 genomic sequence comprising an intron flanking the 3′ splice site of the NSAE exon and an intron flanking the 5′ splice site of a NSAE exon. In some embodiments, the ASO targets a NSAE pre-mRNA transcript comprising a sequence selected from the group consisting of premrna_ENST00000264451.12, premrna_ENST00000505523.1, premrna_ENST00000509683.5, premrna_ENST00000510460.1, and premrna_ENST00000513699.5. In some embodiments, the ASO targets a SLC30A9 pre-mRNA sequence comprising a NSAE exon. In some embodiments, the ASO targets a SLC30A9 pre-mRNA sequence comprising an intron flanking the 3′ splice site of the NSAE exon. In some embodiments, the ASO targets a SLC30A9 pre-mRNA sequence comprising an intron flanking the 5′ splice site of the NSAE exon. In some embodiments, the transcript is selected from the group consisting of transcript_ENST00000264451.12, transcript_ENST00000505523.1, transcript_ENST00000509683.5, transcript_ENST00000510460.1, and transcript_ENST00000513699.5.

[0542] In some embodiments, the SLC30A9 pre-mRNA transcript is encoded by a genetic sequence with at least about 80%, 85%, 90%, 95%, 96%, 97%, 98%, 99% or 100% sequence identity to the Ensembl reference number ENSG00000014824.14 or a complement thereof. In some embodiments, the SLC30A9 pre-mRNA transcript comprises a sequence with at least about 80%, 85%, 90%, 95%, 96%, 97%, 98%, 99% or 100% sequence identity to a SLC30A9 pre-mRNA transcript or a complement thereof described herein.

[0543] In some embodiments, the targeted portion of the SLC30A9 pre-mRNA comprises a sequence with at least 80%, 85%, 90%, 95%, 97%, or 100% sequence identity to a region comprising at least 8 contiguous nucleic acids of a sequence of premrna_ENST00000264451.12, premrna_ENST00000505523.1, premrna_ENST00000509683.5, premrna_ENST00000510460.1, premrna_ENST00000513699.5 or a sequence of Table 3 or complements thereof. In some embodiments, the targeted portion of the SLC30A9 pre-mRNA comprises a sequence with at least 80%, 85%, 90%, 95%, 97%, or 100% sequence identity to a region comprising at least 8 contiguous nucleic acids of a sequence selected from the group consisting of SEQ ID NO: 938-SEQ ID NO: 941 or complements thereof. In some embodiments, the targeted portion of the SLC30A9 pre-mRNA comprises a sequence that is complementary to at least 8, 9, 10, 11, 12, 13, 14, 15, 16, 17, 18, 19 or 20 contiguous nucleic acids of a sequence of Table 6A or Table 6B or a complement thereof.

[0544] In some embodiments, the ASOs disclosed herein target a NSAE pre-mRNA transcribed from a SLC30A10 genomic sequence. In some embodiments, the ASO targets a NSAE pre-mRNA transcript from a SLC30A10 genomic sequence comprising a NSAE exon. In some embodiments, the ASO targets a NSAE pre-mRNA transcript from a SLC30A10 genomic sequence comprising an intron flanking the 3′ splice site of the NSAE exon and an intron flanking the 5′ splice site of a NSAE exon. In some embodiments, the ASO targets a NSAE pre-mRNA transcript comprising a sequence selected from the group consisting of premrna_ENST00000356609.2, premrna_ENST00000366926.3, premrna_ENST00000484079.1, and premrna_ENST00000484239.5. In some embodiments, the ASO targets a SLC30A10 pre-mRNA sequence comprising a NSAE exon. In some embodiments, the ASO targets a SLC30A10 pre-mRNA sequence comprising an intron flanking the 3′ splice site of the NSAE exon. In some embodiments, the ASO targets a SLC30A10 pre-mRNA sequence comprising an intron flanking the 5′ splice site of the NSAE exon. In some embodiments, the transcript is selected from the group consisting of transcript_ENST00000356609.2, transcript_ENST00000366926.3, transcript_ENST00000484079.1, and transcript_ENST00000484239.5.

[0545] In some embodiments, the SLC30A10 pre-mRNA transcript is encoded by a genetic sequence with at least about 80%, 85%, 90%, 95%, 96%, 97%, 98%, 99% or 100% sequence identity to the Ensembl reference number ENSG00000196660.11 or a complement thereof. In some embodiments, the SLC30A10 pre-mRNA transcript comprises a sequence with at least about 80%, 85%, 90%, 95%, 96%, 97%, 98%, 99% or 100% sequence identity to a SLC30A10 pre-mRNA transcript or a complement thereof described herein.

[0546] In some embodiments, the targeted portion of the SLC30A10 pre-mRNA comprises a sequence with at least 80%, 85%, 90%, 95%, 97%, or 100% sequence identity to a region comprising at least 8 contiguous nucleic acids of a sequence of premrna_ENST00000356609.2, premrna_ENST00000366926.3, premrna_ENST00000484079.1, premrna_ENST00000484239.5 or a sequence of Table 3 or complements thereof. In some embodiments, the targeted portion of the SLC30A10 pre-mRNA comprises a sequence with at least 80%, 85%, 90%, 95%, 97%, or 100% sequence identity to a region comprising at least 8 contiguous nucleic acids of a sequence selected from the group consisting of SEQ ID NO: 942-SEQ ID NO: 945 or complements thereof. In some embodiments, the targeted portion of the SLC30A10 pre-mRNA comprises a sequence that is complementary to at least 8, 9, 10, 11, 12, 13, 14, 15, 16, 17, 18, 19 or 20 contiguous nucleic acids of a sequence of Table 6A or Table 6B or a complement thereof.

[0547] In some embodiments, the ASOs disclosed herein target a NSAE pre-mRNA transcribed from a SMPD1 genomic sequence. In some embodiments, the ASO targets a NSAE pre-mRNA transcript from a SMPD1 genomic sequence comprising a NSAE exon. In some embodiments, the ASO targets a NSAE pre-mRNA transcript from a SMPD1 genomic sequence comprising an intron flanking the 3′ splice site of the NSAE exon and an intron flanking the 5′ splice site of a NSAE exon. In some embodiments, the ASO targets a NSAE pre-mRNA transcript comprising a sequence selected from the group consisting of premrna_ENST00000342245.9, premrna_ENST00000526280.1, premrna_ENST00000527275.5, premrna_ENST00000530395.1, premrna_ENST00000531303.5, premrna_ENST00000531336.1, premrna_ENST00000532367.1, premrna_ENST00000533123.5, premrna_ENST00000533196.1, and premrna_ENST00000534405.5. In some embodiments, the ASO targets a SMPD1 pre-mRNA sequence comprising a NSAE exon. In some embodiments, the ASO targets a SMPD1 pre-mRNA sequence comprising an intron flanking the 3′ splice site of the NSAE exon. In some embodiments, the ASO targets a SMPD1 pre-mRNA sequence comprising an intron flanking the 5′ splice site of the NSAE exon. In some embodiments, the transcript is selected from the group consisting of transcript_ENST00000342245.9, transcript_ENST00000526280.1, transcript_ENST00000527275.5, transcript_ENST00000530395.1, transcript_ENST00000531303.5, transcript_ENST00000531336.1, transcript_ENST00000532367.1, transcript_ENST00000533123.5, transcript_ENST00000533196.1, and transcript_ENST00000534405.5.

[0548] In some embodiments, the SMPD1 pre-mRNA transcript is encoded by a genetic sequence with at least about 80%, 85%, 90%, 95%, 96%, 97%, 98%, 99% or 100% sequence identity to the Ensembl reference number ENSG00000166311.10 or a complement thereof. In some embodiments, the SMPD1 pre-mRNA transcript comprises a sequence with at least about 80%, 85%, 90%, 95%, 96%, 97%, 98%, 99% or 100% sequence identity to a SMPD1 pre-mRNA transcript or a complement thereof described herein.

[0549] In some embodiments, the targeted portion of the SMPD1 pre-mRNA comprises a sequence with at least 80%, 85%, 90%, 95%, 97%, or 100% sequence identity to a region comprising at least 8 contiguous nucleic acids of a sequence of premrna_ENST00000342245.9, premrna_ENST00000526280.1, premrna_ENST00000527275.5, premrna_ENST00000530395.1, premrna_ENST00000531303.5, premrna_ENST00000531336.1, premrna_ENST00000532367.1, premrna_ENST00000533123.5, premrna_ENST00000533196.1, premrna_ENST00000534405.5 or a sequence of Table 3 or complements thereof. In some embodiments, the targeted portion of the SMPD1 pre-mRNA comprises a sequence with at least 80%, 85%, 90%, 95%, 97%, or 100% sequence identity to a region comprising at least 8 contiguous nucleic acids of a sequence selected from the group consisting of SEQ ID NO: 946-SEQ ID NO: 951 or complements thereof. In some embodiments, the targeted portion of the SMPD1 pre-mRNA comprises a sequence that is complementary to at least 8, 9, 10, 11, 12, 13, 14, 15, 16, 17, 18, 19 or 20 contiguous nucleic acids of a sequence of Table 6A or Table 6B or a complement thereof.

[0550] In some embodiments, the ASOs disclosed herein target a NSAE pre-mRNA transcribed from a SMTN genomic sequence. In some embodiments, the ASO targets a NSAE pre-mRNA transcript from a SMTN genomic sequence comprising a NSAE exon. In some embodiments, the ASO targets a NSAE pre-mRNA transcript from a SMTN genomic sequence comprising an intron flanking the 3′ splice site of the NSAE exon and an intron flanking the 5′ splice site of a NSAE exon. In some embodiments, the ASO targets a NSAE pre-mRNA transcript comprising a sequence selected from the group consisting of premrna_ENST00000333137.11, premrna_ENST00000347557.6, premrna_ENST00000358743.5, premrna_ENST00000404574.5, premrna_ENST00000416786.5, premrna_ENST00000422839.5, premrna_ENST00000426927.5, premrna_ENST00000431481.1, premrna_ENST00000432777.5, premrna_ENST00000438223.5, premrna_ENST00000440425.5, premrna_ENST00000455608.5, premrna_ENST00000460658.5, premrna_ENST00000466272.1, premrna_ENST00000472911.1, premrna_ENST00000475548.5, premrna_ENST00000482444.5, premrna_ENST00000489337.5, premrna_ENST00000493335.5, premrna_ENST00000497697.5, premrna_ENST00000504335.1, premrna_ENST00000612341.4, premrna_ENST00000619644.4, and premrna_ENST00000624247.1. In some embodiments, the ASO targets a SMTN pre-mRNA sequence comprising a NSAE exon. In some embodiments, the ASO targets a SMTN pre-mRNA sequence comprising an intron flanking the 3′ splice site of the NSAE exon. In some embodiments, the ASO targets a SMTN pre-mRNA sequence comprising an intron flanking the 5′ splice site of the NSAE exon. In some embodiments, the transcript is selected from the group consisting of transcript_ENST00000333137.11, transcript_ENST00000347557.6, transcript_ENST00000358743.5, transcript_ENST00000404574.5, transcript_ENST00000416786.5, transcript_ENST00000422839.5, transcript_ENST00000426927.5, transcript_ENST00000431481.1, transcript_ENST00000432777.5, transcript_ENST00000438223.5, transcript_ENST00000440425.5, transcript_ENST00000455608.5, transcript_ENST00000460658.5, transcript_ENST00000466272.1, transcript_ENST00000472911.1, transcript_ENST00000475548.5, transcript_ENST00000482444.5, transcript_ENST00000489337.5, transcript_ENST00000493335.5, transcript_ENST00000497697.5, transcript_ENST00000504335.1, transcript_ENST00000612341.4, transcript_ENST00000619644.4, and transcript_ENST00000624247.1.

[0551] In some embodiments, the SMTN pre-mRNA transcript is encoded by a genetic sequence with at least about 80%, 85%, 90%, 95%, 96%, 97%, 98%, 99% or 100% sequence identity to the Ensembl reference number ENSG00000183963.18 or a complement thereof. In some embodiments, the SMTN pre-mRNA transcript comprises a sequence with at least about 80%, 85%, 90%, 95%, 96%, 97%, 98%, 99% or 100% sequence identity to a SMTN pre-mRNA transcript or a complement thereof described herein.

[0552] In some embodiments, the targeted portion of the SMTN pre-mRNA comprises a sequence with at least 80%, 85%, 90%, 95%, 97%, or 100% sequence identity to a region comprising at least 8 contiguous nucleic acids of a sequence of premrna_ENST00000333137.11, premrna_ENST00000347557.6, premrna_ENST00000358743.5, premrna_ENST00000404574.5, premrna_ENST00000416786.5, premrna_ENST00000422839.5, premrna_ENST00000426927.5, premrna_ENST00000431481.1, premrna_ENST00000432777.5, premrna_ENST00000438223.5, premrna_ENST00000440425.5, premrna_ENST00000455608.5, premrna_ENST00000460658.5, premrna_ENST00000466272.1, premrna_ENST00000472911.1, premrna_ENST00000475548.5, premrna_ENST00000482444.5, premrna_ENST00000489337.5, premrna_ENST00000493335.5, premrna_ENST00000497697.5, premrna_ENST00000504335.1, premrna_ENST00000612341.4, premrna_ENST00000619644.4, premrna_ENST00000624247.1 or a sequence of Table 3 or complements thereof. In some embodiments, the targeted portion of the SMTN pre-mRNA comprises a sequence with at least 80%, 85%, 90%, 95%, 97%, or 100% sequence identity to a region comprising at least 8 contiguous nucleic acids of a sequence selected from the group consisting of SEQ ID NO: 952-SEQ ID NO: 959 or complements thereof. In some embodiments, the targeted portion of the SMTN pre-mRNA comprises a sequence that is complementary to at least 8, 9, 10, 11, 12, 13, 14, 15, 16, 17, 18, 19 or 20 contiguous nucleic acids of a sequence of Table 6A or Table 6B or a complement thereof.

[0553] In some embodiments, the ASOs disclosed herein target a NSAE pre-mRNA transcribed from a SNRPB genomic sequence. In some embodiments, the ASO targets a NSAE pre-mRNA transcript from a SNRPB genomic sequence comprising a NSAE exon. In some embodiments, the ASO targets a NSAE pre-mRNA transcript from a SNRPB genomic sequence comprising an intron flanking the 3′ splice site of the NSAE exon and an intron flanking the 5′ splice site of a NSAE exon. In some embodiments, the ASO targets a NSAE pre-mRNA transcript comprising a sequence selected from the group consisting of premrna_ENST00000381342.6, premrna_ENST00000438552.6, and premrna_ENST00000474384.2. In some embodiments, the ASO targets a SNRPB pre-mRNA sequence comprising a NSAE exon. In some embodiments, the ASO targets a SNRPB pre-mRNA sequence comprising an intron flanking the 3′ splice site of the NSAE exon. In some embodiments, the ASO targets a SNRPB pre-mRNA sequence comprising an intron flanking the 5′ splice site of the NSAE exon. In some embodiments, the transcript is selected from the group consisting of transcript_ENST00000381342.6, transcript_ENST00000438552.6, and transcript_ENST00000474384.2.

[0554] In some embodiments, the SNRPB pre-mRNA transcript is encoded by a genetic sequence with at least about 80%, 85%, 90%, 95%, 96%, 97%, 98%, 99% or 100% sequence identity to the Ensembl reference number ENSG00000125835.19 or a complement thereof. In some embodiments, the SNRPB pre-mRNA transcript comprises a sequence with at least about 80%, 85%, 90%, 95%, 96%, 97%, 98%, 99% or 100% sequence identity to a SNRPB pre-mRNA transcript or a complement thereof described herein.

[0555] In some embodiments, the targeted portion of the SNRPB pre-mRNA comprises a sequence with at least 80%, 85%, 90%, 95%, 97%, or 100% sequence identity to a region comprising at least 8 contiguous nucleic acids of a sequence of premrna_ENST00000381342.6, premrna_ENST00000438552.6, premrna_ENST00000474384.2 or a sequence of Table 3 or complements thereof. In some embodiments, the targeted portion of the SNRPB pre-mRNA comprises a sequence with at least 80%, 85%, 90%, 95%, 97%, or 100% sequence identity to a region comprising at least 8 contiguous nucleic acids of a sequence selected from the group consisting of SEQ ID NO: 960-SEQ ID NO: 963 or complements thereof. In some embodiments, the targeted portion of the SNRPB pre-mRNA comprises a sequence that is complementary to at least 8, 9, 10, 11, 12, 13, 14, 15, 16, 17, 18, 19 or 20 contiguous nucleic acids of a sequence of Table 6A or Table 6B or a complement thereof.

[0556] In some embodiments, the ASOs disclosed herein target a NSAE pre-mRNA transcribed from a SP140 genomic sequence. In some embodiments, the ASO targets a NSAE pre-mRNA transcript from a SP140 genomic sequence comprising a NSAE exon. In some embodiments, the ASO targets a NSAE pre-mRNA transcript from a SP140 genomic sequence comprising an intron flanking the 3′ splice site of the NSAE exon and an intron flanking the 5′ splice site of a NSAE exon. In some embodiments, the ASO targets a NSAE pre-mRNA transcript comprising a sequence selected from the group consisting of premrna_ENST00000343805.10, premrna_ENST00000373645.3, premrna_ENST00000392045.8, premrna_ENST00000417495.7, premrna_ENST00000420434.7, premrna_ENST00000441657.1, premrna_ENST00000456542.5, premrna_ENST00000473711.1, premrna_ENST00000476126.1, premrna_ENST00000479539.1, premrna_ENST00000486750.1, premrna_ENST00000538494.1, premrna_ENST00000543928.5, premrna_ENST00000544128.5. In some embodiments, the ASO targets a SP140 pre-mRNA sequence comprising a NSAE exon. In some embodiments, the ASO targets a SP140 pre-mRNA sequence comprising an intron flanking the 3′ splice site of the NSAE exon. In some embodiments, the ASO targets a SP140 pre-mRNA sequence comprising an intron flanking the 5′ splice site of the NSAE exon. In some embodiments, the transcript is selected from the group consisting of transcript_ENST00000343805.10, transcript_ENST00000373645.3, transcript_ENST00000392045.8, transcript_ENST00000417495.7, transcript_ENST00000420434.7, transcript_ENST00000441657.1, transcript_ENST00000456542.5, transcript_ENST00000473711.1, transcript_ENST00000476126.1, transcript_ENST00000479539.1, transcript_ENST00000486750.1, transcript_ENST00000538494.1, transcript_ENST00000543928.5, and transcript_ENST00000544128.5.

[0557] In some embodiments, the SP140 pre-mRNA transcript is encoded by a genetic sequence with at least about 80%, 85%, 90%, 95%, 96%, 97%, 98%, 99% or 100% sequence identity to the Ensembl reference number ENSG00000079263.19 or a complement thereof. In some embodiments, the SP140 pre-mRNA transcript comprises a sequence with at least about 80%, 85%, 90%, 95%, 96%, 97%, 98%, 99% or 100% sequence identity to a SP140 pre-mRNA transcript or a complement thereof described herein.

[0558] In some embodiments, the targeted portion of the SP140 pre-mRNA comprises a sequence with at least 80%, 85%, 90%, 95%, 97%, or 100% sequence identity to a region comprising at least 8 contiguous nucleic acids of a sequence of premrna_ENST00000343805.10, premrna_ENST00000373645.3, premrna_ENST00000392045.8, premrna_ENST00000417495.7, premrna_ENST00000420434.7, premrna_ENST00000441657.1, premrna_ENST00000456542.5, premrna_ENST00000473711.1, premrna_ENST00000476126.1, premrna_ENST00000479539.1, premrna_ENST00000486750.1, premrna_ENST00000538494.1, premrna_ENST00000543928.5, premrna_ENST00000544128.5 or a sequence of Table 3 or complements thereof. In some embodiments, the targeted portion of the SP140 pre-mRNA comprises a sequence with at least 80%, 85%, 90%, 95%, 97%, or 100% sequence identity to a region comprising at least 8 contiguous nucleic acids of a sequence selected from the group consisting of SEQ ID NO: 964-SEQ ID NO: 967 or complements thereof. In some embodiments, the targeted portion of the SP140 pre-mRNA comprises a sequence that is complementary to at least 8, 9, 10, 11, 12, 13, 14, 15, 16, 17, 18, 19 or 20 contiguous nucleic acids of a sequence of Table 6A or Table 6B or a complement thereof.

[0559] In some embodiments, the ASOs disclosed herein target a NSAE pre-mRNA transcribed from a STAMBP genomic sequence. In some embodiments, the ASO targets a NSAE pre-mRNA transcript from a STAMBP genomic sequence comprising a NSAE exon. In some embodiments, the ASO targets a NSAE pre-mRNA transcript from a STAMBP genomic sequence comprising an intron flanking the 3′ splice site of the NSAE exon and an intron flanking the 5′ splice site of a NSAE exon. In some embodiments, the ASO targets a NSAE pre-mRNA transcript comprising a sequence selected from the group consisting of premrna_ENST00000339566.7, premrna_ENST00000394070.7, premrna_ENST00000394073.5, premrna_ENST00000409707.5, premrna_ENST00000424659.5, premrna_ENST00000432295.6, premrna_ENST00000452725.5, premrna_ENST00000478946.1, premrna_ENST00000486458.1, premrna_ENST00000487811.1, and premrna_ENST00000536064.1. In some embodiments, the ASO targets a STAMBP pre-mRNA sequence comprising a NSAE exon. In some embodiments, the ASO targets a STAMBP pre-mRNA sequence comprising an intron flanking the 3′ splice site of the NSAE exon. In some embodiments, the ASO targets a STAMBP pre-mRNA sequence comprising an intron flanking the 5′ splice site of the NSAE exon. In some embodiments, the transcript is selected from the group consisting of transcript_ENST00000339566.7, transcript_ENST00000394070.7, transcript_ENST00000394073.5, transcript_ENST00000409707.5, transcript_ENST00000424659.5, transcript_ENST00000432295.6, transcript_ENST00000452725.5, transcript_ENST00000478946.1, transcript_ENST00000486458.1, transcript_ENST00000487811.1, and transcript_ENST00000536064.1.

[0560] In some embodiments, the STAMBP pre-mRNA transcript is encoded by a genetic sequence with at least about 80%, 85%, 90%, 95%, 96%, 97%, 98%, 99% or 100% sequence identity to the Ensembl reference number ENSG00000124356.16 or a complement thereof. In some embodiments, the STAMBP pre-mRNA transcript comprises a sequence with at least about 80%, 85%, 90%, 95%, 96%, 97%, 98%, 99% or 100% sequence identity to a STAMBP pre-mRNA transcript or a complement thereof described herein.

[0561] In some embodiments, the targeted portion of the STAMBP pre-mRNA comprises a sequence with at least 80%, 85%, 90%, 95%, 97%, or 100% sequence identity to a region comprising at least 8 contiguous nucleic acids of a sequence of premrna_ENST00000339566.7, premrna_ENST00000394070.7, premrna_ENST00000394073.5, premrna_ENST00000409707.5, premrna_ENST00000424659.5, premrna_ENST00000432295.6, premrna_ENST00000452725.5, premrna_ENST00000478946.1, premrna_ENST00000486458.1, premrna_ENST00000487811.1, premrna_ENST00000536064.1 or a sequence of Table 3 or complements thereof. In some embodiments, the targeted portion of the STAMBP pre-mRNA comprises a sequence with at least 80%, 85%, 90%, 95%, 97%, or 100% sequence identity to a region comprising at least 8 contiguous nucleic acids of a sequence selected from the group consisting of SEQ ID NO: 968-SEQ ID NO: 971 or complements thereof. In some embodiments, the targeted portion of the STAMBP pre-mRNA comprises a sequence that is complementary to at least 8, 9, 10, 11, 12, 13, 14, 15, 16, 17, 18, 19 or 20 contiguous nucleic acids of a sequence of Table 6A or Table 6B or a complement thereof.

[0562] In some embodiments, the ASOs disclosed herein target a NSAE pre-mRNA transcribed from a STXBP2 genomic sequence. In some embodiments, the ASO targets a NSAE pre-mRNA transcript from a STXBP2 genomic sequence comprising a NSAE exon. In some embodiments, the ASO targets a NSAE pre-mRNA transcript from a STXBP2 genomic sequence comprising an intron flanking the 3′ splice site of the NSAE exon and an intron flanking the 5′ splice site of a NSAE exon. In some embodiments, the ASO targets a NSAE pre-mRNA transcript comprising a sequence selected from the group consisting of premrna_ENST00000221283.10, premrna_ENST00000414284.6, premrna_ENST00000441779.6, premrna_ENST00000593535.5, premrna_ENST00000593854.5, premrna_ENST00000594221.5, premrna_ENST00000595181.5, premrna_ENST00000595800.1, premrna_ENST00000595861.1, premrna_ENST00000595950.5, premrna_ENST00000597068.5, premrna_ENST00000597467.1, premrna_ENST00000599278.1, premrna_ENST00000599400.1, premrna_ENST00000599558.1, premrna_ENST00000599648.1, premrna_ENST00000599737.5, premrna_ENST00000599905.1, premrna_ENST00000600702.5, premrna_ENST00000601061.1, premrna_ENST00000602355.1, and premrna_ENST00000612033.1. In some embodiments, the ASO targets a STXBP2 pre-mRNA sequence comprising a NSAE exon. In some embodiments, the ASO targets a STXBP2 pre-mRNA sequence comprising an intron flanking the 3′ splice site of the NSAE exon. In some embodiments, the ASO targets a STXBP2 pre-mRNA sequence comprising an intron flanking the 5′ splice site of the NSAE exon. In some embodiments, the transcript is selected from the group consisting of transcript_ENST00000221283.10, transcript_ENST00000414284.6, transcript_ENST00000441779.6, transcript_ENST00000593535.5, transcript_ENST00000593854.5, transcript_ENST00000594221.5, transcript_ENST00000595181.5, transcript_ENST00000595800.1, transcript_ENST00000595861.1, transcript_ENST00000595950.5, transcript_ENST00000597068.5, transcript_ENST00000597467.1, transcript_ENST00000599278.1, transcript_ENST00000599400.1, transcript_ENST00000599558.1, transcript_ENST00000599648.1, transcript_ENST00000599737.5, transcript_ENST00000599905.1, transcript_ENST00000600702.5, transcript_ENST00000601061.1, transcript_ENST00000602355.1, and transcript_ENST00000612033.1.

[0563] In some embodiments, the STXBP2 pre-mRNA transcript is encoded by a genetic sequence with at least about 80%, 85%, 90%, 95%, 96%, 97%, 98%, 99% or 100% sequence identity to the Ensembl reference number ENSG00000076944.16 or a complement thereof. In some embodiments, the STXBP2 pre-mRNA transcript comprises a sequence with at least about 80%, 85%, 90%, 95%, 96%, 97%, 98%, 99% or 100% sequence identity to a STXBP2 pre-mRNA transcript or a complement thereof described herein.

[0564] In some embodiments, the targeted portion of the STXBP2 pre-mRNA comprises a sequence with at least 80%, 85%, 90%, 95%, 97%, or 100% sequence identity to a region comprising at least 8 contiguous nucleic acids of a sequence of premrna_ENST00000221283.10, premrna_ENST00000414284.6, premrna_ENST00000441779.6, premrna_ENST00000593535.5, premrna_ENST00000593854.5, premrna_ENST00000594221.5, premrna_ENST00000595181.5, premrna_ENST00000595800.1, premrna_ENST00000595861.1, premrna_ENST00000595950.5, premrna_ENST00000597068.5, premrna_ENST00000597467.1, premrna_ENST00000599278.1, premrna_ENST00000599400.1, premrna_ENST00000599558.1, premrna_ENST00000599648.1, premrna_ENST00000599737.5, premrna_ENST00000599905.1, premrna_ENST00000600702.5, premrna_ENST00000601061.1, premrna_ENST00000602355.1, premrna_ENST00000612033.1 or a sequence of Table 3 or complements thereof. In some embodiments, the targeted portion of the STXBP2 pre-mRNA comprises a sequence with at least 80%, 85%, 90%, 95%, 97%, or 100% sequence identity to a region comprising at least 8 contiguous nucleic acids of a sequence selected from the group consisting of SEQ ID NO: 972-SEQ ID NO: 975 or complements thereof. In some embodiments, the targeted portion of the STXBP2 pre-mRNA comprises a sequence that is complementary to at least 8, 9, 10, 11, 12, 13, 14, 15, 16, 17, 18, 19 or 20 contiguous nucleic acids of a sequence of Table 6A or Table 6B or a complement thereof.

[0565] In some embodiments, the ASOs disclosed herein target a NSAE pre-mRNA transcribed from a SULF2 genomic sequence. In some embodiments, the ASO targets a NSAE pre-mRNA transcript from a SULF2 genomic sequence comprising a NSAE exon. In some embodiments, the ASO targets a NSAE pre-mRNA transcript from a SULF2 genomic sequence comprising an intron flanking the 3′ splice site of the NSAE exon and an intron flanking the 5′ splice site of a NSAE exon. In some embodiments, the ASO targets a NSAE pre-mRNA transcript comprising a sequence selected from the group consisting of premrna_ENST00000359930.8, premrna_ENST00000433632.1, premrna_ENST00000437955.1, premrna_ENST00000463221.2, premrna_ENST00000465769.1, premrna_ENST00000467815.5, premrna_ENST00000474450.5, premrna_ENST00000478766.1, premrna_ENST00000479472.1, premrna_ENST00000479970.1, premrna_ENST00000484875.5, and premrna_ENST00000495544.5. In some embodiments, the ASO targets a SULF2 pre-mRNA sequence comprising a NSAE exon. In some embodiments, the ASO targets a SULF2 pre-mRNA sequence comprising an intron flanking the 3′ splice site of the NSAE exon. In some embodiments, the ASO targets a SULF2 pre-mRNA sequence comprising an intron flanking the 5′ splice site of the NSAE exon. In some embodiments, the transcript is selected from the group consisting of transcript_ENST00000359930.8, transcript_ENST00000433632.1, transcript_ENST00000437955.1, transcript_ENST00000463221.2, transcript_ENST00000465769.1, transcript_ENST00000467815.5, transcript_ENST00000474450.5, transcript_ENST00000478766.1, transcript_ENST00000479472.1, transcript_ENST00000479970.1, transcript_ENST00000484875.5, and transcript_ENST00000495544.5.

[0566] In some embodiments, the SULF2 pre-mRNA transcript is encoded by a genetic sequence with at least about 80%, 85%, 90%, 95%, 96%, 97%, 98%, 99% or 100% sequence identity to the Ensembl reference number ENSG00000196562.14 or a complement thereof. In some embodiments, the SULF2 pre-mRNA transcript comprises a sequence with at least about 80%, 85%, 90%, 95%, 96%, 97%, 98%, 99% or 100% sequence identity to a SULF2 pre-mRNA transcript or a complement thereof described herein.

[0567] In some embodiments, the targeted portion of the SULF2 pre-mRNA comprises a sequence with at least 80%, 85%, 90%, 95%, 97%, or 100% sequence identity to a region comprising at least 8 contiguous nucleic acids of a sequence of premrna_ENST00000359930.8, premrna_ENST00000433632.1, premrna_ENST00000437955.1, premrna_ENST00000463221.2, premrna_ENST00000465769.1, premrna_ENST00000467815.5, premrna_ENST00000474450.5, premrna_ENST00000478766.1, premrna_ENST00000479472.1, premrna_ENST00000479970.1, premrna_ENST00000484875.5, premrna_ENST00000495544.5 or a sequence of Table 3 or complements thereof. In some embodiments, the targeted portion of the SULF2 pre-mRNA comprises a sequence with at least 80%, 85%, 90%, 95%, 97%, or 100% sequence identity to a region comprising at least 8 contiguous nucleic acids of a sequence selected from the group consisting of SEQ ID NO: 976-SEQ ID NO: 979 or complements thereof. In some embodiments, the targeted portion of the SULF2 pre-mRNA comprises a sequence that is complementary to at least 8, 9, 10, 11, 12, 13, 14, 15, 16, 17, 18, 19 or 20 contiguous nucleic acids of a sequence of Table 6A or Table 6B or a complement thereof.

[0568] In some embodiments, the ASOs disclosed herein target a NSAE pre-mRNA transcribed from a SYNGAP1 genomic sequence. In some embodiments, the ASO targets a NSAE pre-mRNA transcript from a SYNGAP1 genomic sequence comprising a NSAE exon. In some embodiments, the ASO targets a NSAE pre-mRNA transcript from a SYNGAP1 genomic sequence comprising an intron flanking the 3′ splice site of the NSAE exon and an intron flanking the 5′ splice site of a NSAE exon. In some embodiments, the ASO targets a NSAE pre-mRNA transcript comprising a sequence selected from the group consisting of premrna_ENST00000293748.9, premrna_ENST00000418600.7, premrna_ENST00000428982.4, premrna_ENST00000449372.7, premrna_ENST00000470232.1, premrna_ENST00000479510.2, premrna_ENST00000628646.2, premrna_ENST00000629380.3, premrna_ENST00000635885.1, premrna_ENST00000636075.1, premrna_ENST00000636116.1, premrna_ENST00000636146.1, premrna_ENST00000636193.1, premrna_ENST00000636436.1, premrna_ENST00000636443.1, premrna_ENST00000636640.1, premrna_ENST00000636731.1, premrna_ENST00000636905.1, premrna_ENST00000637052.1, premrna_ENST00000637194.1, premrna_ENST00000637490.1, premrna_ENST00000637587.1, premrna_ENST00000637671.1, premrna_ENST00000637721.1, premrna_ENST00000637911.1, premrna_ENST00000638127.1, premrna_ENST00000638142.2, premrna_ENST00000644458.1, premrna_ENST00000645250.1, and premrna_ENST00000646630.1. In some embodiments, the ASO targets a SYNGAP1 pre-mRNA sequence comprising a NSAE exon. In some embodiments, the ASO targets a SYNGAP1 pre-mRNA sequence comprising an intron flanking the 3′ splice site of the NSAE exon. In some embodiments, the ASO targets a SYNGAP1 pre-mRNA sequence comprising an intron flanking the 5′ splice site of the NSAE exon. In some embodiments, the transcript is selected from the group consisting of transcript_ENST00000293748.9, transcript_ENST00000418600.7, transcript_ENST00000428982.4, transcript_ENST00000449372.7, transcript_ENST00000470232.1, transcript_ENST00000479510.2, transcript_ENST00000628646.2, transcript_ENST00000629380.3, transcript_ENST00000635885.1, transcript_ENST00000636075.1, transcript_ENST00000636116.1, transcript_ENST00000636146.1, transcript_ENST00000636193.1, transcript_ENST00000636436.1, transcript_ENST00000636443.1, transcript_ENST00000636640.1, transcript_ENST00000636731.1, transcript_ENST00000636905.1, transcript_ENST00000637052.1, transcript_ENST00000637194.1, transcript_ENST00000637490.1, transcript_ENST00000637587.1, transcript_ENST00000637671.1, transcript_ENST00000637721.1, transcript_ENST00000637911.1, transcript_ENST00000638127.1, transcript_ENST00000638142.2, transcript_ENST00000644458.1, transcript_ENST00000645250.1, and transcript_ENST00000646630.1.

[0569] In some embodiments, the SYNGAP1 pre-mRNA transcript is encoded by a genetic sequence with at least about 80%, 85%, 90%, 95%, 96%, 97%, 98%, 99% or 100% sequence identity to the Ensembl reference number ENSG00000197283.17, ENSG00000227460.8, or ENSG00000274259.2 or a complement thereof. In some embodiments, the SYNGAP1 pre-mRNA transcript comprises a sequence with at least about 80%, 85%, 90%, 95%, 96%, 97%, 98%, 99% or 100% sequence identity to a SYNGAP1 pre-mRNA transcript or a complement thereof described herein.

[0570] In some embodiments, the targeted portion of the SYNGAP1 pre-mRNA comprises a sequence with at least 80%, 85%, 90%, 95%, 97%, or 100% sequence identity to a region comprising at least 8 contiguous nucleic acids of a sequence of premrna_ENST00000293748.9, premrna_ENST00000418600.7, premrna_ENST00000428982.4, premrna_ENST00000449372.7, premrna_ENST00000470232.1, premrna_ENST00000479510.2, premrna_ENST00000628646.2, premrna_ENST00000629380.3, premrna_ENST00000635885.1, premrna_ENST00000636075.1, premrna_ENST00000636116.1, premrna_ENST00000636146.1, premrna_ENST00000636193.1, premrna_ENST00000636436.1, premrna_ENST00000636443.1, premrna_ENST00000636640.1, premrna_ENST00000636731.1, premrna_ENST00000636905.1, premrna_ENST00000637052.1, premrna_ENST00000637194.1, premrna_ENST00000637490.1, premrna_ENST00000637587.1, premrna_ENST00000637671.1, premrna_ENST00000637721.1, premrna_ENST00000637911.1, premrna_ENST00000638127.1, premrna_ENST00000638142.2, premrna_ENST00000644458.1, premrna_ENST00000645250.1, premrna_ENST00000646630.1 or a sequence of Table 2 or complements thereof. In some embodiments, the targeted portion of the SYNGAP1 pre-mRNA comprises a sequence with at least 80%, 85%, 90%, 95%, 97%, or 100% sequence identity to a region comprising at least 8 contiguous nucleic acids of a sequence selected from the group consisting of SEQ ID NO: 980-SEQ ID NO: 983 or complements thereof. In some embodiments, the targeted portion of the SYNGAP1 pre-mRNA comprises a sequence that is complementary to at least 8, 9, 10, 11, 12, 13, 14, 15, 16, 17, 18, 19 or 20 contiguous nucleic acids of a sequence of Table 6A or Table 6B or a complement thereof.

[0571] In some embodiments, the ASOs disclosed herein target a NSAE pre-mRNA transcribed from a SYNJ2 genomic sequence. In some embodiments, the ASO targets a NSAE pre-mRNA transcript from a SYNJ2 genomic sequence comprising a NSAE exon. In some embodiments, the ASO targets a NSAE pre-mRNA transcript from a SYNJ2 genomic sequence comprising an intron flanking the 3′ splice site of the NSAE exon and an intron flanking the 5′ splice site of a NSAE exon. In some embodiments, the ASO targets a NSAE pre-mRNA transcript comprising a sequence selected from the group consisting of premrna_ENST00000355585.9, premrna_ENST00000367112.1, premrna_ENST00000367113.5, premrna_ENST00000367122.6, premrna_ENST00000449320.2, premrna_ENST00000485863.1, premrna_ENST00000638626.1, premrna_ENST00000640338.1, and premrna_ENST00000640569.1. In some embodiments, the ASO targets a SYNJ2 pre-mRNA sequence comprising a NSAE exon. In some embodiments, the ASO targets a SYNJ2 pre-mRNA sequence comprising an intron flanking the 3′ splice site of the NSAE exon. In some embodiments, the ASO targets a SYNJ2 pre-mRNA sequence comprising an intron flanking the 5′ splice site of the NSAE exon. In some embodiments, the transcript is selected from the group consisting of transcript_ENST00000355585.9, transcript_ENST00000367112.1, transcript_ENST00000367113.5, transcript_ENST00000367122.6, transcript_ENST00000449320.2, transcript_ENST00000485863.1, transcript_ENST00000638626.1, transcript_ENST00000640338.1, and transcript_ENST00000640569.1.

[0572] In some embodiments, the SYNJ2 pre-mRNA transcript is encoded by a genetic sequence with at least about 80%, 85%, 90%, 95%, 96%, 97%, 98%, 99% or 100% sequence identity to the Ensembl reference number ENSG00000078269.15 or ENSG00000233496.1 or a complement thereof. In some embodiments, the SYNJ2 pre-mRNA transcript comprises a sequence with at least about 80%, 85%, 90%, 95%, 96%, 97%, 98%, 99% or 100% sequence identity to a SYNJ2 pre-mRNA transcript or a complement thereof described herein.

[0573] In some embodiments, the targeted portion of the SYNJ2 pre-mRNA comprises a sequence with at least 80%, 85%, 90%, 95%, 97%, or 100% sequence identity to a region comprising at least 8 contiguous nucleic acids of a sequence of premrna_ENST00000355585.9, premrna_ENST00000367112.1, premrna_ENST00000367113.5, premrna_ENST00000367122.6, premrna_ENST00000449320.2, premrna_ENST00000485863.1, premrna_ENST00000638626.1, premrna_ENST00000640338.1, premrna_ENST00000640569.1 or a sequence of Table 3 or complements thereof. In some embodiments, the targeted portion of the SYNJ2 pre-mRNA comprises a sequence with at least 80%, 85%, 90%, 95%, 97%, or 100% sequence identity to a region comprising at least 8 contiguous nucleic acids of a sequence selected from the group consisting of SEQ ID NO: 984-SEQ ID NO: 987 or complements thereof. In some embodiments, the targeted portion of the SYNJ2 pre-mRNA comprises a sequence that is complementary to at least 8, 9, 10, 11, 12, 13, 14, 15, 16, 17, 18, 19 or 20 contiguous nucleic acids of a sequence of Table 6A or Table 6B or a complement thereof.

[0574] In some embodiments, the ASOs disclosed herein target a NSAE pre-mRNA transcribed from a TAZ genomic sequence. In some embodiments, the ASO targets a NSAE pre-mRNA transcript from a TAZ genomic sequence comprising a NSAE exon. In some embodiments, the ASO targets a NSAE pre-mRNA transcript from a TAZ genomic sequence comprising an intron flanking the 3′ splice site of the NSAE exon and an intron flanking the 5′ splice site of a NSAE exon. In some embodiments, the ASO targets a NSAE pre-mRNA transcript comprising a sequence selected from the group consisting of premrna_ENST00000369776.8, premrna_ENST00000426231.5, premrna_ENST00000439735.2, premrna_ENST00000470127.2, premrna_ENST00000475699.6, premrna_ENST00000476679.5, premrna_ENST00000476800.2, premrna_ENST00000479875.1, premrna_ENST00000483674.3, premrna_ENST00000483780.5, premrna_ENST00000494912.5, premrna_ENST00000498029.1, premrna_ENST00000601016.6, premrna_ENST00000612012.5, premrna_ENST00000612460.5, premrna_ENST00000613002.4, premrna_ENST00000613634.4, premrna_ENST00000614595.2, premrna_ENST00000615658.5, premrna_ENST00000615986.4, premrna_ENST00000616020.5, premrna_ENST00000617701.5, premrna_ENST00000620808.4, premrna_ENST00000621647.2, premrna_ENST00000651139.1, premrna_ENST00000652354.1, premrna_ENST00000652358.1, premrna_ENST00000652390.1, premrna_ENST00000652476.1, premrna_ENST00000652644.1, premrna_ENST00000652682.1, and premrna_ENST00000652685.1. In some embodiments, the ASO targets a TAZ pre-mRNA sequence comprising a NSAE exon. In some embodiments, the ASO targets a TAZ pre-mRNA sequence comprising an intron flanking the 3′ splice site of the NSAE exon. In some embodiments, the ASO targets a TAZ pre-mRNA sequence comprising an intron flanking the 5′ splice site of the NSAE exon. In some embodiments, the transcript is selected from the group consisting of transcript_ENST00000369776.8, transcript_ENST00000426231.5, transcript_ENST00000439735.2, transcript_ENST00000470127.2, transcript_ENST00000475699.6, transcript_ENST00000476679.5, transcript_ENST00000476800.2, transcript_ENST00000479875.1, transcript_ENST00000483674.3, transcript_ENST00000483780.5, transcript_ENST00000494912.5, transcript_ENST00000498029.1, transcript_ENST00000601016.6, transcript_ENST00000612012.5, transcript_ENST00000612460.5, transcript_ENST00000613002.4, transcript_ENST00000613634.4, transcript_ENST00000614595.2, transcript_ENST00000615658.5, transcript_ENST00000615986.4, transcript_ENST00000616020.5, transcript_ENST00000617701.5, transcript_ENST00000620808.4, transcript_ENST00000621647.2, transcript_ENST00000651139.1, transcript_ENST00000652354.1, transcript_ENST00000652358.1, transcript_ENST00000652390.1, transcript_ENST00000652476.1, transcript_ENST00000652644.1, transcript_ENST00000652682.1, and transcript_ENST00000652685.1.

[0575] In some embodiments, the TAZ pre-mRNA transcript is encoded by a genetic sequence with at least about 80%, 85%, 90%, 95%, 96%, 97%, 98%, 99% or 100% sequence identity to the Ensembl reference number ENSG00000102125.16 or a complement thereof. In some embodiments, the TAZ pre-mRNA transcript comprises a sequence with at least about 80%, 85%, 90%, 95%, 96%, 97%, 98%, 99% or 100% sequence identity to a TAZ pre-mRNA transcript or a complement thereof described herein.

[0576] In some embodiments, the targeted portion of the TAZ pre-mRNA comprises a sequence with at least 80%, 85%, 90%, 95%, 97%, or 100% sequence identity to a region comprising at least 8 contiguous nucleic acids of a sequence of premrna_ENST00000369776.8, premrna_ENST00000426231.5, premrna_ENST00000439735.2, premrna_ENST00000470127.2, premrna_ENST00000475699.6, premrna_ENST00000476679.5, premrna_ENST00000476800.2, premrna_ENST00000479875.1, premrna_ENST00000483674.3, premrna_ENST00000483780.5, premrna_ENST00000494912.5, premrna_ENST00000498029.1, premrna_ENST00000601016.6, premrna_ENST00000612012.5, premrna_ENST00000612460.5, premrna_ENST00000613002.4, premrna_ENST00000613634.4, premrna_ENST00000614595.2, premrna_ENST00000615658.5, premrna_ENST00000615986.4, premrna_ENST00000616020.5, premrna_ENST00000617701.5, premrna_ENST00000620808.4, premrna_ENST00000621647.2, premrna_ENST00000651139.1, premrna_ENST00000652354.1, premrna_ENST00000652358.1, premrna_ENST00000652390.1, premrna_ENST00000652476.1, premrna_ENST00000652644.1, premrna_ENST00000652682.1, premrna_ENST00000652685.1, or a sequence of Table 3 or complements thereof. In some embodiments, the targeted portion of the TAZ pre-mRNA comprises a sequence with at least 80%, 85%, 90%, 95%, 97%, or 100% sequence identity to a region comprising at least 8 contiguous nucleic acids of a sequence selected from the group consisting of SEQ ID NO: 988-SEQ ID NO: 991 or complements thereof. In some embodiments, the targeted portion of the TAZ pre-mRNA comprises a sequence that is complementary to at least 8, 9, 10, 11, 12, 13, 14, 15, 16, 17, 18, 19 or 20 contiguous nucleic acids of a sequence of Table 6A or Table 6B or a complement thereof.

[0577] In some embodiments, the ASOs disclosed herein target a NSAE pre-mRNA transcribed from a TBL2 genomic sequence. In some embodiments, the ASO targets a NSAE pre-mRNA transcript from a TBL2 genomic sequence comprising a NSAE exon. In some embodiments, the ASO targets a NSAE pre-mRNA transcript from a TBL2 genomic sequence comprising an intron flanking the 3′ splice site of the NSAE exon and an intron flanking the 5′ splice site of a NSAE exon. In some embodiments, the ASO targets a NSAE pre-mRNA transcript comprising a sequence selected from the group consisting of premrna_ENST00000305632.11, premrna_ENST00000417008.5, premrna_ENST00000424598.5, premrna_ENST00000426966.5, premrna_ENST00000432538.5, premrna_ENST00000433464.5, premrna_ENST00000435792.5, premrna_ENST00000437521.5, premrna_ENST00000450285.5, premrna_ENST00000452125.5, premrna_ENST00000452475.5, premrna_ENST00000458466.1, premrna_ENST00000459913.5, premrna_ENST00000465279.5, premrna_ENST00000468669.5, premrna_ENST00000469518.1, premrna_ENST00000476136.5, premrna_ENST00000479892.5, premrna_ENST00000488915.1, premrna_ENST00000495885.1, premrna_ENST00000496056.5, and premrna_ENST00000610724.4. In some embodiments, the ASO targets a TBL2 pre-mRNA sequence comprising a NSAE exon. In some embodiments, the ASO targets a TBL2 pre-mRNA sequence comprising an intron flanking the 3′ splice site of the NSAE exon. In some embodiments, the ASO targets a TBL2 pre-mRNA sequence comprising an intron flanking the 5′ splice site of the NSAE exon. In some embodiments, the transcript is selected from the group consisting of transcript_ENST00000305632.11, transcript_ENST00000417008.5, transcript_ENST00000424598.5, transcript_ENST00000426966.5, transcript_ENST00000432538.5, transcript_ENST00000433464.5, transcript_ENST00000435792.5, transcript_ENST00000437521.5, transcript_ENST00000450285.5, transcript_ENST00000452125.5, transcript_ENST00000452475.5, transcript_ENST00000458466.1, transcript_ENST00000459913.5, transcript_ENST00000465279.5, transcript_ENST00000468669.5, transcript_ENST00000469518.1, transcript_ENST00000476136.5, transcript_ENST00000479892.5, transcript_ENST00000488915.1, transcript_ENST00000495885.1, transcript_ENST00000496056.5, and transcript_ENST00000610724.4.

[0578] In some embodiments, the TBL2 pre-mRNA transcript is encoded by a genetic sequence with at least about 80%, 85%, 90%, 95%, 96%, 97%, 98%, 99% or 100% sequence identity to the Ensembl reference number ENSG00000106638.17 or a complement thereof. In some embodiments, the TBL2 pre-mRNA transcript comprises a sequence with at least about 80%, 85%, 90%, 95%, 96%, 97%, 98%, 99% or 100% sequence identity to a TBL2 pre-mRNA transcript or a complement thereof described herein.

[0579] In some embodiments, the targeted portion of the TBL2 pre-mRNA comprises a sequence with at least 80%, 85%, 90%, 95%, 97%, or 100% sequence identity to a region comprising at least 8 contiguous nucleic acids of a sequence of premrna_ENST00000305632.11, premrna_ENST00000417008.5, premrna_ENST00000424598.5, premrna_ENST00000426966.5, premrna_ENST00000432538.5, premrna_ENST00000433464.5, premrna_ENST00000435792.5, premrna_ENST00000437521.5, premrna_ENST00000450285.5, premrna_ENST00000452125.5, premrna_ENST00000452475.5, premrna_ENST00000458466.1, premrna_ENST00000459913.5, premrna_ENST00000465279.5, premrna_ENST00000468669.5, premrna_ENST00000469518.1, premrna_ENST00000476136.5, premrna_ENST00000479892.5, premrna_ENST00000488915.1, premrna_ENST00000495885.1, premrna_ENST00000496056.5, premrna_ENST00000610724.4 or a sequence of Table 3 or complements thereof. In some embodiments, the targeted portion of the TBL2 pre-mRNA comprises a sequence with at least 80%, 85%, 90%, 95%, 97%, or 100% sequence identity to a region comprising at least 8 contiguous nucleic acids of a sequence selected from the group consisting of SEQ ID NO: 992-SEQ ID NO: 995 or complements thereof. In some embodiments, the targeted portion of the TBL2 pre-mRNA comprises a sequence that is complementary to at least 8, 9, 10, 11, 12, 13, 14, 15, 16, 17, 18, 19 or 20 contiguous nucleic acids of a sequence of Table 6A or Table 6B or a complement thereof.

[0580] In some embodiments, the ASOs disclosed herein target a NSAE pre-mRNA transcribed from a TDRD7 genomic sequence. In some embodiments, the ASO targets a NSAE pre-mRNA transcript from a TDRD7 genomic sequence comprising a NSAE exon. In some embodiments, the ASO targets a NSAE pre-mRNA transcript from a TDRD7 genomic sequence comprising an intron flanking the 3′ splice site of the NSAE exon and an intron flanking the 5′ splice site of a NSAE exon. In some embodiments, the ASO targets a NSAE pre-mRNA transcript comprising a sequence selected from the group consisting of premrna_ENST00000355295.5, and premrna_ENST00000492428.1. In some embodiments, the ASO targets a TDRD7 pre-mRNA sequence comprising a NSAE exon. In some embodiments, the ASO targets a TDRD7 pre-mRNA sequence comprising an intron flanking the 3′ splice site of the NSAE exon. In some embodiments, the ASO targets a TDRD7 pre-mRNA sequence comprising an intron flanking the 5′ splice site of the NSAE exon. In some embodiments, the transcript is selected from the group consisting of transcript_ENST00000355295.5, and transcript_ENST00000492428.1.

[0581] In some embodiments, the TDRD7 pre-mRNA transcript is encoded by a genetic sequence with at least about 80%, 85%, 90%, 95%, 96%, 97%, 98%, 99% or 100% sequence identity to the Ensembl reference number ENSG00000196116.8 or a complement thereof. In some embodiments, the TDRD7 pre-mRNA transcript comprises a sequence with at least about 80%, 85%, 90%, 95%, 96%, 97%, 98%, 99% or 100% sequence identity to a TDRD7 pre-mRNA transcript or a complement thereof described herein.

[0582] In some embodiments, the targeted portion of the TDRD7 pre-mRNA comprises a sequence with at least 80%, 85%, 90%, 95%, 97%, or 100% sequence identity to a region comprising at least 8 contiguous nucleic acids of a sequence of premrna_ENST00000355295.5, premrna_ENST00000492428.1 or a sequence of Table 3 or complements thereof. In some embodiments, the targeted portion of the TDRD7 pre-mRNA comprises a sequence with at least 80%, 85%, 90%, 95%, 97%, or 100% sequence identity to a region comprising at least 8 contiguous nucleic acids of a sequence selected from the group consisting of SEQ ID NO: 996-SEQ ID NO: 999 or complements thereof. In some embodiments, the targeted portion of the TDRD7 pre-mRNA comprises a sequence that is complementary to at least 8, 9, 10, 11, 12, 13, 14, 15, 16, 17, 18, 19 or 20 contiguous nucleic acids of a sequence of Table 6A or Table 6B or a complement thereof.

[0583] In some embodiments, the ASOs disclosed herein target a NSAE pre-mRNA transcribed from a TECPR2 genomic sequence. In some embodiments, the ASO targets a NSAE pre-mRNA transcript from a TECPR2 genomic sequence comprising a NSAE exon. In some embodiments, the ASO targets a NSAE pre-mRNA transcript from a TECPR2 genomic sequence comprising an intron flanking the 3′ splice site of the NSAE exon and an intron flanking the 5′ splice site of a NSAE exon. In some embodiments, the ASO targets a NSAE pre-mRNA transcript comprising a sequence selected from the group consisting of premrna_ENST00000359520.12, premrna_ENST00000557786.1, premrna_ENST00000558678.1, premrna_ENST00000559124.1, premrna_ENST00000560060.5, premma_ENST00000561099.1, and premrna_ENST00000561228.1. In some embodiments, the ASO targets a TECPR2 pre-mRNA sequence comprising a NSAE exon. In some embodiments, the ASO targets a TECPR2 pre-mRNA sequence comprising an intron flanking the 3′ splice site of the NSAE exon. In some embodiments, the ASO targets a TECPR2 pre-mRNA sequence comprising an intron flanking the 5′ splice site of the NSAE exon. In some embodiments, the transcript is selected from the group consisting of transcript_ENST00000359520.12, transcript_ENST00000557786.1, transcript_ENST00000558678.1, transcript_ENST00000559124.1, transcript_ENST00000560060.5, transcript_ENST00000561099.1, and transcript_ENST00000561228.1.

[0584] In some embodiments, the TECPR2 pre-mRNA transcript is encoded by a genetic sequence with at least about 80%, 85%, 90%, 95%, 96%, 97%, 98%, 99% or 100% sequence identity to the Ensembl reference number ENSG00000196663.16 or a complement thereof. In some embodiments, the TECPR2 pre-mRNA transcript comprises a sequence with at least about 80%, 85%, 90%, 95%, 96%, 97%, 98%, 99% or 100% sequence identity to a TECPR2 pre-mRNA transcript or a complement thereof described herein.

[0585] In some embodiments, the targeted portion of the TECPR2 pre-mRNA comprises a sequence with at least 80%, 85%, 90%, 95%, 97%, or 100% sequence identity to a region comprising at least 8 contiguous nucleic acids of a sequence of premrna_ENST00000359520.12, premrna_ENST00000557786.1, premrna_ENST00000558678.1, premrna_ENST00000559124.1, premrna_ENST00000560060.5, premrna_ENST00000561099.1, premrna_ENST00000561228.1 or a sequence of Table 3 or complements thereof. In some embodiments, the targeted portion of the TECPR2 pre-mRNA comprises a sequence with at least 80%, 85%, 90%, 95%, 97%, or 100% sequence identity to a region comprising at least 8 contiguous nucleic acids of a sequence selected from the group consisting of SEQ ID NO: 1000-SEQ ID NO: 1003 or complements thereof. In some embodiments, the targeted portion of the TECPR2 pre-mRNA comprises a sequence that is complementary to at least 8, 9, 10, 11, 12, 13, 14, 15, 16, 17, 18, 19 or 20 contiguous nucleic acids of a sequence of Table 6A or Table 6B or a complement thereof.

[0586] In some embodiments, the ASOs disclosed herein target a NSAE pre-mRNA transcribed from a TFB1M genomic sequence. In some embodiments, the ASO targets a NSAE pre-mRNA transcript from a TFB1M genomic sequence comprising a NSAE exon. In some embodiments, the ASO targets a NSAE pre-mRNA transcript from a TFB1M genomic sequence comprising an intron flanking the 3′ splice site of the NSAE exon and an intron flanking the 5′ splice site of a NSAE exon. In some embodiments, the ASO targets a NSAE pre-mRNA transcript comprising a sequence selected from the group consisting of premrna_ENST00000367166.5, premrna_ENST00000466349.1, premrna_ENST00000468889.5, premrna_ENST00000470239.1, premrna_ENST00000475849.1, premrna_ENST00000480390.1, premrna_ENST00000487586.5, premrna_ENST00000489874.5, and premrna_ENST00000495806.1. In some embodiments, the ASO targets a TFB1M pre-mRNA sequence comprising a NSAE exon. In some embodiments, the ASO targets a TFB1M pre-mRNA sequence comprising an intron flanking the 3′ splice site of the NSAE exon. In some embodiments, the ASO targets a TFB1M pre-mRNA sequence comprising an intron flanking the 5′ splice site of the NSAE exon. In some embodiments, the transcript is selected from the group consisting of transcript_ENST00000367166.5, transcript_ENST00000466349.1, transcript_ENST00000468889.5, transcript_ENST00000470239.1, transcript_ENST00000475849.1, transcript_ENST00000480390.1, transcript_ENST00000487586.5, transcript_ENST00000489874.5, and transcript_ENST00000495806.1.

[0587] In some embodiments, the TFB1M pre-mRNA transcript is encoded by a genetic sequence with at least about 80%, 85%, 90%, 95%, 96%, 97%, 98%, 99% or 100% sequence identity to the Ensembl reference number ENSG00000029639.11 or a complement thereof. In some embodiments, the TFB1M pre-mRNA transcript comprises a sequence with at least about 80%, 85%, 90%, 95%, 96%, 97%, 98%, 99% or 100% sequence identity to a TFB1M pre-mRNA transcript or a complement thereof described herein.

[0588] In some embodiments, the targeted portion of the TFB1M pre-mRNA comprises a sequence with at least 80%, 85%, 90%, 95%, 97%, or 100% sequence identity to a region comprising at least 8 contiguous nucleic acids of a sequence of premrna_ENST00000367166.5, premrna_ENST00000466349.1, premrna_ENST00000468889.5, premrna_ENST00000470239.1, premrna_ENST00000475849.1, premrna_ENST00000480390.1, premrna_ENST00000487586.5, premrna_ENST00000489874.5, premrna_ENST00000495806.1 or a sequence of Table 3 or complements thereof. In some embodiments, the targeted portion of the TFB1M pre-mRNA comprises a sequence with at least 80%, 85%, 90%, 95%, 97%, or 100% sequence identity to a region comprising at least 8 contiguous nucleic acids of a sequence selected from the group consisting of SEQ ID NO: 1004-SEQ ID NO: 1007 or complements thereof. In some embodiments, the targeted portion of the TFB1M pre-mRNA comprises a sequence that is complementary to at least 8, 9, 10, 11, 12, 13, 14, 15, 16, 17, 18, 19 or 20 contiguous nucleic acids of a sequence of Table 6A or Table 6B or a complement thereof.

[0589] In some embodiments, the ASOs disclosed herein target a NSAE pre-mRNA transcribed from a TM6SF1 genomic sequence. In some embodiments, the ASO targets a NSAE pre-mRNA transcript from a TM6SF1 genomic sequence comprising a NSAE exon. In some embodiments, the ASO targets a NSAE pre-mRNA transcript from a TM6SF1 genomic sequence comprising an intron flanking the 3′ splice site of the NSAE pre-mRNA transcribed from a TM6SF1 genomic sequence exon and an intron flanking the 5′ splice site of a NSAE exon. In some embodiments, the ASO targets a NSAE pre-mRNA transcript comprising a sequence selected from the group consisting of premrna_ENST00000258909.13, premrna_ENST00000322019.14, premrna_ENST00000379384.9, premrna_ENST00000379390.10, premrna_ENST00000561551.1, premrna_ENST00000564988.5, premrna_ENST00000565774.5, and premrna_ENST00000565982.1. In some embodiments, the ASO targets a TM6SF1 pre-mRNA sequence comprising a NSAE exon. In some embodiments, the ASO targets a TM6SF1 pre-mRNA sequence comprising an intron flanking the 3′ splice site of the NSAE exon. In some embodiments, the ASO targets a TM6SF1 pre-mRNA sequence comprising an intron flanking the 5′ splice site of the NSAE exon. In some embodiments, the transcript is selected from the group consisting of transcript_ENST00000258909.13, transcript_ENST00000322019.14, transcript_ENST00000379384.9, transcript_ENST00000379390.10, transcript_ENST00000561551.1, transcript_ENST00000564988.5, transcript_ENST00000565774.5, and transcript_ENST00000565982.1.

[0590] In some embodiments, the TM6SF1 pre-mRNA transcript is encoded by a genetic sequence with at least about 80%, 85%, 90%, 95%, 96%, 97%, 98%, 99% or 100% sequence identity to the Ensembl reference number ENSG00000136404.16 or a complement thereof. In some embodiments, the TM6SF1 pre-mRNA transcript comprises a sequence with at least about 80%, 85%, 90%, 95%, 96%, 97%, 98%, 99% or 100% sequence identity to a TM6SF1 pre-mRNA transcript or a complement thereof described herein.

[0591] In some embodiments, the targeted portion of the TM6SF1 pre-mRNA comprises a sequence with at least 80%, 85%, 90%, 95%, 97%, or 100% sequence identity to a region comprising at least 8 contiguous nucleic acids of a sequence of premrna_ENST00000258909.13, premrna_ENST00000322019.14, premrna_ENST00000379384.9, premrna_ENST00000379390.10, premrna_ENST00000561551.1, premrna_ENST00000564988.5, premrna_ENST00000565774.5, premrna_ENST00000565982.1 or a sequence of Table 3 or complements thereof. In some embodiments, the targeted portion of the TM6SF1 pre-mRNA comprises a sequence with at least 80%, 85%, 90%, 95%, 97%, or 100% sequence identity to a region comprising at least 8 contiguous nucleic acids of a sequence selected from the group consisting of SEQ ID NO: 1008-SEQ ID NO: 1011 or complements thereof. In some embodiments, the targeted portion of the TM6SF1 pre-mRNA comprises a sequence that is complementary to at least 8, 9, 10, 11, 12, 13, 14, 15, 16, 17, 18, 19 or 20 contiguous nucleic acids of a sequence of Table 6A or Table 6B or a complement thereof.

[0592] In some embodiments, the ASOs disclosed herein target a NSAE pre-mRNA transcribed from a TNK2 genomic sequence. In some embodiments, the ASO targets a NSAE pre-mRNA transcript from a TNK2 genomic sequence comprising a NSAE exon. In some embodiments, the ASO targets a NSAE pre-mRNA transcript from a TNK2 genomic sequence comprising an intron flanking the 3′ splice site of the NSAE exon and an intron flanking the 5′ splice site of a NSAE exon. In some embodiments, the ASO targets a NSAE pre-mRNA transcript comprising a sequence selected from the group consisting of premrna_ENST00000333602.13, premrna_ENST00000381916.7, premrna_ENST00000428187.7, premrna_ENST00000439230.6, premrna_ENST00000671726.1, premrna_ENST00000671734.1, premrna_ENST00000671753.1, premrna_ENST00000671767.1, premrna_ENST00000671831.1, premrna_ENST00000671880.1, premrna_ENST00000672024.1, premrna_ENST00000672098.1, premrna_ENST00000672145.1, premrna_ENST00000672320.1, premrna_ENST00000672542.1, premrna_ENST00000672548.1, premrna_ENST00000672614.1, premrna_ENST00000672623.1, premrna_ENST00000672669.1, premrna_ENST00000672886.1, premrna_ENST00000672887.1, premrna_ENST00000673038.1, premrna_ENST00000673167.1, premrna_ENST00000673236.1, premrna_ENST00000673358.1, premrna_ENST00000673374.1, premrna_ENST00000673420.1, premrna_ENST00000673440.1, premrna_ENST00000673443.1, and premrna_ENST00000673559.1. In some embodiments, the ASO targets a TNK2 pre-mRNA sequence comprising a NSAE exon. In some embodiments, the ASO targets a TNK2 pre-mRNA sequence comprising an intron flanking the 3′ splice site of the NSAE exon. In some embodiments, the ASO targets a TNK2 pre-mRNA sequence comprising an intron flanking the 5′ splice site of the NSAE exon. In some embodiments, the transcript is selected from the group consisting of transcript_ENST00000333602.13, transcript_ENST00000381916.7, transcript_ENST00000428187.7, transcript_ENST00000439230.6, transcript_ENST00000671726.1, transcript_ENST00000671734.1, transcript_ENST00000671753.1, transcript_ENST00000671767.1, transcript_ENST00000671831.1, transcript_ENST00000671880.1, transcript_ENST00000672024.1, transcript_ENST00000672098.1, transcript_ENST00000672145.1, transcript_ENST00000672320.1, transcript_ENST00000672542.1, transcript_ENST00000672548.1, transcript_ENST00000672614.1, transcript_ENST00000672623.1, transcript_ENST00000672669.1, transcript_ENST00000672886.1, transcript_ENST00000672887.1, transcript_ENST00000673038.1, transcript_ENST00000673167.1, transcript_ENST00000673236.1, transcript_ENST00000673358.1, transcript_ENST00000673374.1, transcript_ENST00000673420.1, transcript_ENST00000673440.1, transcript_ENST00000673443.1, and transcript_ENST00000673559.1.

[0593] In some embodiments, the TNK2 pre-mRNA transcript is encoded by a genetic sequence with at least about 80%, 85%, 90%, 95%, 96%, 97%, 98%, 99% or 100% sequence identity to the Ensembl reference number ENSG00000061938.19 or ENSG00000224614.2 or a complement thereof. In some embodiments, the TNK2 pre-mRNA transcript comprises a sequence with at least about 80%, 85%, 90%, 95%, 96%, 97%, 98%, 99% or 100% sequence identity to a TNK2 pre-mRNA transcript or a complement thereof described herein.

[0594] In some embodiments, the targeted portion of the TNK2 pre-mRNA comprises a sequence with at least 80%, 85%, 90%, 95%, 97%, or 100% sequence identity to a region comprising at least 8 contiguous nucleic acids of a sequence of premrna_ENST00000333602.13, premrna_ENST00000381916.7, premrna_ENST00000428187.7, premrna_ENST00000439230.6, premrna_ENST00000671726.1, premrna_ENST00000671734.1, premrna_ENST00000671753.1, premrna_ENST00000671767.1, premrna_ENST00000671831.1, premrna_ENST00000671880.1, premrna_ENST00000672024.1, premrna_ENST00000672098.1, premrna_ENST00000672145.1, premrna_ENST00000672320.1, premrna_ENST00000672542.1, premrna_ENST00000672548.1, premrna_ENST00000672614.1, premrna_ENST00000672623.1, premrna_ENST00000672669.1, premrna_ENST00000672886.1, premrna_ENST00000672887.1, premrna_ENST00000673038.1, premrna_ENST00000673167.1, premrna_ENST00000673236.1, premrna_ENST00000673358.1, premrna_ENST00000673374.1, premrna_ENST00000673420.1, premrna_ENST00000673440.1, premrna_ENST00000673443.1, premrna_ENST00000673559.1 or a sequence of Table 3 or complements thereof. In some embodiments, the targeted portion of the TNK2 pre-mRNA comprises a sequence with at least 80%, 85%, 90%, 95%, 97%, or 100% sequence identity to a region comprising at least 8 contiguous nucleic acids of a sequence selected from the group consisting of SEQ ID NO: 1012-SEQ ID NO: 1015 or complements thereof. In some embodiments, the targeted portion of the TNK2 pre-mRNA comprises a sequence that is complementary to at least 8, 9, 10, 11, 12, 13, 14, 15, 16, 17, 18, 19 or 20 contiguous nucleic acids of a sequence of Table 6A or Table 6B or a complement thereof.

[0595] In some embodiments, the ASOs disclosed herein target a NSAE pre-mRNA transcribed from a TOE1 genomic sequence. In some embodiments, the ASO targets a NSAE pre-mRNA transcript from a TOE1 genomic sequence comprising a NSAE exon. In some embodiments, the ASO targets a NSAE pre-mRNA transcript from a TOE1 genomic sequence comprising an intron flanking the 3′ splice site of the NSAE exon and an intron flanking the 5′ splice site of a NSAE exon. In some embodiments, the ASO targets a NSAE pre-mRNA transcript comprising a sequence selected from the group consisting of premrna_ENST00000372090.6, premrna_ENST00000460057.1, premrna_ENST00000471337.5, premrna_ENST00000477731.5, and premrna_ENST00000495703.5. In some embodiments, the ASO targets a TOE1 pre-mRNA sequence comprising a NSAE exon. In some embodiments, the ASO targets a TOE1 pre-mRNA sequence comprising an intron flanking the 3′ splice site of the NSAE exon. In some embodiments, the ASO targets a TOE1 pre-mRNA sequence comprising an intron flanking the 5′ splice site of the NSAE exon. In some embodiments, the transcript is selected from the group consisting of transcript_ENST00000372090.6, transcript_ENST00000460057.1, transcript_ENST00000471337.5, transcript_ENST00000477731.5, and transcript_ENST00000495703.5.

[0596] In some embodiments, the TOE1 pre-mRNA transcript is encoded by a genetic sequence with at least about 80%, 85%, 90%, 95%, 96%, 97%, 98%, 99% or 100% sequence identity to the Ensembl reference number ENSG00000132773.12 or a complement thereof. In some embodiments, the TOE1 pre-mRNA transcript comprises a sequence with at least about 80%, 85%, 90%, 95%, 96%, 97%, 98%, 99% or 100% sequence identity to a TOE1 pre-mRNA transcript or a complement thereof described herein.

[0597] In some embodiments, the targeted portion of the TOE1 pre-mRNA comprises a sequence with at least 80%, 85%, 90%, 95%, 97%, or 100% sequence identity to a region comprising at least 8 contiguous nucleic acids of a sequence of premrna_ENST00000372090.6, premrna_ENST00000460057.1, premrna_ENST00000471337.5, premrna_ENST00000477731.5, premrna_ENST00000495703.5 or a sequence of Table 3 or complements thereof. In some embodiments, the targeted portion of the TOE1 pre-mRNA comprises a sequence with at least 80%, 85%, 90%, 95%, 97%, or 100% sequence identity to a region comprising at least 8 contiguous nucleic acids of a sequence selected from the group consisting of SEQ ID NO: 1016-SEQ ID NO: 1019 or complements thereof. In some embodiments, the targeted portion of the TOE1 pre-mRNA comprises a sequence that is complementary to at least 8, 9, 10, 11, 12, 13, 14, 15, 16, 17, 18, 19 or 20 contiguous nucleic acids of a sequence of Table 6A or Table 6B or a complement thereof.

[0598] In some embodiments, the ASOs disclosed herein target a NSAE pre-mRNA transcribed from a TOR1B genomic sequence. In some embodiments, the ASO targets a NSAE pre-mRNA transcript from a TOR1B genomic sequence comprising a NSAE exon. In some embodiments, the ASO targets a NSAE pre-mRNA transcript from a TOR1B genomic sequence comprising an intron flanking the 3′ splice site of the NSAE exon and an intron flanking the 5′ splice site of a NSAE exon. In some embodiments, the ASO targets a NSAE pre-mRNA transcript comprising a sequence selected from the group consisting of premrna_ENST00000259339.7, premrna_ENST00000427860.1, premrna_ENST00000486372.1, and premrna_ENST00000488169.1. In some embodiments, the ASO targets a TOR1B pre-mRNA sequence comprising a NSAE exon. In some embodiments, the ASO targets a TOR1B pre-mRNA sequence comprising an intron flanking the 3′ splice site of the NSAE exon. In some embodiments, the ASO targets a TOR1B pre-mRNA sequence comprising an intron flanking the 5′ splice site of the NSAE exon. In some embodiments, the transcript is selected from the group consisting of transcript_ENST00000259339.7, transcript_ENST00000427860.1, transcript_ENST00000486372.1, and transcript_ENST00000488169.1.

[0599] In some embodiments, the TOR1B pre-mRNA transcript is encoded by a genetic sequence with at least about 80%, 85%, 90%, 95%, 96%, 97%, 98%, 99% or 100% sequence identity to the Ensembl reference number ENSG00000136816.16 or a complement thereof. In some embodiments, the TOR1B pre-mRNA transcript comprises a sequence with at least about 80%, 85%, 90%, 95%, 96%, 97%, 98%, 99% or 100% sequence identity to a TOR1B pre-mRNA transcript or a complement thereof described herein.

[0600] In some embodiments, the targeted portion of the TOR1B pre-mRNA comprises a sequence with at least 80%, 85%, 90%, 95%, 97%, or 100% sequence identity to a region comprising at least 8 contiguous nucleic acids of a sequence of premrna_ENST00000259339.7, premrna_ENST00000427860.1, premrna_ENST00000486372.1, premrna_ENST00000488169.1, or a sequence of Table 3 or complements thereof. In some embodiments, the targeted portion of the TOR1B pre-mRNA comprises a sequence with at least 80%, 85%, 90%, 95%, 97%, or 100% sequence identity to a region comprising at least 8 contiguous nucleic acids of a sequence selected from the group consisting of SEQ ID NO: 1020-SEQ ID NO: 1023 or complements thereof. In some embodiments, the targeted portion of the TOR1B pre-mRNA comprises a sequence that is complementary to at least 8, 9, 10, 11, 12, 13, 14, 15, 16, 17, 18, 19 or 20 contiguous nucleic acids of a sequence of Table 6A or Table 6B or a complement thereof.

[0601] In some embodiments, the ASOs disclosed herein target a NSAE pre-mRNA transcribed from a TRAPPC6B genomic sequence. In some embodiments, the ASO targets a NSAE pre-mRNA transcript from a TRAPPC6B genomic sequence comprising a NSAE exon. In some embodiments, the ASO targets a NSAE pre-mRNA transcript from a TRAPPC6B genomic sequence comprising an intron flanking the 3′ splice site of the NSAE exon and an intron flanking the 5′ splice site of a NSAE exon. In some embodiments, the ASO targets a NSAE pre-mRNA transcript comprising a sequence selected from the group consisting of premrna_ENST00000330149.10, premrna_ENST00000347691.9, premrna_ENST00000469361.5, premrna_ENST00000554018.1, premrna_ENST00000555269.5, premrna_ENST00000556765.1, and premrna_ENST00000557764.5. In some embodiments, the ASO targets a TRAPPC6B pre-mRNA sequence comprising a NSAE exon. In some embodiments, the ASO targets a TRAPPC6B pre-mRNA sequence comprising an intron flanking the 3′ splice site of the NSAE exon. In some embodiments, the ASO targets a TRAPPC6B pre-mRNA sequence comprising an intron flanking the 5′ splice site of the NSAE exon. In some embodiments, the transcript is selected from the group consisting of transcript_ENST00000330149.10, transcript_ENST00000347691.9, transcript_ENST00000469361.5, transcript_ENST00000554018.1, transcript_ENST00000555269.5, transcript_ENST00000556765.1, and transcript_ENST00000557764.5.

[0602] In some embodiments, the TRAPPC6B pre-mRNA transcript is encoded by a genetic sequence with at least about 80%, 85%, 90%, 95%, 96%, 97%, 98%, 99% or 100% sequence identity to the Ensembl reference number

[0603] ENSG00000182400.15 or a complement thereof. In some embodiments, the TRAPPC6B pre-mRNA transcript comprises a sequence with at least about 80%, 85%, 90%, 95%, 96%, 97%, 98%, 99% or 100% sequence identity to a TRAPPC6B pre-mRNA transcript or a complement thereof described herein.

[0604] In some embodiments, the targeted portion of the TRAPPC6B pre-mRNA comprises a sequence with at least 80%, 85%, 90%, 95%, 97%, or 100% sequence identity to a region comprising at least 8 contiguous nucleic acids of a sequence of premrna_ENST00000330149.10, premrna_ENST00000347691.9, premrna_ENST00000469361.5, premrna_ENST00000554018.1, premrna_ENST00000555269.5, premrna_ENST00000556765.1, premrna_ENST00000557764.5 or a sequence of Table 3 or complements thereof. In some embodiments, the targeted portion of the TRAPPC6B pre-mRNA comprises a sequence with at least 80%, 85%, 90%, 95%, 97%, or 100% sequence identity to a region comprising at least 8 contiguous nucleic acids of a sequence selected from the group consisting of SEQ ID NO: 1024-SEQ ID NO: 1027 or complements thereof. In some embodiments, the targeted portion of the TRAPPC6B pre-mRNA comprises a sequence that is complementary to at least 8, 9, 10, 11, 12, 13, 14, 15, 16, 17, 18, 19 or 20 contiguous nucleic acids of a sequence of Table 6A or Table 6B or a complement thereof.

[0605] In some embodiments, the ASOs disclosed herein target a NSAE pre-mRNA transcribed from a TRIP4 genomic sequence. In some embodiments, the ASO targets a NSAE pre-mRNA transcript from a TRIP4 genomic sequence comprising a NSAE exon. In some embodiments, the ASO targets a NSAE pre-mRNA transcript from a TRIP4 genomic sequence comprising an intron flanking the 3′ splice site of the NSAE exon and an intron flanking the 5′ splice site of a NSAE exon. In some embodiments, the ASO targets a NSAE pre-mRNA transcript comprising a sequence selected from the group consisting of premrna_ENST00000261884.8, premrna_ENST00000557834.5, premrna_ENST00000558162.1, premrna_ENST00000558442.1, premrna_ENST00000558820.5, premrna_ENST00000559565.5, premrna_ENST00000559777.1, premrna_ENST00000559833.5, premrna_ENST00000560475.1, premrna_ENST00000560567.5, premrna_ENST00000560920.6, and premrna_ENST00000561265.1. In some embodiments, the ASO targets a TRIP4 pre-mRNA sequence comprising a NSAE exon. In some embodiments, the ASO targets a TRIP4 pre-mRNA sequence comprising an intron flanking the 3′ splice site of the NSAE exon. In some embodiments, the ASO targets a TRIP4 pre-mRNA sequence comprising an intron flanking the 5′ splice site of the NSAE exon. In some embodiments, the transcript is selected from the group consisting of transcript_ENST00000261884.8, transcript_ENST00000557834.5, transcript_ENST00000558162.1, transcript_ENST00000558442.1, transcript_ENST00000558820.5, transcript_ENST00000559565.5, transcript_ENST00000559777.1, transcript_ENST00000559833.5, transcript_ENST00000560475.1, transcript_ENST00000560567.5, transcript_ENST00000560920.6, and transcript_ENST00000561265.1.

[0606] In some embodiments, the TRIP4 pre-mRNA transcript is encoded by a genetic sequence with at least about 80%, 85%, 90%, 95%, 96%, 97%, 98%, 99% or 100% sequence identity to the Ensembl reference number ENSG00000103671.10 or a complement thereof. In some embodiments, the TRIP4 pre-mRNA transcript comprises a sequence with at least about 80%, 85%, 90%, 95%, 96%, 97%, 98%, 99% or 100% sequence identity to a TRIP4 pre-mRNA transcript or a complement thereof described herein.

[0607] In some embodiments, the targeted portion of the TRIP4 pre-mRNA comprises a sequence with at least 80%, 85%, 90%, 95%, 97%, or 100% sequence identity to a region comprising at least 8 contiguous nucleic acids of a sequence of premrna_ENST00000261884.8, premrna_ENST00000557834.5, premrna_ENST00000558162.1, premrna_ENST00000558442.1, premrna_ENST00000558820.5, premrna_ENST00000559565.5, premrna_ENST00000559777.1, premrna_ENST00000559833.5, premrna_ENST00000560475.1, premrna_ENST00000560567.5, premrna_ENST00000560920.6, premrna_ENST00000561265.1 or a sequence of Table 3 or complements thereof. In some embodiments, the targeted portion of the TRIP4 pre-mRNA comprises a sequence with at least 80%, 85%, 90%, 95%, 97%, or 100% sequence identity to a region comprising at least 8 contiguous nucleic acids of a sequence selected from the group consisting of SEQ ID NO: 1028-SEQ ID NO: 1031 or complements thereof. In some embodiments, the targeted portion of the TRIP4 pre-mRNA comprises a sequence that is complementary to at least 8, 9, 10, 11, 12, 13, 14, 15, 16, 17, 18, 19 or 20 contiguous nucleic acids of a sequence of Table 6A or Table 6B or a complement thereof.

[0608] In some embodiments, the ASOs disclosed herein target a NSAE pre-mRNA transcribed from a TRMT2A genomic sequence. In some embodiments, the ASO targets a NSAE pre-mRNA transcript from a TRMT2A genomic sequence comprising a NSAE exon. In some embodiments, the ASO targets a NSAE pre-mRNA transcript from a TRMT2A genomic sequence comprising an intron flanking the 3′ splice site of the NSAE exon and an intron flanking the 5′ splice site of a NSAE exon. In some embodiments, the ASO targets a NSAE pre-mRNA transcript comprising a sequence selected from the group consisting of premrna_ENST00000252136.12, premrna_ENST00000403707.7, premrna_ENST00000404751.7, premrna_ENST00000439169.2, premrna_ENST00000444256.1, premrna_ENST00000444845.5, premrna_ENST00000445045.1, premrna_ENST00000459644.1, premrna_ENST00000463710.1, premrna_ENST00000464535.1, premrna_ENST00000468917.1, premrna_ENST00000471040.5, premrna_ENST00000480339.1, premrna_ENST00000480460.1, premrna_ENST00000487378.1, premrna_ENST00000487668.5, premrna_ENST00000488335.1, premrna_ENST00000492988.5, premrna_ENST00000494641.1, and premrna_ENST00000494820.5.

[0609] In some embodiments, the ASO targets a TRMT2A pre-mRNA sequence comprising a NSAE exon. In some embodiments, the ASO targets a TRMT2A pre-mRNA sequence comprising an intron flanking the 3′ splice site of the NSAE exon. In some embodiments, the ASO targets a TRMT2A pre-mRNA sequence comprising an intron flanking the 5′ splice site of the NSAE exon. In some embodiments, the transcript is selected from the group consisting of transcript_ENST00000252136.12, transcript_ENST00000403707.7, transcript_ENST00000404751.7, transcript_ENST00000439169.2, transcript_ENST00000444256.1, transcript_ENST00000444845.5, transcript_ENST00000445045.1, transcript_ENST00000459644.1, transcript_ENST00000463710.1, transcript_ENST00000464535.1, transcript_ENST00000468917.1, transcript_ENST00000471040.5, transcript_ENST00000480339.1, transcript_ENST00000480460.1, transcript_ENST00000487378.1, transcript_ENST00000487668.5, transcript_ENST00000488335.1, transcript_ENST00000492988.5, transcript_ENST00000494641.1, and transcript_ENST00000494820.5.

[0610] In some embodiments, the TRMT2A pre-mRNA transcript is encoded by a genetic sequence with at least about 80%, 85%, 90%, 95%, 96%, 97%, 98%, 99% or 100% sequence identity to the Ensembl reference number ENSG00000099899.15 or a complement thereof. In some embodiments, the TRMT2A pre-mRNA transcript comprises a sequence with at least about 80%, 85%, 90%, 95%, 96%, 97%, 98%, 99% or 100% sequence identity to a TRMT2A pre-mRNA transcript or a complement thereof described herein.

[0611] In some embodiments, the targeted portion of the TRMT2A pre-mRNA comprises a sequence with at least 80%, 85%, 90%, 95%, 97%, or 100% sequence identity to a region comprising at least 8 contiguous nucleic acids of a sequence of premrna_ENST00000252136.12, premrna_ENST00000403707.7, premrna_ENST00000404751.7, premrna_ENST00000439169.2, premrna_ENST00000444256.1, premrna_ENST00000444845.5, premrna_ENST00000445045.1, premrna_ENST00000459644.1, premrna_ENST00000463710.1, premrna_ENST00000464535.1, premrna_ENST00000468917.1, premrna_ENST00000471040.5, premrna_ENST00000480339.1, premrna_ENST00000480460.1, premrna_ENST00000487378.1, premrna_ENST00000487668.5, premrna_ENST00000488335.1, premrna_ENST00000492988.5, premrna_ENST00000494641.1, premrna_ENST00000494820.5, or a sequence of Table 3 or complements thereof. In some embodiments, the targeted portion of the TRMT2A pre-mRNA comprises a sequence with at least 80%, 85%, 90%, 95%, 97%, or 100% sequence identity to a region comprising at least 8 contiguous nucleic acids of a sequence selected from the group consisting of SEQ ID NO: 1032-SEQ ID NO: 1035 or complements thereof. In some embodiments, the targeted portion of the TRMT2A pre-mRNA comprises a sequence that is complementary to at least 8, 9, 10, 11, 12, 13, 14, 15, 16, 17, 18, 19 or 20 contiguous nucleic acids of a sequence of Table 6A or Table 6B or a complement thereof.

[0612] In some embodiments, the ASOs disclosed herein target a NSAE pre-mRNA transcribed from a TRMU genomic sequence. In some embodiments, the ASO targets a NSAE pre-mRNA transcript from a TRMU genomic sequence comprising a NSAE exon. In some embodiments, the ASO targets a NSAE pre-mRNA transcript from a TRMU genomic sequence comprising an intron flanking the 3′ splice site of the NSAE exon and an intron flanking the 5′ splice site of a NSAE exon. In some embodiments, the ASO targets a NSAE pre-mRNA transcript comprising a sequence selected from the group consisting of premrna_ENST00000381019.3, premrna_ENST00000381021.7, premrna_ENST00000441818.5, premrna_ENST00000453630.5, premrna_ENST00000456595.5, premrna_ENST00000457572.5, premrna_ENST00000463785.1, premrna_ENST00000465378.6, premrna_ENST00000470831.1, premrna_ENST00000476901.1, premrna_ENST00000479648.1, premrna_ENST00000485175.5, premrna_ENST00000485559.1, premrna_ENST00000486620.5, premrna_ENST00000491612.1, premrna_ENST00000493556.2, premrna_ENST00000496831.5, premrna_ENST00000642562.1, premrna_ENST00000642923.1, premrna_ENST00000643137.1, premrna_ENST00000644006.1, premrna_ENST00000645026.1, premrna_ENST00000645190.1, and premrna_ENST00000647301.1. In some embodiments, the ASO targets a TRMU pre-mRNA sequence comprising a NSAE exon. In some embodiments, the ASO targets a TRMU pre-mRNA sequence comprising an intron flanking the 3′ splice site of the NSAE exon. In some embodiments, the ASO targets a TRMU pre-mRNA sequence comprising an intron flanking the 5′ splice site of the NSAE exon. In some embodiments, the transcript is selected from the group consisting of transcript_ENST00000381019.3, transcript_ENST00000381021.7, transcript_ENST00000441818.5, transcript_ENST00000453630.5, transcript_ENST00000456595.5, transcript_ENST00000457572.5, transcript_ENST00000463785.1, transcript_ENST00000465378.6, transcript_ENST00000470831.1, transcript_ENST00000476901.1, transcript_ENST00000479648.1, transcript_ENST00000485175.5, transcript_ENST00000485559.1, transcript_ENST00000486620.5, transcript_ENST00000491612.1, transcript_ENST00000493556.2, transcript_ENST00000496831.5, transcript_ENST00000642562.1, transcript_ENST00000642923.1, transcript_ENST00000643137.1, transcript_ENST00000644006.1, transcript_ENST00000645026.1, transcript_ENST00000645190.1, and transcript_ENST00000647301.1.

[0613] In some embodiments, the TRMU pre-mRNA transcript is encoded by a genetic sequence with at least about 80%, 85%, 90%, 95%, 96%, 97%, 98%, 99% or 100% sequence identity to the Ensembl reference number ENSG00000100416.15 or a complement thereof. In some embodiments, the TRMU pre-mRNA transcript comprises a sequence with at least about 80%, 85%, 90%, 95%, 96%, 97%, 98%, 99% or 100% sequence identity to a TRMU pre-mRNA transcript or a complement thereof described herein.

[0614] In some embodiments, the targeted portion of the TRMU pre-mRNA comprises a sequence with at least 80%, 85%, 90%, 95%, 97%, or 100% sequence identity to a region comprising at least 8 contiguous nucleic acids of a sequence of premrna_ENST00000381019.3, premrna_ENST00000381021.7, premrna_ENST00000441818.5, premrna_ENST00000453630.5, premrna_ENST00000456595.5, premrna_ENST00000457572.5, premrna_ENST00000463785.1, premrna_ENST00000465378.6, premrna_ENST00000470831.1, premrna_ENST00000476901.1, premrna_ENST00000479648.1, premrna_ENST00000485175.5, premrna_ENST00000485559.1, premrna_ENST00000486620.5, premrna_ENST00000491612.1, premrna_ENST00000493556.2, premrna_ENST00000496831.5, premrna_ENST00000642562.1, premrna_ENST00000642923.1, premrna_ENST00000643137.1, premrna_ENST00000644006.1, premrna_ENST00000645026.1, premrna_ENST00000645190.1, premrna_ENST00000647301.1 or a sequence of Table 3 or complements thereof. In some embodiments, the targeted portion of the TRMU pre-mRNA comprises a sequence with at least 80%, 85%, 90%, 95%, 97%, or 100% sequence identity to a region comprising at least 8 contiguous nucleic acids of a sequence selected from the group consisting of SEQ ID NO: 1036-SEQ ID NO: 1043 or complements thereof. In some embodiments, the targeted portion of the TRMU pre-mRNA comprises a sequence that is complementary to at least 8, 9, 10, 11, 12, 13, 14, 15, 16, 17, 18, 19 or 20 contiguous nucleic acids of a sequence of Table 6A or Table 6B or a complement thereof.

[0615] In some embodiments, the ASOs disclosed herein target a NSAE pre-mRNA transcribed from a TRPV4 genomic sequence. In some embodiments, the ASO targets a NSAE pre-mRNA transcript from a TRPV4 genomic sequence comprising a NSAE exon. In some embodiments, the ASO targets a NSAE pre-mRNA transcript from a TRPV4 genomic sequence comprising an intron flanking the 3′ splice site of the NSAE exon and an intron flanking the 5′ splice site of a NSAE exon. In some embodiments, the ASO targets a NSAE pre-mRNA transcript comprising a sequence selected from the group consisting of premrna_ENST00000261740.7, premrna_ENST00000418703.6, premrna_ENST00000536570.1, premrna_ENST00000536838.1, premrna_ENST00000537083.5, premrna_ENST00000538125.5, premrna_ENST00000541794.5, and premrna_ENST00000544971.5. In some embodiments, the ASO targets a TRPV4 pre-mRNA sequence comprising a NSAE exon. In some embodiments, the ASO targets a TRPV4 pre-mRNA sequence comprising an intron flanking the 3′ splice site of the NSAE exon. In some embodiments, the ASO targets a TRPV4 pre-mRNA sequence comprising an intron flanking the 5′ splice site of the NSAE exon. In some embodiments, the transcript is selected from the group consisting of transcript_ENST00000261740.7, transcript_ENST00000418703.6, transcript_ENST00000536570.1, transcript_ENST00000536838.1, transcript_ENST00000537083.5, transcript_ENST00000538125.5, transcript_ENST00000541794.5, and transcript_ENST00000544971.5.

[0616] In some embodiments, the TRPV4 pre-mRNA transcript is encoded by a genetic sequence with at least about 80%, 85%, 90%, 95%, 96%, 97%, 98%, 99% or 100% sequence identity to the Ensembl reference number ENSG00000111199.11 or a complement thereof. In some embodiments, the TRPV4 pre-mRNA transcript comprises a sequence with at least about 80%, 85%, 90%, 95%, 96%, 97%, 98%, 99% or 100% sequence identity to a TRPV4 pre-mRNA transcript or a complement thereof described herein.

[0617] In some embodiments, the targeted portion of the TRPV4 pre-mRNA comprises a sequence with at least 80%, 85%, 90%, 95%, 97%, or 100% sequence identity to a region comprising at least 8 contiguous nucleic acids of a sequence of premrna_ENST00000261740.7, premrna_ENST00000418703.6, premrna_ENST00000536570.1, premrna_ENST00000536838.1, premrna_ENST00000537083.5, premrna_ENST00000538125.5, premrna_ENST00000541794.5, premrna_ENST00000544971.5 or a sequence of Table 3 or complements thereof. In some embodiments, the targeted portion of the TRPV4 pre-mRNA comprises a sequence with at least 80%, 85%, 90%, 95%, 97%, or 100% sequence identity to a region comprising at least 8 contiguous nucleic acids of a sequence selected from the group consisting of SEQ ID NO: 1044-SEQ ID NO: 1047 or complements thereof. In some embodiments, the targeted portion of the TRPV4 pre-mRNA comprises a sequence that is complementary to at least 8, 9, 10, 11, 12, 13, 14, 15, 16, 17, 18, 19 or 20 contiguous nucleic acids of a sequence of Table 6A or Table 6B or a complement thereof.

[0618] In some embodiments, the ASOs disclosed herein target a NSAE pre-mRNA transcribed from a TTC19 genomic sequence. In some embodiments, the ASO targets a NSAE pre-mRNA transcript from a TTC19 genomic sequence comprising a NSAE exon. In some embodiments, the ASO targets a NSAE pre-mRNA transcript from a TTC19 genomic sequence comprising an intron flanking the 3′ splice site of the NSAE exon and an intron flanking the 5′ splice site of a NSAE exon. In some embodiments, the ASO targets a NSAE pre-mRNA transcript comprising a sequence selected from the group consisting of premrna_ENST00000261647.10, premrna_ENST00000465567.1, premrna_ENST00000466729.5, premrna_ENST00000470399.1, premrna_ENST00000470649.1, premrna_ENST00000475723.5, premrna_ENST00000481107.1, premrna_ENST00000497842.6, premma_ENST00000578103.1, and premrna_ENST00000583704.1. In some embodiments, the ASO targets a TTC19 pre-mRNA sequence comprising a NSAE exon. In some embodiments, the ASO targets a TTC19 pre-mRNA sequence comprising an intron flanking the 3′ splice site of the NSAE exon. In some embodiments, the ASO targets a TTC19 pre-mRNA sequence comprising an intron flanking the 5′ splice site of the NSAE exon. In some embodiments, the transcript is selected from the group consisting of transcript_ENST00000261647.10, transcript_ENST00000465567.1, transcript_ENST00000466729.5, transcript_ENST00000470399.1, transcript_ENST00000470649.1, transcript_ENST00000475723.5, transcript_ENST00000481107.1, transcript_ENST00000497842.6, transcript_ENST00000578103.1, and transcript_ENST00000583704.1.

[0619] In some embodiments, the TTC19 pre-mRNA transcript is encoded by a genetic sequence with at least about 80%, 85%, 90%, 95%, 96%, 97%, 98%, 99% or 100% sequence identity to the Ensembl reference number ENSG00000011295.16 or a complement thereof. In some embodiments, the TTC19 pre-mRNA transcript comprises a sequence with at least about 80%, 85%, 90%, 95%, 96%, 97%, 98%, 99% or 100% sequence identity to a TTC19 pre-mRNA transcript or a complement thereof described herein.

[0620] In some embodiments, the targeted portion of the TTC19 pre-mRNA comprises a sequence with at least 80%, 85%, 90%, 95%, 97%, or 100% sequence identity to a region comprising at least 8 contiguous nucleic acids of a sequence of premrna_ENST00000261647.10, premrna_ENST00000465567.1, premrna_ENST00000466729.5, premrna_ENST00000470399.1, premrna_ENST00000470649.1, premrna_ENST00000475723.5, premrna_ENST00000481107.1, premrna_ENST00000497842.6, premrna_ENST00000578103.1, premrna_ENST00000583704.1 or a sequence of Table 3 or complements thereof. In some embodiments, the targeted portion of the TTC19 pre-mRNA comprises a sequence with at least 80%, 85%, 90%, 95%, 97%, or 100% sequence identity to a region comprising at least 8 contiguous nucleic acids of a sequence selected from the group consisting of SEQ ID NO: 1048-SEQ ID NO: 1051 or complements thereof. In some embodiments, the targeted portion of the TTC19 pre-mRNA comprises a sequence that is complementary to at least 8, 9, 10, 11, 12, 13, 14, 15, 16, 17, 18, 19 or 20 contiguous nucleic acids of a sequence of Table 6A or Table 6B or a complement thereof.

[0621] In some embodiments, the ASOs disclosed herein target a NSAE pre-mRNA transcribed from a TYMP genomic sequence. In some embodiments, the ASO targets a NSAE pre-mRNA transcript from a TYMP genomic sequence comprising a NSAE exon. In some embodiments, the ASO targets a NSAE pre-mRNA transcript from a TYMP genomic sequence comprising an intron flanking the 3′ splice site of the NSAE exon and an intron flanking the 5′ splice site of a NSAE exon. In some embodiments, the ASO targets a NSAE pre-mRNA transcript comprising a sequence selected from the group consisting of premrna_ENST00000252029.8, premrna_ENST00000395678.7, premrna_ENST00000395680.6, premrna_ENST00000395681.6, premrna_ENST00000425169.1, premrna_ENST00000476284.1, premrna_ENST00000487162.1, premrna_ENST00000487577.5, premrna_ENST00000650719.1, premrna_ENST00000651095.1, premrna_ENST00000651196.1, premrna_ENST00000651401.1, premrna_ENST00000651490.1, premrna_ENST00000651906.1, premrna_ENST00000652237.1, premrna_ENST00000652352.1, and premrna_ENST00000652401.1. In some embodiments, the ASO targets a TYMP pre-mRNA sequence comprising a NSAE exon. In some embodiments, the ASO targets a TYMP pre-mRNA sequence comprising an intron flanking the 3′ splice site of the NSAE exon. In some embodiments, the ASO targets a TYMP pre-mRNA sequence comprising an intron flanking the 5′ splice site of the NSAE exon. In some embodiments, the transcript is selected from the group consisting of transcript_ENST00000252029.8, transcript_ENST00000395678.7, transcript_ENST00000395680.6, transcript_ENST00000395681.6, transcript_ENST00000425169.1, transcript_ENST00000476284.1, transcript_ENST00000487162.1, transcript_ENST00000487577.5, transcript_ENST00000650719.1, transcript_ENST00000651095.1, transcript_ENST00000651196.1, transcript_ENST00000651401.1, transcript_ENST00000651490.1, transcript_ENST00000651906.1, transcript_ENST00000652237.1, transcript_ENST00000652352.1, and transcript_ENST00000652401.1.

[0622] In some embodiments, the TYMP pre-mRNA transcript is encoded by a genetic sequence with at least about 80%, 85%, 90%, 95%, 96%, 97%, 98%, 99% or 100% sequence identity to the Ensembl reference number ENSG00000025708.14 or a complement thereof. In some embodiments, the TYMP pre-mRNA transcript comprises a sequence with at least about 80%, 85%, 90%, 95%, 96%, 97%, 98%, 99% or 100% sequence identity to a TYMP pre-mRNA transcript or a complement thereof described herein.

[0623] In some embodiments, the targeted portion of the TYMP pre-mRNA comprises a sequence with at least 80%, 85%, 90%, 95%, 97%, or 100% sequence identity to a region comprising at least 8 contiguous nucleic acids of a sequence of premrna_ENST00000252029.8, premrna_ENST00000395678.7, premrna_ENST00000395680.6, premrna_ENST00000395681.6, premrna_ENST00000425169.1, premrna_ENST00000476284.1, premrna_ENST00000487162.1, premrna_ENST00000487577.5, premrna_ENST00000650719.1, premrna_ENST00000651095.1, premrna_ENST00000651196.1, premrna_ENST00000651401.1, premrna_ENST00000651490.1, premrna_ENST00000651906.1, premrna_ENST00000652237.1, premrna_ENST00000652352.1, premrna_ENST00000652401.1 or a sequence of Table 3 or complements thereof. In some embodiments, the targeted portion of the TYMP pre-mRNA comprises a sequence with at least 80%, 85%, 90%, 95%, 97%, or 100% sequence identity to a region comprising at least 8 contiguous nucleic acids of a sequence selected from the group consisting of SEQ ID NO: 1052-SEQ ID NO: 1057 or complements thereof. In some embodiments, the targeted portion of the TYMP pre-mRNA comprises a sequence that is complementary to at least 8, 9, 10, 11, 12, 13, 14, 15, 16, 17, 18, 19 or 20 contiguous nucleic acids of a sequence of Table 6A or Table 6B or a complement thereof.

[0624] In some embodiments, the ASOs disclosed herein target a NSAE pre-mRNA transcribed from a UMPS genomic sequence. In some embodiments, the ASO targets a NSAE pre-mRNA transcript from a UMPS genomic sequence comprising a NSAE exon. In some embodiments, the ASO targets a NSAE pre-mRNA transcript from a UMPS genomic sequence comprising an intron flanking the 3′ splice site of the NSAE exon and an intron flanking the 5′ splice site of a NSAE exon. In some embodiments, the ASO targets a NSAE pre-mRNA transcript comprising a sequence selected from the group consisting of premrna_ENST00000232607.7, premrna_ENST00000460034.5, premrna_ENST00000462091.5, premrna_ENST00000467167.5, premrna_ENST00000474588.5, premrna_ENST00000479719.5, premrna_ENST00000487622.5, premrna_ENST00000495751.1, premrna_ENST00000497791.5, premrna_ENST00000498715.1, and premrna_ENST00000628619.1. In some embodiments, the ASO targets a UMPS pre-mRNA sequence comprising a NSAE exon. In some embodiments, the ASO targets a UMPS pre-mRNA sequence comprising an intron flanking the 3′ splice site of the NSAE exon. In some embodiments, the ASO targets a UMPS pre-mRNA sequence comprising an intron flanking the 5′ splice site of the NSAE exon. In some embodiments, the transcript is selected from the group consisting of transcript_ENST00000232607.7, transcript_ENST00000460034.5, transcript_ENST00000462091.5, transcript_ENST00000467167.5, transcript_ENST00000474588.5, transcript_ENST00000479719.5, transcript_ENST00000487622.5, transcript_ENST00000495751.1, transcript_ENST00000497791.5, transcript_ENST00000498715.1, and transcript_ENST00000628619.1.

[0625] In some embodiments, the UMPS pre-mRNA transcript is encoded by a genetic sequence with at least about 80%, 85%, 90%, 95%, 96%, 97%, 98%, 99% or 100% sequence identity to the Ensembl reference number ENSG00000114491.14 or a complement thereof. In some embodiments, the UMPS pre-mRNA transcript comprises a sequence with at least about 80%, 85%, 90%, 95%, 96%, 97%, 98%, 99% or 100% sequence identity to a UMPS pre-mRNA transcript or a complement thereof described herein.

[0626] In some embodiments, the targeted portion of the UMPS pre-mRNA comprises a sequence with at least 80%, 85%, 90%, 95%, 97%, or 100% sequence identity to a region comprising at least 8 contiguous nucleic acids of a sequence of premrna_ENST00000232607.7, premrna_ENST00000460034.5, premrna_ENST00000462091.5, premrna_ENST00000467167.5, premrna_ENST00000474588.5, premrna_ENST00000479719.5, premrna_ENST00000487622.5, premrna_ENST00000495751.1, premrna_ENST00000497791.5, premrna_ENST00000498715.1, premrna_ENST00000628619.1 or a sequence of Table 3 or complements thereof. In some embodiments, the targeted portion of the UMPS pre-mRNA comprises a sequence with at least 80%, 85%, 90%, 95%, 97%, or 100% sequence identity to a region comprising at least 8 contiguous nucleic acids of a sequence selected from the group consisting of SEQ ID NO: 1058-SEQ ID NO: 1061 or complements thereof. In some embodiments, the targeted portion of the UMPS pre-mRNA comprises a sequence that is complementary to at least 8, 9, 10, 11, 12, 13, 14, 15, 16, 17, 18, 19 or 20 contiguous nucleic acids of a sequence of Table 6A or Table 6B or a complement thereof.

[0627] In some embodiments, the ASOs disclosed herein target a NSAE pre-mRNA transcribed from a UROD genomic sequence. In some embodiments, the ASO targets a NSAE pre-mRNA transcript from a UROD genomic sequence comprising a NSAE exon. In some embodiments, the ASO targets a NSAE pre-mRNA transcript from a UROD genomic sequence comprising an intron flanking the 3′ splice site of the NSAE exon and an intron flanking the 5′ splice site of a NSAE exon. In some embodiments, the ASO targets a NSAE pre-mRNA transcript comprising a sequence selected from the group consisting of premrna_ENST00000246337.9, premrna_ENST00000428106.1, premrna_ENST00000434478.6, premrna_ENST00000460334.5, premrna_ENST00000460906.5, premrna_ENST00000461035.5, premrna_ENST00000462688.5, premrna_ENST00000463092.5, premrna_ENST00000465678.1, premrna_ENST00000466193.1, premrna_ENST00000469548.5, premrna_ENST00000472254.1, premrna_ENST00000473012.1, premrna_ENST00000478467.5, premrna_ENST00000486699.5, premrna_ENST00000490385.5, premrna_ENST00000491300.5, premrna_ENST00000491773.6, premrna_ENST00000494399.5, premrna_ENST00000496439.1, premrna_ENST00000636293.1, premrna_ENST00000636836.1, premrna_ENST00000650713.1, premrna_ENST00000651476.1, premrna_ENST00000652165.1, premrna_ENST00000652287.1, and premrna_ENST00000652514.1. In some embodiments, the ASO targets a UROD pre-mRNA sequence comprising a NSAE exon. In some embodiments, the ASO targets a UROD pre-mRNA sequence comprising an intron flanking the 3′ splice site of the NSAE exon. In some embodiments, the ASO targets a UROD pre-mRNA sequence comprising an intron flanking the 5′ splice site of the NSAE exon. In some embodiments, the transcript is selected from the group consisting of transcript_ENST00000246337.9, transcript_ENST00000428106.1, transcript_ENST00000434478.6, transcript_ENST00000460334.5, transcript_ENST00000460906.5, transcript_ENST00000461035.5, transcript_ENST00000462688.5, transcript_ENST00000463092.5, transcript_ENST00000465678.1, transcript_ENST00000466193.1, transcript_ENST00000469548.5, transcript_ENST00000472254.1, transcript_ENST00000473012.1, transcript_ENST00000478467.5, transcript_ENST00000486699.5, transcript_ENST00000490385.5, transcript_ENST00000491300.5, transcript_ENST00000491773.6, transcript_ENST00000494399.5, transcript_ENST00000496439.1, transcript_ENST00000636293.1, transcript_ENST00000636836.1, transcript_ENST00000650713.1, transcript_ENST00000651476.1, transcript_ENST00000652165.1, transcript_ENST00000652287.1, and transcript_ENST00000652514.1.

[0628] In some embodiments, the UROD pre-mRNA transcript is encoded by a genetic sequence with at least about 80%, 85%, 90%, 95%, 96%, 97%, 98%, 99% or 100% sequence identity to the Ensembl reference number ENSG00000126088.14 or a complement thereof. In some embodiments, the UROD pre-mRNA transcript comprises a sequence with at least about 80%, 85%, 90%, 95%, 96%, 97%, 98%, 99% or 100% sequence identity to a UROD pre-mRNA transcript or a complement thereof described herein.

[0629] In some embodiments, the targeted portion of the UROD pre-mRNA comprises a sequence with at least 80%, 85%, 90%, 95%, 97%, or 100% sequence identity to a region comprising at least 8 contiguous nucleic acids of a sequence of premrna_ENST00000246337.9, premrna_ENST00000428106.1, premrna_ENST00000434478.6, premrna_ENST00000460334.5, premrna_ENST00000460906.5, premrna_ENST00000461035.5, premrna_ENST00000462688.5, premrna_ENST00000463092.5, premrna_ENST00000465678.1, premrna_ENST00000466193.1, premrna_ENST00000469548.5, premrna_ENST00000472254.1, premrna_ENST00000473012.1, premrna_ENST00000478467.5, premrna_ENST00000486699.5, premrna_ENST00000490385.5, premrna_ENST00000491300.5, premrna_ENST00000491773.6, premrna_ENST00000494399.5, premrna_ENST00000496439.1, premrna_ENST00000636293.1, premrna_ENST00000636836.1, premrna_ENST00000650713.1, premrna_ENST00000651476.1, premrna_ENST00000652165.1, premrna_ENST00000652287.1, premrna_ENST00000652514.1 or a sequence of Table 3 or complements thereof. In some embodiments, the targeted portion of the UROD pre-mRNA comprises a sequence with at least 80%, 85%, 90%, 95%, 97%, or 100% sequence identity to a region comprising at least 8 contiguous nucleic acids of a sequence selected from the group consisting of SEQ ID NO: 1062-SEQ ID NO: 1065 or complements thereof. In some embodiments, the targeted portion of the UROD pre-mRNA comprises a sequence that is complementary to at least 8, 9, 10, 11, 12, 13, 14, 15, 16, 17, 18, 19 or 20 contiguous nucleic acids of a sequence of Table 6A or Table 6B or a complement thereof.

[0630] In some embodiments, the ASOs disclosed herein target a NSAE pre-mRNA transcribed from a WDR11 genomic sequence. In some embodiments, the ASO targets a NSAE pre-mRNA transcript from a WDR11 genomic sequence comprising a NSAE exon. In some embodiments, the ASO targets a NSAE pre-mRNA transcript from a WDR11 genomic sequence comprising an intron flanking the 3′ splice site of the NSAE exon and an intron flanking the 5′ splice site of a NSAE exon. In some embodiments, the ASO targets a NSAE pre-mRNA transcript comprising a sequence selected from the group consisting of premrna_ENST00000263461.11, premrna_ENST00000462529.2, premrna_ENST00000470052.5, premrna_ENST00000478567.5, premrna_ENST00000497136.6, premrna_ENST00000603658.1, premrna_ENST00000604220.5, premrna_ENST00000604509.5, premrna_ENST00000604585.5, premrna_ENST00000604714.1, premrna_ENST00000605069.5, premrna_ENST00000605178.5, premrna_ENST00000605202.5, premrna_ENST00000605320.1, premrna_ENST00000605376.5, premrna_ENST00000605543.5, and premrna_ENST00000605659.1. In some embodiments, the ASO targets a WDR11 pre-mRNA sequence comprising a NSAE exon. In some embodiments, the ASO targets a WDR11 pre-mRNA sequence comprising an intron flanking the 3′ splice site of the NSAE exon. In some embodiments, the ASO targets a WDR11 pre-mRNA sequence comprising an intron flanking the 5′ splice site of the NSAE exon. In some embodiments, the transcript is selected from the group consisting of transcript_ENST00000263461.11, transcript_ENST00000462529.2, transcript_ENST00000470052.5, transcript_ENST00000478567.5, transcript_ENST00000497136.6, transcript_ENST00000603658.1, transcript_ENST00000604220.5, transcript_ENST00000604509.5, transcript_ENST00000604585.5, transcript_ENST00000604714.1, transcript_ENST00000605069.5, transcript_ENST00000605178.5, transcript_ENST00000605202.5, transcript_ENST00000605320.1, transcript_ENST00000605376.5, transcript_ENST00000605543.5, and transcript_ENST00000605659.1.

[0631] In some embodiments, the WDR11 pre-mRNA transcript is encoded by a genetic sequence with at least about 80%, 85%, 90%, 95%, 96%, 97%, 98%, 99% or 100% sequence identity to the Ensembl reference number ENSG00000120008.16 or a complement thereof. In some embodiments, the WDR11 pre-mRNA transcript comprises a sequence with at least about 80%, 85%, 90%, 95%, 96%, 97%, 98%, 99% or 100% sequence identity to a WDR11 pre-mRNA transcript or a complement thereof described herein.

[0632] In some embodiments, the targeted portion of the WDR11 pre-mRNA comprises a sequence with at least 80%, 85%, 90%, 95%, 97%, or 100% sequence identity to a region comprising at least 8 contiguous nucleic acids of a sequence of premrna_ENST00000263461.11, premrna_ENST00000462529.2, premrna_ENST00000470052.5, premrna_ENST00000478567.5, premrna_ENST00000497136.6, premrna_ENST00000603658.1, premrna_ENST00000604220.5, premrna_ENST00000604509.5, premrna_ENST00000604585.5, premrna_ENST00000604714.1, premrna_ENST00000605069.5, premrna_ENST00000605178.5, premrna_ENST00000605202.5, premrna_ENST00000605320.1, premrna_ENST00000605376.5, premrna_ENST00000605543.5, premrna_ENST00000605659.1 or a sequence of Table 3 or complements thereof. In some embodiments, the targeted portion of the WDR11 pre-mRNA comprises a sequence with at least 80%, 85%, 90%, 95%, 97%, or 100% sequence identity to a region comprising at least 8 contiguous nucleic acids of a sequence selected from the group consisting of SEQ ID NO: 1066-SEQ ID NO: 1069 or complements thereof. In some embodiments, the targeted portion of the WDR11 pre-mRNA comprises a sequence that is complementary to at least 8, 9, 10, 11, 12, 13, 14, 15, 16, 17, 18, 19 or 20 contiguous nucleic acids of a sequence of Table 6A or Table 6B or a complement thereof.

[0633] In some embodiments, the ASOs disclosed herein target a NSAE pre-mRNA transcribed from a WDR62 genomic sequence. In some embodiments, the ASO targets a NSAE pre-mRNA transcript from a WDR62 genomic sequence comprising a NSAE exon. In some embodiments, the ASO targets a NSAE pre-mRNA transcript from a WDR62 genomic sequence comprising an intron flanking the 3′ splice site of the NSAE exon and an intron flanking the 5′ splice site of a NSAE exon. In some embodiments, the ASO targets a NSAE pre-mRNA transcript comprising a sequence selected from the group consisting of premrna_ENST00000270301.11, premrna_ENST00000378860.8, premrna_ENST00000401500.7, premrna_ENST00000427823.2, premrna_ENST00000587391.5, premrna_ENST00000589953.1, premrna_ENST00000608676.1, and premrna_ENST00000644764.1.

[0634] In some embodiments, the ASO targets a WDR62 pre-mRNA sequence comprising a NSAE exon. In some embodiments, the ASO targets a WDR62 pre-mRNA sequence comprising an intron flanking the 3′ splice site of the NSAE exon. In some embodiments, the ASO targets a WDR62 pre-mRNA sequence comprising an intron flanking the 5′ splice site of the NSAE exon. In some embodiments, the transcript is selected from the group consisting of transcript_ENST00000270301.11, transcript_ENST00000378860.8, transcript_ENST00000401500.7, transcript_ENST00000427823.2, transcript_ENST00000587391.5, transcript_ENST00000589953.1, transcript_ENST00000608676.1, and transcript_ENST00000644764.1.

[0635] In some embodiments, the WDR62 pre-mRNA transcript is encoded by a genetic sequence with at least about 80%, 85%, 90%, 95%, 96%, 97%, 98%, 99% or 100% sequence identity to the Ensembl reference number ENSG00000075702.18 or a complement thereof. In some embodiments, the WDR62 pre-mRNA transcript comprises a sequence with at least about 80%, 85%, 90%, 95%, 96%, 97%, 98%, 99% or 100% sequence identity to a WDR62 pre-mRNA transcript or a complement thereof described herein.

[0636] In some embodiments, the targeted portion of the WDR62 pre-mRNA comprises a sequence with at least 80%, 85%, 90%, 95%, 97%, or 100% sequence identity to a region comprising at least 8 contiguous nucleic acids of a sequence of premrna_ENST00000270301.11, premrna_ENST00000378860.8, premrna_ENST00000401500.7, premrna_ENST00000427823.2, premrna_ENST00000587391.5, premrna_ENST00000589953.1, premrna_ENST00000608676.1, premrna_ENST00000644764.1, or a sequence of Table 3 or complements thereof. In some embodiments, the targeted portion of the WDR62 pre-mRNA comprises a sequence with at least 80%, 85%, 90%, 95%, 97%, or 100% sequence identity to a region comprising at least 8 contiguous nucleic acids of a sequence selected from the group consisting of SEQ ID NO: 1070-SEQ ID NO: 1073 or complements thereof. In some embodiments, the targeted portion of the WDR62 pre-mRNA comprises a sequence that is complementary to at least 8, 9, 10, 11, 12, 13, 14, 15, 16, 17, 18, 19 or 20 contiguous nucleic acids of a sequence of Table 6A or Table 6B or a complement thereof.

[0637] In some embodiments, the ASOs disclosed herein target a NSAE pre-mRNA transcribed from a WIPI1 genomic sequence. In some embodiments, the ASO targets a NSAE pre-mRNA transcript from a WIPI1 genomic sequence comprising a NSAE exon. In some embodiments, the ASO targets a NSAE pre-mRNA transcript from a WIPI1 genomic sequence comprising an intron flanking the 3′ splice site of the NSAE exon and an intron flanking the 5′ splice site of a NSAE exon. In some embodiments, the ASO targets a NSAE pre-mRNA transcript comprising a sequence selected from the group consisting of premrna_ENST00000262139.10, premrna_ENST00000546360.5, premrna_ENST00000585393.1, premrna_ENST00000586815.1, premrna_ENST00000587731.1, premrna_ENST00000589316.5, premrna_ENST00000589459.5, premrna_ENST00000590402.1, premrna_ENST00000591494.5, premrna_ENST00000591744.1, and premrna_ENST00000592645.5. In some embodiments, the ASO targets a WIPI1 pre-mRNA sequence comprising a NSAE exon. In some embodiments, the ASO targets a WIPI1 pre-mRNA sequence comprising an intron flanking the 3′ splice site of the NSAE exon. In some embodiments, the ASO targets a WIPI1 pre-mRNA sequence comprising an intron flanking the 5′ splice site of the NSAE exon. In some embodiments, the transcript is selected from the group consisting of transcript_ENST00000262139.10, transcript_ENST00000546360.5, transcript_ENST00000585393.1, transcript_ENST00000586815.1, transcript_ENST00000587731.1, transcript_ENST00000589316.5, transcript_ENST00000589459.5, transcript_ENST00000590402.1, transcript_ENST00000591494.5, transcript_ENST00000591744.1, and transcript_ENST00000592645.5.

[0638] In some embodiments, the WIPI1 pre-mRNA transcript is encoded by a genetic sequence with at least about 80%, 85%, 90%, 95%, 96%, 97%, 98%, 99% or 100% sequence identity to the Ensembl reference number ENSG00000070540.13 or a complement thereof. In some embodiments, the WIPI1 pre-mRNA transcript comprises a sequence with at least about 80%, 85%, 90%, 95%, 96%, 97%, 98%, 99% or 100% sequence identity to a WIPI1 pre-mRNA transcript or a complement thereof described herein.

[0639] In some embodiments, the targeted portion of the WIPI1 pre-mRNA comprises a sequence with at least 80%, 85%, 90%, 95%, 97%, or 100% sequence identity to a region comprising at least 8 contiguous nucleic acids of a sequence of premrna_ENST00000262139.10, premrna_ENST00000546360.5, premrna_ENST00000585393.1, premrna_ENST00000586815.1, premrna_ENST00000587731.1, premrna_ENST00000589316.5, premrna_ENST00000589459.5, premrna_ENST00000590402.1, premrna_ENST00000591494.5, premrna_ENST00000591744.1, premrna_ENST00000592645.5 or a sequence of Table 3 or complements thereof. In some embodiments, the targeted portion of the WIPI1 pre-mRNA comprises a sequence with at least 80%, 85%, 90%, 95%, 97%, or 100% sequence identity to a region comprising at least 8 contiguous nucleic acids of a sequence selected from the group consisting of SEQ ID NO: 1074-SEQ ID NO: 1077 or complements thereof. In some embodiments, the targeted portion of the WIPI1 pre-mRNA comprises a sequence that is complementary to at least 8, 9, 10, 11, 12, 13, 14, 15, 16, 17, 18, 19 or 20 contiguous nucleic acids of a sequence of Table 6A or Table 6B or a complement thereof.

[0640] In some embodiments, the ASOs disclosed herein target a NSAE pre-mRNA transcribed from a WRAP53 genomic sequence. In some embodiments, the ASO targets a NSAE pre-mRNA transcript from a WRAP53 genomic sequence comprising a NSAE exon. In some embodiments, the ASO targets a NSAE pre-mRNA transcript from a WRAP53 genomic sequence comprising an intron flanking the 3′ splice site of the NSAE exon and an intron flanking the 5′ splice site of a NSAE exon. In some embodiments, the ASO targets a NSAE pre-mRNA transcript comprising a sequence selected from the group consisting of premrna_ENST00000316024.9, premrna_ENST00000396463.6, premrna_ENST00000431639.6, premrna_ENST00000457584.6, premrna_ENST00000463804.6, premrna_ENST00000467699.5, premrna_ENST00000471973.6, premrna_ENST00000498114.1, premrna_ENST00000498311.5, and premrna_ENST00000534050.5. In some embodiments, the ASO targets a WRAP53 pre-mRNA sequence comprising a NSAE exon. In some embodiments, the ASO targets a WRAP53 pre-mRNA sequence comprising an intron flanking the 3′ splice site of the NSAE exon. In some embodiments, the ASO targets a WRAP53 pre-mRNA sequence comprising an intron flanking the 5′ splice site of the NSAE exon. In some embodiments, the transcript is selected from the group consisting of transcript_ENST00000316024.9, transcript_ENST00000396463.6, transcript_ENST00000431639.6, transcript_ENST00000457584.6, transcript_ENST00000463804.6, transcript_ENST00000467699.5, transcript_ENST00000471973.6, transcript_ENST00000498114.1, transcript_ENST00000498311.5, and transcript_ENST00000534050.5.

[0641] In some embodiments, the WRAP53 pre-mRNA transcript is encoded by a genetic sequence with at least about 80%, 85%, 90%, 95%, 96%, 97%, 98%, 99% or 100% sequence identity to the Ensembl reference number ENSG00000141499.17 or a complement thereof. In some embodiments, the WRAP53 pre-mRNA transcript comprises a sequence with at least about 80%, 85%, 90%, 95%, 96%, 97%, 98%, 99% or 100% sequence identity to a WRAP53 pre-mRNA transcript or a complement thereof described herein.

[0642] In some embodiments, the targeted portion of the WRAP53 pre-mRNA comprises a sequence with at least 80%, 85%, 90%, 95%, 97%, or 100% sequence identity to a region comprising at least 8 contiguous nucleic acids of a sequence of premrna_ENST00000316024.9, premrna_ENST00000396463.6, premrna_ENST00000431639.6, premrna_ENST00000457584.6, premrna_ENST00000463804.6, premrna_ENST00000467699.5, premrna_ENST00000471973.6, premrna_ENST00000498114.1, premrna_ENST00000498311.5, premrna_ENST00000534050.5 or a sequence of Table 3 or complements thereof. In some embodiments, the targeted portion of the WRAP53 pre-mRNA comprises a sequence with at least 80%, 85%, 90%, 95%, 97%, or 100% sequence identity to a region comprising at least 8 contiguous nucleic acids of a sequence selected from the group consisting of SEQ ID NO: 1078-SEQ ID NO: 1081 or complements thereof. In some embodiments, the targeted portion of the WRAP53 pre-mRNA comprises a sequence that is complementary to at least 8, 9, 10, 11, 12, 13, 14, 15, 16, 17, 18, 19 or 20 contiguous nucleic acids of a sequence of Table 6A or Table 6B or a complement thereof.

[0643] In some embodiments, the ASOs disclosed herein target a NSAE pre-mRNA transcribed from a XPO1 genomic sequence. In some embodiments, the ASO targets a NSAE pre-mRNA transcript from a XPO1 genomic sequence comprising a NSAE exon. In some embodiments, the ASO targets a NSAE pre-mRNA transcript from a XPO1 genomic sequence comprising an intron flanking the 3′ splice site of the NSAE exon and an intron flanking the 5′ splice site of a NSAE exon. In some embodiments, the ASO targets a NSAE pre-mRNA transcript comprising a sequence selected from the group consisting of premrna_ENST00000401558.7, premrna_ENST00000404992.6, premrna_ENST00000406957.5, premrna_ENST00000420673.5, premrna_ENST00000422552.5, premrna_ENST00000428210.5, premrna_ENST00000436018.1, premrna_ENST00000437159.5, premrna_ENST00000443240.5, premrna_ENST00000449444.5, premrna_ENST00000451765.5, premrna_ENST00000457483.5, premrna_ENST00000460037.1, premrna_ENST00000461407.5, premrna_ENST00000468259.1, premrna_ENST00000469337.1, premrna_ENST00000475744.1, premrna_ENST00000476585.5, premrna_ENST00000481073.5, premrna_ENST00000481214.1, premrna_ENST00000489954.1, premrna_ENST00000492182.5, premrna_ENST00000494468.1, and premrna_ENST00000495003.1. In some embodiments, the ASO targets a XPO1 pre-mRNA sequence comprising a NSAE exon. In some embodiments, the ASO targets a XPO1 pre-mRNA sequence comprising an intron flanking the 3′ splice site of the NSAE exon. In some embodiments, the ASO targets a XPO1 pre-mRNA sequence comprising an intron flanking the 5′ splice site of the NSAE exon. In some embodiments, the transcript is selected from the group consisting of transcript_ENST00000401558.7, transcript_ENST00000404992.6, transcript_ENST00000406957.5, transcript_ENST00000420673.5, transcript_ENST00000422552.5, transcript_ENST00000428210.5, transcript_ENST00000436018.1, transcript_ENST00000437159.5, transcript_ENST00000443240.5, transcript_ENST00000449444.5, transcript_ENST00000451765.5, transcript_ENST00000457483.5, transcript_ENST00000460037.1, transcript_ENST00000461407.5, transcript_ENST00000468259.1, transcript_ENST00000469337.1, transcript_ENST00000475744.1, transcript_ENST00000476585.5, transcript_ENST00000481073.5, transcript_ENST00000481214.1, transcript_ENST00000489954.1, transcript_ENST00000492182.5, transcript_ENST00000494468.1, and transcript_ENST00000495003.1.

[0644] In some embodiments, the XPO1 pre-mRNA transcript is encoded by a genetic sequence with at least about 80%, 85%, 90%, 95%, 96%, 97%, 98%, 99% or 100% sequence identity to the Ensembl reference number ENSG00000082898.17 or a complement thereof. In some embodiments, the XPO1 pre-mRNA transcript comprises a sequence with at least about 80%, 85%, 90%, 95%, 96%, 97%, 98%, 99% or 100% sequence identity to a XPO1 pre-mRNA transcript or a complement thereof described herein.

[0645] In some embodiments, the targeted portion of the XPO1 pre-mRNA comprises a sequence with at least 80%, 85%, 90%, 95%, 97%, or 100% sequence identity to a region comprising at least 8 contiguous nucleic acids of a sequence of premrna_ENST00000401558.7, premrna_ENST00000404992.6, premrna_ENST00000406957.5, premrna_ENST00000420673.5, premrna_ENST00000422552.5, premrna_ENST00000428210.5, premrna_ENST00000436018.1, premrna_ENST00000437159.5, premrna_ENST00000443240.5, premrna_ENST00000449444.5, premrna_ENST00000451765.5, premrna_ENST00000457483.5, premrna_ENST00000460037.1, premrna_ENST00000461407.5, premrna_ENST00000468259.1, premrna_ENST00000469337.1, premrna_ENST00000475744.1, premrna_ENST00000476585.5, premrna_ENST00000481073.5, premrna_ENST00000481214.1, premrna_ENST00000489954.1, premrna_ENST00000492182.5, premrna_ENST00000494468.1, premrna_ENST00000495003.1 or a sequence of Table 3 or complements thereof. In some embodiments, the targeted portion of the XPO1 pre-mRNA comprises a sequence with at least 80%, 85%, 90%, 95%, 97%, or 100% sequence identity to a region comprising at least 8 contiguous nucleic acids of a sequence selected from the group consisting of SEQ ID NO: 1082-SEQ ID NO: 1085 or complements thereof. In some embodiments, the targeted portion of the XPO1 pre-mRNA comprises a sequence that is complementary to at least 8, 9, 10, 11, 12, 13, 14, 15, 16, 17, 18, 19 or 20 contiguous nucleic acids of a sequence of Table 6A or Table 6B or a complement thereof.

[0646] In some embodiments, the ASOs disclosed herein target a NSAE pre-mRNA transcribed from a YY1AP1 genomic sequence. In some embodiments, the ASO targets a NSAE pre-mRNA transcript from a YY1AP1 genomic sequence comprising a NSAE exon. In some embodiments, the ASO targets a NSAE pre-mRNA transcript from a YY1AP1 genomic sequence comprising an intron flanking the 3′ splice site of the NSAE exon and an intron flanking the 5′ splice site of a NSAE exon. In some embodiments, the ASO targets a NSAE pre-mRNA transcript comprising a sequence selected from the group consisting of premrna_ENST00000295566.8, premrna_ENST00000311573.9, premrna_ENST00000347088.9, premrna_ENST00000354691.9, premrna_ENST00000355499.8, premrna_ENST00000359205.9, premrna_ENST00000361140.8, premrna_ENST00000361831.9, premrna_ENST00000368330.6, premrna_ENST00000368339.9, premrna_ENST00000368340.9, premrna_ENST00000404643.5, premrna_ENST00000405763.7, premrna_ENST00000407221.5, premrna_ENST00000436865.5, premrna_ENST00000442834.6, premrna_ENST00000443231.5, premrna_ENST00000454523.5, premrna_ENST00000466366.1, premrna_ENST00000476027.5, premrna_ENST00000476093.5, premrna_ENST00000477470.1, premrna_ENST00000488784.5, premrna_ENST00000493625.5, and premrna_ENST00000496324.5. In some embodiments, the ASO targets a YY1AP1 pre-mRNA sequence comprising a NSAE exon. In some embodiments, the ASO targets a YY1AP1 pre-mRNA sequence comprising an intron flanking the 3′ splice site of the NSAE exon. In some embodiments, the ASO targets a YY1AP1 pre-mRNA sequence comprising an intron flanking the 5′ splice site of the NSAE exon. In some embodiments, the transcript is selected from the group consisting of transcript_ENST00000295566.8, transcript_ENST00000311573.9, transcript_ENST00000347088.9, transcript_ENST00000354691.9, transcript_ENST00000355499.8, transcript_ENST00000359205.9, transcript_ENST00000361140.8, transcript_ENST00000361831.9, transcript_ENST00000368330.6, transcript_ENST00000368339.9, transcript_ENST00000368340.9, transcript_ENST00000404643.5, transcript_ENST00000405763.7, transcript_ENST00000407221.5, transcript_ENST00000436865.5, transcript_ENST00000442834.6, transcript_ENST00000443231.5, transcript_ENST00000454523.5, transcript_ENST00000466366.1, transcript_ENST00000476027.5, transcript_ENST00000476093.5, transcript_ENST00000477470.1, transcript_ENST00000488784.5, transcript_ENST00000493625.5, and transcript_ENST00000496324.5.

[0647] In some embodiments, the YY1AP1 pre-mRNA transcript is encoded by a genetic sequence with at least about 80%, 85%, 90%, 95%, 96%, 97%, 98%, 99% or 100% sequence identity to the Ensembl reference number ENSG00000163374.19 or a complement thereof. In some embodiments, the YY1AP1 pre-mRNA transcript comprises a sequence with at least about 80%, 85%, 90%, 95%, 96%, 97%, 98%, 99% or 100% sequence identity to a YY1AP1 pre-mRNA transcript or a complement thereof described herein.

[0648] In some embodiments, the targeted portion of the YY1AP1 pre-mRNA comprises a sequence with at least 80%, 85%, 90%, 95%, 97%, or 100% sequence identity to a region comprising at least 8 contiguous nucleic acids of a sequence of premrna_ENST00000295566.8, premrna_ENST00000311573.9, premrna_ENST00000347088.9, premrna_ENST00000354691.9, premrna_ENST00000355499.8, premrna_ENST00000359205.9, premrna_ENST00000361140.8, premrna_ENST00000361831.9, premrna_ENST00000368330.6, premrna_ENST00000368339.9, premrna_ENST00000368340.9, premrna_ENST00000404643.5, premrna_ENST00000405763.7, premrna_ENST00000407221.5, premrna_ENST00000436865.5, premrna_ENST00000442834.6, premrna_ENST00000443231.5, premrna_ENST00000454523.5, premrna_ENST00000466366.1, premrna_ENST00000476027.5, premrna_ENST00000476093.5, premrna_ENST00000477470.1, premrna_ENST00000488784.5, premrna_ENST00000493625.5, premrna_ENST00000496324.5 or a sequence of Table 3 or complements thereof. In some embodiments, the targeted portion of the YY1AP1 pre-mRNA comprises a sequence with at least 80%, 85%, 90%, 95%, 97%, or 100% sequence identity to a region comprising at least 8 contiguous nucleic acids of a sequence selected from the group consisting of SEQ ID NO: 1086-SEQ ID NO: 1089 or complements thereof. In some embodiments, the targeted portion of the YY1AP1 pre-mRNA comprises a sequence that is complementary to at least 8, 9, 10, 11, 12, 13, 14, 15, 16, 17, 18, 19 or 20 contiguous nucleic acids of a sequence of Table 6A or Table 6B or a complement thereof.

[0649] In some embodiments, the ASOs disclosed herein target a NSAE pre-mRNA transcribed from a ZC3H14 genomic sequence. In some embodiments, the ASO targets a NSAE pre-mRNA transcript from a ZC3H14 genomic sequence comprising a NSAE exon. In some embodiments, the ASO targets a NSAE pre-mRNA transcript from a ZC3H14 genomic sequence comprising an intron flanking the 3′ splice site of the NSAE exon and an intron flanking the 5′ splice site of a NSAE exon. In some embodiments, the ASO targets a NSAE pre-mRNA transcript comprising a sequence selected from the group consisting of premrna_ENST00000251038.10, premrna_ENST00000302216.12, premrna_ENST00000318308.10, premrna_ENST00000336693.8, premrna_ENST00000393514.9, premrna_ENST00000406216.7, premrna_ENST00000553495.5, premrna_ENST00000554020.5, premrna_ENST00000554602.5, premrna_ENST00000555120.1, premrna_ENST00000555755.5, premrna_ENST00000555792.1, premrna_ENST00000555799.5, premrna_ENST00000555851.6, premrna_ENST00000555900.5, premrna_ENST00000556000.5, premrna_ENST00000556110.5, premrna_ENST00000556158.5, premrna_ENST00000556945.5, premrna_ENST00000557047.2, premrna_ENST00000557491.1, premrna_ENST00000557605.1, premrna_ENST00000557607.5, premrna_ENST00000557693.5, premrna_ENST00000557737.1, and premrna_ENST00000649731.1. In some embodiments, the ASO targets a ZC3H14 pre-mRNA sequence comprising a NSAE exon. In some embodiments, the ASO targets a ZC3H14 pre-mRNA sequence comprising an intron flanking the 3′ splice site of the NSAE exon. In some embodiments, the ASO targets a ZC3H14 pre-mRNA sequence comprising an intron flanking the 5′ splice site of the NSAE exon. In some embodiments, the transcript is selected from the group consisting of transcript_ENST00000251038.10, transcript_ENST00000302216.12, transcript_ENST00000318308.10, transcript_ENST00000336693.8, transcript_ENST00000393514.9, transcript_ENST00000406216.7, transcript_ENST00000553495.5, transcript_ENST00000554020.5, transcript_ENST00000554602.5, transcript_ENST00000555120.1, transcript_ENST00000555755.5, transcript_ENST00000555792.1, transcript_ENST00000555799.5, transcript_ENST00000555851.6, transcript_ENST00000555900.5, transcript_ENST00000556000.5, transcript_ENST00000556110.5, transcript_ENST00000556158.5, transcript_ENST00000556945.5, transcript_ENST00000557047.2, transcript_ENST00000557491.1, transcript_ENST00000557605.1, transcript_ENST00000557607.5, transcript_ENST00000557693.5, transcript_ENST00000557737.1, and transcript_ENST00000649731.1.

[0650] In some embodiments, the ZC3H14 pre-mRNA transcript is encoded by a genetic sequence with at least about 80%, 85%, 90%, 95%, 96%, 97%, 98%, 99% or 100% sequence identity to the Ensembl reference number ENSG00000100722.20 or a complement thereof. In some embodiments, the ZC3H14 pre-mRNA transcript comprises a sequence with at least about 80%, 85%, 90%, 95%, 96%, 97%, 98%, 99% or 100% sequence identity to a ZC3H14 pre-mRNA transcript or a complement thereof described herein.

[0651] In some embodiments, the targeted portion of the ZC3H14 pre-mRNA comprises a sequence with at least 80%, 85%, 90%, 95%, 97%, or 100% sequence identity to a region comprising at least 8 contiguous nucleic acids of a sequence of premrna_ENST00000251038.10, premrna_ENST00000302216.12, premrna_ENST00000318308.10, premrna_ENST00000336693.8, premrna_ENST00000393514.9, premrna_ENST00000406216.7, premrna_ENST00000553495.5, premrna_ENST00000554020.5, premrna_ENST00000554602.5, premrna_ENST00000555120.1, premrna_ENST00000555755.5, premrna_ENST00000555792.1, premrna_ENST00000555799.5, premrna_ENST00000555851.6, premrna_ENST00000555900.5, premrna_ENST00000556000.5, premrna_ENST00000556110.5, premrna_ENST00000556158.5, premrna_ENST00000556945.5, premrna_ENST00000557047.2, premrna_ENST00000557491.1, premrna_ENST00000557605.1, premrna_ENST00000557607.5, premrna_ENST00000557693.5, premrna_ENST00000557737.1, premrna_ENST00000649731.1 or a sequence of Table 3 or complements thereof. In some embodiments, the targeted portion of the ZC3H14 pre-mRNA comprises a sequence with at least 80%, 85%, 90%, 95%, 97%, or 100% sequence identity to a region comprising at least 8 contiguous nucleic acids of a sequence selected from the group consisting of SEQ ID NO: 1090-SEQ ID NO: 1098 or complements thereof. In some embodiments, the targeted portion of the ZC3H14 pre-mRNA comprises a sequence that is complementary to at least 8, 9, 10, 11, 12, 13, 14, 15, 16, 17, 18, 19 or 20 contiguous nucleic acids of a sequence of Table 6A or Table 6B or a complement thereof.

[0652] In some embodiments, the ASOs disclosed herein target a NSAE pre-mRNA transcribed from a target genomic sequence. In some embodiments, the ASO targets a NSAE pre-mRNA transcript from a target genomic sequence comprising a NSAE exon. In some embodiments, the ASO targets a NSAE pre-mRNA transcript from a target genomic sequence comprising an intron flanking the 3′ splice site of the NSAE exon and an intron flanking the 5′ splice site of a NSAE exon. In some embodiments, the ASO targets a NSAE pre-mRNA transcript comprising a sequence selected from the pre-mRNA transcript sequences of Table 4. In some embodiments, the ASO targets a NSAE pre-mRNA transcript comprising a sequence selected from the pre-mRNA transcript sequences of Table 4 as represented by the Ensembl reference numbers. In some embodiments, the ASO targets a target pre-mRNA sequence comprising a NSAE exon. In some embodiments, the ASO targets a target pre-mRNA sequence comprising an intron flanking the 3′ splice site of the NSAE exon. In some embodiments, the ASO targets a target pre-mRNA sequence comprising an intron flanking the 5′ splice site of the NSAE exon. In some embodiments, the transcript is selected from the group consisting of the transcript sequences of Table 4. In some embodiments, the transcript is selected from the group consisting of the transcript sequences of Table 4 as represented by the Ensembl reference numbers.

[0653] In some embodiments, the target pre-mRNA transcript is encoded by a genetic sequence with at least about 80%, 85%, 90%, 95%, 96%, 97%, 98%, 99% or 100% sequence identity to the gene sequence as represented by the Ensembl reference number or a complement thereof. In some embodiments, the target pre-mRNA transcript comprises a sequence with at least about 80%, 85%, 90%, 95%, 96%, 97%, 98%, 99% or 100% sequence identity to target pre-mRNA transcript or a complement thereof described herein.

[0654] In some embodiments, the targeted portion of the target pre-mRNA comprises a sequence with at least 80%, 85%, 90%, 95%, 97%, or 100% sequence identity to a region comprising at least 8 contiguous nucleic acids of a sequence of Table 4 or a sequence of Table 3 or complements thereof. In some embodiments, the targeted portion of the target pre-mRNA comprises a sequence with at least 80%, 85%, 90%, 95%, 97%, or 100% sequence identity to a region comprising at least 8 contiguous nucleic acids of a sequence of Table 4 as represented by the Ensembl reference numbers or a sequence of Table 3 or complements thereof. In some embodiments, the targeted portion of the target pre-mRNA comprises a sequence with at least 80%, 85%, 90%, 95%, 97%, or 100% sequence identity to a region comprising at least 8 contiguous nucleic acids of a sequence selected from the group consisting of SEQ ID NO: 170-SEQ ID NO: 1098 or complements thereof. In some embodiments, the targeted portion of the target pre-mRNA comprises a sequence that is complementary to at least 8, 9, 10, 11, 12, 13, 14, 15, 16, 17, 18, 19 or 20 contiguous nucleic acids of a sequence of Table 6A or Table 6B or a complement thereof.

[0655] In some embodiments, the ASO targets exon 11 of a SYNGAP1 pre-mRNA comprising a NSAE exon. In some embodiments, the ASO targets a sequence about 2 nucleotides downstream (or 3′) from the 3′ splice site of exon 11 to about 4 nucleotides upstream (or 5′) from the 5′ splice site of exon 11. In some embodiments, the ASO has a sequence according to any one of SEQ ID NOs: _or complements thereof.

[0656] In some embodiments, the ASO targets an exon of a target pre-mRNA comprising a NSAE exon, wherein the target is any one selected from the group consisting of ABCA5, ABCA7, ABCC3, ABCC5, ABCC8, ABCD1, ABR, ACAD9, ACAP1, ACOX2, ACSF3, ACTN4, ADAM17, ADAMTS13, AKR1E2, ALAD, ALG3, ANKRD29, ANKS3, ANO4, AP3B2, AP3M1, AP5Z1, ARNTL, ASAP3, ATRX, BBS2, BBS4, BRD9, CALM3, CARS1, CASP9, CATSPER1, CCDC40, CCDC88B, CD4, CD58, CES2, CHFR, CLCN2, CNOT3, CNTROB, COL5A3, CPSF1, CSPP1, CTF1, CTH, CYP3A5, DAB2IP, DBN1, DDX51, DEAF1, DGKE, DHDDS, DMKN, DNHD1, DOCK8, DOK5, EIF2B5, ELAC2, ELP1, ENTPD4, ESRRA, ESS2, ETAA1, ETHE1, FANCA, FASTK, FASTKD3, FPGS, FREM1, GAS8, GCK, GGA1, GGA3, GGT1, GLMN, GON4L, GRB14, HDAC3, HELQ, HP1BP3, HPS1, HPS4, IDUA, IFT122, IL17RC, IMPDH1, INVS, IRF3, KCTD3, KLKB1, KYAT1, LAMC3, LDAH, LIMS2, MALT1, MAP3K7, MAPK13, MCAT, MCEE, MPI, MSTO1, NBEAL2, NLE1, NLRC5, NOM1, NOP58, NPHP1, NPR1, NUP188, OSGEP, PABPC4, PCOLCE, PHKA2, PIDD1, PKD1, PLA2G6, PLD2, PLEKHG5, PNPO, POLE, PON2, PRMT7, PRODH, PRPF3, PRPF4, PYCR1, RAD52, REXO1, RFX5, RHBDF2, RMND1, ROBO3, RPGRIP1, RTTN, RUFY3, SEMA3B, SEMA3F, SH2D3A, SIK3, SIRT3, SKIV2L, SLC2A13, SLC12A7, SLC22A3, SLC25A13, SLC25A37, SLC27A5, SLC30A9, SLC30A10, SMPD1, SMTN, SNRPB, SP140, STAMBP, STXBP2, SULF2, SYNGAP1, SYNJ2, TAZ, TBL2, TDRD7, TECPR2, TFB1M, TM6SF1, TNK2, TOE1, TOR1B, TRAPPC6B, TRIP4, TRMT2A, TRMU, TRPV4, TTC19, TYMP, UMPS, UROD, WDR11, WDR62, WIPI1, WRAP53, XPO1, YY1AP1, and ZC3H14. In some embodiments, the ASO targets a sequence about 2 nucleotides downstream (or 3′) from the 3′ splice site of the exon to about 4 nucleotides upstream (or 5′) from the 5′ splice site of the exon. In some embodiments, the ASO has a sequence according to any one of SEQ ID NOs: _ or complements thereof.

[0657] In some embodiments, the ASO targets intron 10 of a SYNGAP1 pre-mRNA comprising a NSAE exon. In some embodiments, the ASO targets a sequence about 4 to about 300 nucleotides upstream (or 5′) from the 3′ splice site of exon 11. In some embodiments, the ASO targets a sequence about 16 to about 100 nucleotides upstream (or 5′) from the 3′ splice site of exon 11. In some embodiments, the ASO targets a sequence about 4 to about 300 nucleotides downstream (or 3′) from the 5′ splice site of exon 10. In some embodiments, the ASO has a sequence according to any sequence of Table 1 or complements thereof.

[0658] In some embodiments, the ASO targets an intron of a target pre-mRNA comprising a NSAE exon, wherein the target is any one selected from the group consisting of ABCA5, ABCA7, ABCC3, ABCC5, ABCC8, ABCD1, ABR, ACAD9, ACAP1, ACOX2, ACSF3, ACTN4, ADAM17, ADAMTS13, AKR1E2, ALAD, ALG3, ANKRD29, ANKS3, ANO4, AP3B2, AP3M1, AP5Z1, ARNTL, ASAP3, ATRX, BBS2, BBS4, BRD9, CALM3, CARS1, CASP9, CATSPER1, CCDC40, CCDC88B, CD4, CD58, CES2, CHFR, CLCN2, CNOT3, CNTROB, COL5A3, CPSF1, CSPP1, CTF1, CTH, CYP3A5, DAB2IP, DBN1, DDX51, DEAF1, DGKE, DHDDS, DMKN, DNHD1, DOCK8, DOK5, EIF2B5, ELAC2, ELP1, ENTPD4, ESRRA, ESS2, ETAA1, ETHE1, FANCA, FASTK, FASTKD3, FPGS, FREM1, GAS8, GCK, GGA1, GGA3, GGT1, GLMN, GON4L, GRB14, HDAC3, HELQ, HP1BP3, HPS1, HPS4, IDUA, IFT122, IL17RC, IMPDH1, INVS, IRF3, KCTD3, KLKB1, KYAT1, LAMC3, LDAH, LIMS2, MALT1, MAP3K7, MAPK13, MCAT, MCEE, MPI, MSTO1, NBEAL2, NLE1, NLRC5, NOM1, NOP58, NPHP1, NPR1, NUP188, OSGEP, PABPC4, PCOLCE, PHKA2, PIDD1, PKD1, PLA2G6, PLD2, PLEKHG5, PNPO, POLE, PON2, PRMT7, PRODH, PRPF3, PRPF4, PYCR1, RAD52, REXO1, RFX5, RHBDF2, RMND1, ROBO3, RPGRIP1, RTTN, RUFY3, SEMA3B, SEMA3F, SH2D3A, SIK3, SIRT3, SKIV2L, SLC2A13, SLC12A7, SLC22A3, SLC25A13, SLC25A37, SLC27A5, SLC30A9, SLC30A10, SMPD1, SMTN, SNRPB, SP140, STAMBP, STXBP2, SULF2, SYNGAP1, SYNJ2, TAZ, TBL2, TDRD7, TECPR2, TFB1M, TM6SF1, TNK2, TOE1, TOR1B, TRAPPC6B, TRIP4, TRMT2A, TRMU, TRPV4, TTC19, TYMP, UMPS, UROD, WDR11, WDR62, WIPI1, WRAP53, XPO1, YY1AP1, and ZC3H14. In some embodiments, the ASO targets a sequence about 4 to about 300 nucleotides upstream (or 5′) from the 3′ splice site of the exon. In some embodiments, the ASO targets a sequence about 16 to about 100 nucleotides upstream (or 5′) from the 3′ splice site of the exon. In some embodiments, the ASO targets a sequence about 4 to about 300 nucleotides downstream (or 3′) from the 5′ splice site of the exon. In some embodiments, the ASO has a sequence according to any sequence of Table 1 or complements thereof.

[0659] In some embodiments, the ASO targets intron 10 of a SYNGAP1 pre-mRNA comprising a NSAE exon. In some embodiments, the ASO targets a sequence about 4 to about 300 nucleotides upstream (or 5′) from the 3′ splice site of exon 11. In some embodiments, the ASO targets a sequence about 4 to about 300 nucleotides downstream (or 3′) from the 5′ splice site of intron 10. In some embodiments, the ASO targets a sequence about 6 to about 100 nucleotides downstream (or 5′) from the 5′ splice site of intron 10. In some embodiments, the ASO has a sequence according to any sequence of Table 1 or complements thereof.

[0660] In some embodiments, the ASO targets an intron of a pre-mRNA comprising a NSAE exon, wherein the target is any one selected from the group consisting of ABCA5, ABCA7, ABCC3, ABCC5, ABCC8, ABCD1, ABR, ACAD9, ACAP1, ACOX2, ACSF3, ACTN4, ADAM17, ADAMTS13, AKR1E2, ALAD, ALG3, ANKRD29, ANKS3, ANO4, AP3B2, AP3M1, AP5Z1, ARNTL, ASAP3, ATRX, BBS2, BBS4, BRD9, CALM3, CARS1, CASP9, CATSPER1, CCDC40, CCDC88B, CD4, CD58, CES2, CHFR, CLCN2, CNOT3, CNTROB, COL5A3, CPSF1, CSPP1, CTF1, CTH, CYP3A5, DAB2IP, DBN1, DDX51, DEAF1, DGKE, DHDDS, DMKN, DNHD1, DOCK8, DOK5, EIF2B5, ELAC2, ELP1, ENTPD4, ESRRA, ESS2, ETAA1, ETHE1, FANCA, FASTK, FASTKD3, FPGS, FREM1, GAS8, GCK, GGA1, GGA3, GGT1, GLMN, GON4L, GRB14, HDAC3, HELQ, HP1BP3, HPS1, HPS4, IDUA, IFT122, IL17RC, IMPDH1, INVS, IRF3, KCTD3, KLKB1, KYAT1, LAMC3, LDAH, LIMS2, MALT1, MAP3K7, MAPK13, MCAT, MCEE, MPI, MSTO1, NBEAL2, NLE1, NLRC5, NOM1, NOP58, NPHP1, NPR1, NUP188, OSGEP, PABPC4, PCOLCE, PHKA2, PIDD1, PKD1, PLA2G6, PLD2, PLEKHG5, PNPO, POLE, PON2, PRMT7, PRODH, PRPF3, PRPF4, PYCR1, RAD52, REXO1, RFX5, RHBDF2, RMND1, ROBO3, RPGRIP1, RTTN, RUFY3, SEMA3B, SEMA3F, SH2D3A, SIK3, SIRT3, SKIV2L, SLC2A13, SLC12A7, SLC22A3, SLC25A13, SLC25A37, SLC27A5, SLC30A9, SLC30A10, SMPD1, SMTN, SNRPB, SP140, STAMBP, STXBP2, SULF2, SYNGAP1, SYNJ2, TAZ, TBL2, TDRD7, TECPR2, TFB1M, TM6SF1, TNK2, TOE1, TOR1B, TRAPPC6B, TRIP4, TRMT2A, TRMU, TRPV4, TTC19, TYMP, UMPS, UROD, WDR11, WDR62, WIPI1, WRAP53, XPO1, YY1AP1, and ZC3H14. In some embodiments, the ASO targets a sequence about 4 to about 300 nucleotides upstream (or 5′) from the 3′ splice site of the exon. In some embodiments, the ASO targets a sequence about 4 to about 300 nucleotides downstream (or 3′) from the 5′ splice site of the intron. In some embodiments, the ASO targets a sequence about 6 to about 100 nucleotides downstream (or 5′) from the 5′ splice site of the intron. In some embodiments, the ASO has a sequence according to any sequence of Table 1 or complements thereof.

[0661] In some embodiments, the targeted portion of the SYNGAP1 pre-mRNA is in intron 9, 10, 11 or 12 In some embodiments, the targeted portion of the SYNGAP1 pre-mRNA is in exon 9, 10, 11 or 12. In some embodiments, hybridization of an ASO to the targeted portion of the NSAE pre-mRNA results in inclusion of canonical exon 11, and subsequently increases SYNGAP1 protein production. In some embodiments, hybridization of an ASO to the targeted portion of the NSAE pre-mRNA results in exclusion of a canonical exon, and subsequently decreases SYNGAP1 protein production. In some embodiments, hybridization of an ASO to the targeted portion of the NSAE pre-mRNA results in inclusion or exclusion of a canonical exon, and subsequently modulates SYNGAP1 protein production. In some embodiments, the targeted portion of the SYNGAP1 pre-mRNA is in exon 10 or 11. In some embodiments, the targeted portion of the SYNGAP1 pre-mRNA is in intron 10. In some embodiments, the targeted portion of the SYNGAP1 pre-mRNA is in intron 11.

[0662] In some embodiments, the targeted portion of the target pre-mRNA is in an intron, wherein the target is any one selected from the group consisting of ABCA5, ABCA7, ABCC3, ABCC5, ABCC8, ABCD1, ABR, ACAD9, ACAP1, ACOX2, ACSF3, ACTN4, ADAM17, ADAMTS13, AKR1E2, ALAD, ALG3, ANKRD29, ANKS3, ANO4, AP3B2, AP3M1, AP5Z1, ARNTL, ASAP3, ATRX, BBS2, BBS4, BRD9, CALM3, CARS1, CASP9, CATSPER1, CCDC40, CCDC88B, CD4, CD58, CES2, CHFR, CLCN2, CNOT3, CNTROB, COL5A3, CPSF1, CSPP1, CTF1, CTH, CYP3A5, DAB2IP, DBN1, DDX51, DEAF1, DGKE, DHDDS, DMKN, DNHD1, DOCK8, DOK5, EIF2B5, ELAC2, ELP1, ENTPD4, ESRRA, ESS2, ETAA1, ETHE1, FANCA, FASTK, FASTKD3, FPGS, FREM1, GAS8, GCK, GGA1, GGA3, GGT1, GLMN, GON4L, GRB14, HDAC3, HELQ, HP1BP3, HPS1, HPS4, IDUA, IFT122, IL17RC, IMPDH1, INVS, IRF3, KCTD3, KLKB1, KYAT1, LAMC3, LDAH, LIMS2, MALT1, MAP3K7, MAPK13, MCAT, MCEE, MPI, MSTO1, NBEAL2, NLE1, NLRC5, NOM1, NOP58, NPHP1, NPR1, NUP188, OSGEP, PABPC4, PCOLCE, PHKA2, PIDD1, PKD1, PLA2G6, PLD2, PLEKHG5, PNPO, POLE, PON2, PRMT7, PRODH, PRPF3, PRPF4, PYCR1, RAD52, REXO1, RFX5, RHBDF2, RMND1, ROBO3, RPGRIP1, RTTN, RUFY3, SEMA3B, SEMA3F, SH2D3A, SIK3, SIRT3, SKIV2L, SLC2A13, SLC12A7, SLC22A3, SLC25A13, SLC25A37, SLC27A5, SLC30A9, SLC30A10, SMPD1, SMTN, SNRPB, SP140, STAMBP, STXBP2, SULF2, SYNGAP1, SYNJ2, TAZ, TBL2, TDRD7, TECPR2, TFB1M, TM6SF1, TNK2, TOE1, TOR1B, TRAPPC6B, TRIP4, TRMT2A, TRMU, TRPV4, TTC19, TYMP, UMPS, UROD, WDR11, WDR62, WIPI1, WRAP53, XPO1, YY1AP1, and ZC3H14. In some embodiments, the targeted portion of the target pre-mRNA is in an exon. In some embodiments, hybridization of an ASO to the targeted portion of the NSAE pre-mRNA results in inclusion of a canonical exon, and subsequently increases target protein production. In some embodiments, hybridization of an ASO to the targeted portion of the NSAE pre-mRNA results in exclusion of a canonical exon, and subsequently decreases target protein production. In some embodiments, hybridization of an ASO to the targeted portion of the NSAE pre-mRNA results in inclusion or exclusion of a canonical exon, and subsequently modulates target protein production.

### SYNGAP1 Protein

[0663] In some embodiments, a mutation occurs in both alleles. In some embodiments, a mutation occurs in one of the two alleles. In some embodiments, additional mutation occurs in one of the two alleles. In some embodiments, the additional mutation occurs in the same allele as the first mutation. In other embodiments, the additional mutation occurs is a trans mutation.

[0664] In some embodiments, the methods described herein are used to increase the production of a functional SYNGAP1 protein. In some embodiments, the methods described herein are used to decrease the production of a functional SYNGAP1 protein. In some embodiments, the methods described herein are used to modulate the production of a functional SYNGAP1 protein. As used herein, the term “functional” refers to the amount of activity or function of a SYNGAP1 protein that is necessary to prevent or eliminate any one or more symptoms of a treated disease or condition, e.g., autosomal dominant mental retardation. Alternatively, overexpression of a functional SYNGAP1 protein may induce or increase any one or more symptoms of a treated disease or condition. In some embodiments, the methods are used to increase the production of a partially functional SYNGAP1 protein. In some embodiments, the methods are used to decrease the production of a partially functional SYNGAP1 protein. In some embodiments, the methods are used to modulate the production of a partially functional SYNGAP1 protein. As used herein, the term “partially functional” refers to any amount of activity or function of the SYNGAP1 protein that is less than the amount of activity or function that is necessary to eliminate or prevent any one or more symptoms of a disease or condition, e.g., autosomal dominant mental retardation. Alternatively, expression or overexpression of a functional SYNGAP1 protein may induce or increase any one or more symptoms of a treated disease or condition. In some embodiments, a partially functional protein or RNA will have at least 10%, at least 20%, at least 30%, at least 40%, at least 50%, at least 60%, at least 70%, at least 75%, at least 80%, at least 85%, at least 90%, or at least 95% less activity relative to the fully functional protein or RNA.

[0665] In some embodiments, the method is a method of increasing the expression of the SYNGAP1 protein by cells of a subject having a NSAE pre-mRNA encoding the SYNGAP1 protein, wherein the subject has autosomal dominant mental retardation caused by a deficient amount of activity of SYNGAP1 protein, and wherein the deficient amount of the SYNGAP1 protein is caused by sporadic mutation. In such an embodiment, the subject has a first allele carrying the_mutation and a second allele from which the SYNGAP1 protein is not produced. In another such embodiment, the subject has a first allele carrying a mutation and a second allele encoding a nonfunctional SYNGAP1 protein. In another such embodiment, the subject has a first allele carrying a mutation and a second allele encoding a partially functional SYNGAP1 protein. In another such an embodiment, the subject has a first allele carrying a mutation and a second allele carrying the mutation. In any of these embodiments, the antisense oligomer binds to a targeted portion of the NSAE pre-mRNA transcribed from the allele carrying a mutation, thereby prevent alternate splicing of NSAEs into the pre-mRNA, and causing an increase in the level of mature mRNA encoding functional SYNGAP1 protein, and an increase in the expression of the SYNGAP1 protein in the cells of the subject.

[0666] In related embodiments, the method is a method of using an ASO to increase the expression of a functional protein or functional RNA. In some embodiments, an ASO is used to increase the expression of SYNGAP1 protein in cells of a subject having a NSAE pre-mRNA encoding SYNGAP1 protein, wherein the subject has a deficiency, e.g., autosomal dominant mental retardation, in the amount or function of SYNGAP1 protein.

[0667] In some embodiments, the method is a method of decreasing the expression of the SYNGAP1 protein by cells of a subject having a NSAE pre-mRNA encoding the SYNGAP1 protein, wherein the subject has a disease caused by an excess amount of activity of SYNGAP1 protein, and wherein the excess amount of SYNGAP1 protein is caused by a mutation. In some embodiments, the antisense oligomer binds to a targeted portion of the NSAE pre-mRNA transcribed from the allele carrying a mutation, thereby increasing alternate splicing of NSAEs into the pre-mRNA, and causing an decrease in the level of mature mRNA encoding functional SYNGAP1 protein, and an decrease in the expression of the SYNGAP1 protein in the cells of the subject. In related embodiments, the method is a method of using an ASO to decrease the expression of a functional protein or functional RNA. In some embodiments, an ASO is used to decrease the expression of SYNGAP1 protein in cells of a subject having a NSAE pre-mRNA encoding the SYNGAP1 protein, wherein the subject has an excess in the amount or function of SYNGAP1 protein.

[0668] In some embodiments, the method is a method of modulating the expression of the SYNGAP1 protein by cells of a subject having a NSAE pre-mRNA encoding the SYNGAP1 protein, wherein the subject has a disease caused by a deficient or excess amount of activity of SYNGAP1 protein, and wherein the deficient or excess amount of the SYNGAP1 protein is caused by a mutation. In some embodiments, the antisense oligomer binds to a targeted portion of the NSAE pre-mRNA transcribed from the allele carrying a mutation, thereby modulating alternate splicing of NSAEs into the pre-mRNA, and causing an modulation in the level of mature mRNA encoding functional SYNGAP1 protein, and an modulation in the expression of SYNGAP1 protein in the cells of the subject. In related embodiments, the method is a method of using an ASO to modulate the expression of a functional protein or functional RNA. In some embodiments, an ASO is used to modulate the expression of SYNGAP1 protein in cells of a subject having a NSAE pre-mRNA encoding the SYNGAP1 protein, wherein the subject has an abnormality in the amount or function of the SYNGAP1 protein.

[0669] In some embodiments, the NSAE pre-mRNA transcript that encodes the protein that is causative of the disease or condition is targeted by the ASOs described herein. In some embodiments, a NSAE pre-mRNA transcript that encodes a protein that is not causative of the disease is targeted by the ASOs. For example, a disease that is the result of a mutation or deficiency of a first protein in a particular pathway may be ameliorated by targeting a NSAE containing pre-mRNA that encodes a second protein, thereby increasing production of the second protein. In some embodiments, the function of the second protein is able to compensate for the mutation or deficiency of the first protein (which is causative of the disease or condition).

[0670] In some embodiments, the subject has:
[0671] (a) a first mutant allele carrying a mutation from which the SYNGAP1 protein is produced at a reduced level compared to production from a wild-type allele, and
[0672] (b) a second mutant allele from which
   [0673] (i) the SYNGAP1 protein is produced at a reduced level compared to production from a wild-type allele due to the_mutation
   [0674] (ii) the SYNGAP1 protein is produced at a reduced level compared to production from a wild-type allele,
   [0675] (iii) the SYNGAP1 protein is produced in a form having reduced function compared to an equivalent wild-type protein, or
   [0676] (iv) the SYNGAP1 protein is not produced, and
[0677] wherein the NSAE pre-mRNA is transcribed from the first allele and/or the second allele carrying the mutation. In these embodiments, the ASO binds to a targeted portion of the NSAE pre-mRNA transcribed from the first allele or the second allele, thereby promoting exon inclusion from the NSAE pre-mRNA, and causing an increase in the level of full-length mRNA encoding SYNGAP1 protein and an increase in the expression of the target protein or functional RNA in the cells of the subject. In these embodiments, the target protein or functional RNA having an increase in expression level resulting from exon inclusion from the NSAE pre-mRNA has full function compared to the equivalent wild-type protein (fully-functional). In these embodiments, the ASO binds to a targeted portion of the NSAE pre-mRNA transcribed from the first allele or the second allele, thereby reducing exon inclusion from the NSAE pre-mRNA, and causing a decrease in the level of full-length mRNA encoding SYNGAP1 protein and a decrease in the expression of the target protein or functional RNA in the cells of the subject. In these embodiments, the target protein or functional RNA having a decrease in expression level resulting from exon exclusion from the NSAE pre-mRNA has full function compared to the equivalent wild-type protein (fully-functional).

[0678] In some embodiments, contacting cells with an ASO that is complementary to a targeted portion of a SYNGAP1 pre-mRNA transcript results in an increase in the amount of SYNGAP1 protein produced by at least 10, 20, 30, 40, 50, 60, 80, 100, 150, 200, 250, 300, 350, 400, 450, 500, or 1000%, compared to the amount of the protein produced by a cell in the absence of the ASO/absence of treatment. In some embodiments, the total amount of SYNGAP1 protein produced by the cell to which the antisense oligomer is contacted is increased about 20% to about 300%, about 50% to about 300%, about 100% to about 300%, about 150% to about 300%, about 20% to about 50%, about 20% to about 100%, about 20% to about 150%, about 20% to about 200%, about 20% to about 250%, about 50% to about 100%, about 50% to about 150%, about 50% to about 200%, about 50% to about 250%, about 100% to about 150%, about 100% to about 200%, about 100% to about 250%, about 150% to about 200%, about 150% to about 250%, about 200% to about 250%, at least about 10%, at least about 20%, at least about 50%, at least about 100%, at least about 150%, at least about 200%, at least about 250%, or at least about 300%, compared to the amount of target protein produced by a control compound. In some embodiments, the total amount of SYNGAP1 protein produced by the cell to which the antisense oligomer is contacted is increased about 1.1 to about 10-fold, about 1.5 to about 10-fold, about 2 to about 10-fold, about 3 to about 10-fold, about 4 to about 10-fold, about 1.1 to about 5-fold, about 1.1 to about 6-fold, about 1.1 to about 7-fold, about 1.1 to about 8-fold, about 1.1 to about 9-fold, about 2 to about 5-fold, about 2 to about 6-fold, about 2 to about 7-fold, about 2 to about 8-fold, about 2 to about 9-fold, about 3 to about 6-fold, about 3 to about 7-fold, about 3 to about 8-fold, about 3 to about 9-fold, about 4 to about 7-fold, about 4 to about 8-fold, about 4 to about 9-fold, at least about 1.1-fold, at least about 1.5-fold, at least about 2-fold, at least about 2.5-fold, at least about 3-fold, at least about 3.5-fold, at least about 4-fold, at least about 5-fold, or at least about 10-fold, compared to the amount of target protein produced by a control compound. A control compound can be, for example, an oligonucleotide that is not complementary to a targeted portion of the pre-mRNA.

[0679] In some embodiments, the level of mRNA encoding SYNGAP1 protein is increased 1.1 to 10-fold, when compared to the amount of mRNA encoding SYNGAP1 protein that is produced in a control cell, e.g., one that is not treated with the antisense oligomer or one that is treated with an antisense oligomer that does not bind to the targeted portion of the SYNGAP1 containing pre-mRNA.

[0680] In some embodiments, the level of mRNA encoding SYNGAP1 protein is increased 1.1 to 10-fold, when compared to the amount of mRNA encoding SYNGAP1 protein that is produced in a control cell, e.g., one that is not treated with the antisense oligomer or one that is treated with an antisense oligomer that does not bind to the targeted portion of the SYNGAP1 pre-mRNA.

[0681] In some embodiments of the present invention, a subject can have a mutation in SYNGAP1. A variety of pathogenic variants have been reported to cause SYNGAP1 deficiency, including missense variants, nonsense variants, single- and double-nucleotide insertions and deletions, complex insertion/deletions, and splice site variants. In the presence of this pathogenic variant approximately 2%-5% of transcripts are correctly spliced, allowing for residual enzyme activity. In some embodiments, disease results from loss of function of SYNGAP1 caused by SYNGAP1 pathogenic variants that generate truncated proteins or proteins with altered conformations or reduced activity.

[0682] In some embodiments, a subject having any SYNGAP1 mutation known in the art and described as above can be treated using the methods and compositions described herein. In some embodiments, the mutation is within any SYNGAP1 intron or exon. In some embodiments, the mutation is within SYNGAP1 exon 10 or 11.

[0683] In some embodiments, contacting cells with an ASO that is complementary to a targeted portion of a SYNGAP1 pre-mRNA transcript results in a decrease in the amount of SYNGAP1 protein produced by at least 10, 20, 30, 40, 50, 60, 80, 100, 150, 200, 250, 300, 350, 400, 450, 500, or 1000%, compared to the amount of the protein produced by a cell in the absence of the ASO/absence of treatment. In some embodiments, the total amount of SYNGAP1 protein produced by the cell to which the antisense oligomer is contacted is decreased about 20% to about 300%, about 50% to about 300%, about 100% to about 300%, about 150% to about 300%, about 20% to about 50%, about 20% to about 100%, about 20% to about 150%, about 20% to about 200%, about 20% to about 250%, about 50% to about 100%, about 50% to about 150%, about 50% to about 200%, about 50% to about 250%, about 100% to about 150%, about 100% to about 200%, about 100% to about 250%, about 150% to about 200%, about 150% to about 250%, about 200% to about 250%, at least about 10%, at least about 20%, at least about 50%, at least about 100%, at least about 150%, at least about 200%, at least about 250%, or at least about 300%, compared to the amount of target protein produced by a control compound. In some embodiments, the total amount of SYNGAP1 protein produced by the cell to which the antisense oligomer is contacted is decreased about 1.1 to about 10-fold, about 1.5 to about 10-fold, about 2 to about 10-fold, about 3 to about 10-fold, about 4 to about 10-fold, about 1.1 to about 5-fold, about 1.1 to about 6-fold, about 1.1 to about 7-fold, about 1.1 to about 8-fold, about 1.1 to about 9-fold, about 2 to about 5-fold, about 2 to about 6-fold, about 2 to about 7-fold, about 2 to about 8-fold, about 2 to about 9-fold, about 3 to about 6-fold, about 3 to about 7-fold, about 3 to about 8-fold, about 3 to about 9-fold, about 4 to about 7-fold, about 4 to about 8-fold, about 4 to about 9-fold, at least about 1.1-fold, at least about 1.5-fold, at least about 2-fold, at least about 2.5-fold, at least about 3-fold, at least about 3.5-fold, at least about 4-fold, at least about 5-fold, or at least about 10-fold, compared to the amount of target protein produced by a control compound. A control compound can be, for example, an oligonucleotide that is not complementary to a targeted portion of the pre-mRNA.

[0684] In some embodiments, the level of mRNA encoding SYNGAP1 protein is decreased 1.1 to 10-fold, when compared to the amount of mRNA encoding SYNGAP1 protein that is produced in a control cell, e.g., one that is not treated with the antisense oligomer or one that is treated with an antisense oligomer that does not bind to the targeted portion of the SYNGAP1 containing pre-mRNA.

[0685] In some embodiments, the level of mRNA encoding SYNGAP1 protein is decreased 1.1 to 10-fold, when compared to the amount of mRNA encoding SYNGAP1 protein that is produced in a control cell, e.g., one that is not treated with the antisense oligomer or one that is treated with an antisense oligomer that does not bind to the targeted portion of the SYNGAP1 pre-mRNA.

[0686] In some embodiments of the present invention, a subject can have a mutation in SYNGAP1. A variety of pathogenic variants may cause SYNGAP1 overexpression, including missense variants, nonsense variants, single- and double-nucleotide insertions and deletions, complex insertion/deletions, and splice site variants. In some embodiments, disease results from an overexpression of function of SYNGAP1 caused by SYNGAP1 pathogenic variants that generate truncated proteins or proteins with altered conformations or increased activity.

[0687] In some embodiments, a subject having any SYNGAP1 mutation known in the art and described as above can be treated using the methods and compositions described herein. In some embodiments, the mutation is within any SYNGAP1 intron or exon. In some embodiments, the mutation is within SYNGAP1 exon 10 or 11.

### Target Protein

[0688] In some embodiments, a mutation occurs in both alleles. In some embodiments, a mutation occurs in one of the two alleles, wherein the target is any one selected from the group consisting of ABCA5, ABCA7, ABCC3, ABCC5, ABCC8, ABCD1, ABR, ACAD9, ACAP1, ACOX2, ACSF3, ACTN4, ADAM17, ADAMTS13, AKR1E2, ALAD, ALG3, ANKRD29, ANKS3, ANO4, AP3B2, AP3M1, AP5Z1, ARNTL, ASAP3, ATRX, BBS2, BBS4, BRD9, CALM3, CARS1, CASP9, CATSPER1, CCDC40, CCDC88B, CD4, CD58, CES2, CHFR, CLCN2, CNOT3, CNTROB, COL5A3, CPSF1, CSPP1, CTF1, CTH, CYP3A5, DAB2IP, DBN1, DDX51, DEAF1, DGKE, DHDDS, DMKN, DNHD1, DOCK8, DOK5, EIF2B5, ELAC2, ELP1, ENTPD4, ESRRA, ESS2, ETAA1, ETHE1, FANCA, FASTK, FASTKD3, FPGS, FREM1, GAS8, GCK, GGA1, GGA3, GGT1, GLMN, GON4L, GRB14, HDAC3, HELQ, HP1BP3, HPS1, HPS4, IDUA, IFT122, IL17RC, IMPDH1, INVS, IRF3, KCTD3, KLKB1, KYAT1, LAMC3, LDAH, LIMS2, MALT1, MAP3K7, MAPK13, MCAT, MCEE, MPI, MSTO1, NBEAL2, NLE1, NLRC5, NOM1, NOP58, NPHP1, NPR1, NUP188, OSGEP, PABPC4, PCOLCE, PHKA2, PIDD1, PKD1, PLA2G6, PLD2, PLEKHG5, PNPO, POLE, PON2, PRMT7, PRODH, PRPF3, PRPF4, PYCR1, RAD52, REXO1, RFX5, RHBDF2, RMND1, ROBO3, RPGRIP1, RTTN, RUFY3, SEMA3B, SEMA3F, SH2D3A, SIK3, SIRT3, SKIV2L, SLC2A13, SLC12A7, SLC22A3, SLC25A13, SLC25A37, SLC27A5, SLC30A9, SLC30A10, SMPD1, SMTN, SNRPB, SP140, STAMBP, STXBP2, SULF2, SYNGAP1, SYNJ2, TAZ, TBL2, TDRD7, TECPR2, TFB1M, TM6SF1, TNK2, TOE1, TOR1B, TRAPPC6B, TRIP4, TRMT2A, TRMU, TRPV4, TTC19, TYMP, UMPS, UROD, WDR11, WDR62, WIPI1, WRAP53, XPO1, YY1AP1, and ZC3H14. In some embodiments, additional mutation occurs in one of the two alleles. In some embodiments, the additional mutation occurs in the same allele as the first mutation. In other embodiments, the additional mutation occurs is a trans mutation.

[0689] In some embodiments, the methods described herein are used to increase the production of a functional target protein, wherein the target is any one selected from the group consisting of ABCA5, ABCA7, ABCC3, ABCC5, ABCC8, ABCD1, ABR, ACAD9, ACAP1, ACOX2, ACSF3, ACTN4, ADAM17, ADAMTS13, AKR1E2, ALAD, ALG3, ANKRD29, ANKS3, ANO4, AP3B2, AP3M1, AP5Z1, ARNTL, ASAP3, ATRX, BBS2, BBS4, BRD9, CALM3, CARS1, CASP9, CATSPER1, CCDC40, CCDC88B, CD4, CD58, CES2, CHFR, CLCN2, CNOT3, CNTROB, COL5A3, CPSF1, CSPP1, CTF1, CTH, CYP3A5, DAB2IP, DBN1, DDX51, DEAF1, DGKE, DHDDS, DMKN, DNHD1, DOCK8, DOK5, EIF2B5, ELAC2, ELP1, ENTPD4, ESRRA, ESS2, ETAA1, ETHE1, FANCA, FASTK, FASTKD3, FPGS, FREM1, GAS8, GCK, GGA1, GGA3, GGT1, GLMN, GON4L, GRB14, HDAC3, HELQ, HP1BP3, HPS1, HPS4, IDUA, IFT122, IL17RC, IMPDH1, INVS, IRF3, KCTD3, KLKB1, KYAT1, LAMC3, LDAH, LIMS2, MALT1, MAP3K7, MAPK13, MCAT, MCEE, MPI, MSTO1, NBEAL2, NLE1, NLRC5, NOM1, NOP58, NPHP1, NPR1, NUP188, OSGEP, PABPC4, PCOLCE, PHKA2, PIDD1, PKD1, PLA2G6, PLD2, PLEKHG5, PNPO, POLE, PON2, PRMT7, PRODH, PRPF3, PRPF4, PYCR1, RAD52, REXO1, RFX5, RHBDF2, RMND1, ROBO3, RPGRIP1, RTTN, RUFY3, SEMA3B, SEMA3F, SH2D3A, SIK3, SIRT3, SKIV2L, SLC2A13, SLC12A7, SLC22A3, SLC25A13, SLC25A37, SLC27A5, SLC30A9, SLC30A10, SMPD1, SMTN, SNRPB, SP140, STAMBP, STXBP2, SULF2, SYNGAP1, SYNJ2, TAZ, TBL2, TDRD7, TECPR2, TFB1M, TM6SF1, TNK2, TOE1, TOR1B, TRAPPC6B, TRIP4, TRMT2A, TRMU, TRPV4, TTC19, TYMP, UMPS, UROD, WDR11, WDR62, WIPI1, WRAP53, XPO1, YY1AP1, and ZC3H14. In some embodiments, the methods described herein are used to decrease the production of a functional target protein. In some embodiments, the methods described herein are used to modulate the production of a functional target protein. As used herein, the term “functional” refers to the amount of activity or function of a target protein that is necessary to prevent or eliminate any one or more symptoms of a treated disease or condition, e.g., autosomal dominant mental retardation. Alternatively, overexpression of a functional target protein may induce or increase any one or more symptoms of a treated disease or condition. In some embodiments, the methods are used to increase the production of a partially functional target protein. In some embodiments, the methods are used to decrease the production of a partially functional target protein. In some embodiments, the methods are used to modulate the production of a partially functional target protein. As used herein, the term “partially functional” refers to any amount of activity or function of the target protein that is less than the amount of activity or function that is necessary to eliminate or prevent any one or more symptoms of a disease or condition, e.g., autosomal dominant mental retardation. Alternatively, expression or overexpression of a functional target protein may induce or increase any one or more symptoms of a treated disease or condition. In some embodiments, a partially functional protein or RNA will have at least 10%, at least 20%, at least 30%, at least 40%, at least 50%, at least 60%, at least 70%, at least 75%, at least 80%, at least 85%, at least 90%, or at least 95% less activity relative to the fully functional protein or RNA.

[0690] In some embodiments, the method is a method of increasing the expression of the target protein by cells of a subject having a NSAE pre-mRNA encoding the target protein, wherein the subject has autosomal dominant mental retardation caused by a deficient amount of activity of target protein, wherein the deficient amount of the target protein is caused by sporadic mutation, and wherein the target is any one selected from the group consisting of ABCA5, ABCA7, ABCC3, ABCC5, ABCC8, ABCD1, ABR, ACAD9, ACAP1, ACOX2, ACSF3, ACTN4, ADAM17, ADAMTS13, AKR1E2, ALAD, ALG3, ANKRD29, ANKS3, ANO4, AP3B2, AP3M1, AP5Z1, ARNTL, ASAP3, ATRX, BBS2, BBS4, BRD9, CALM3, CARS1, CASP9, CATSPER1, CCDC40, CCDC88B, CD4, CD58, CES2, CHFR, CLCN2, CNOT3, CNTROB, COL5A3, CPSF1, CSPP1, CTF1, CTH, CYP3A5, DAB2IP, DBN1, DDX51, DEAF1, DGKE, DHDDS, DMKN, DNHD1, DOCK8, DOK5, EIF2B5, ELAC2, ELP1, ENTPD4, ESRRA, ESS2, ETAA1, ETHE1, FANCA, FASTK, FASTKD3, FPGS, FREM1, GAS8, GCK, GGA1, GGA3, GGT1, GLMN, GON4L, GRB14, HDAC3, HELQ, HP1BP3, HPS1, HPS4, IDUA, IFT122, IL17RC, IMPDH1, INVS, IRF3, KCTD3, KLKB1, KYAT1, LAMC3, LDAH, LIMS2, MALT1, MAP3K7, MAPK13, MCAT, MCEE, MPI, MSTO1, NBEAL2, NLE1, NLRC5, NOM1, NOP58, NPHP1, NPR1, NUP188, OSGEP, PABPC4, PCOLCE, PHKA2, PIDD1, PKD1, PLA2G6, PLD2, PLEKHG5, PNPO, POLE, PON2, PRMT7, PRODH, PRPF3, PRPF4, PYCR1, RAD52, REXO1, RFX5, RHBDF2, RMND1, ROBO3, RPGRIP1, RTTN, RUFY3, SEMA3B, SEMA3F, SH2D3A, SIK3, SIRT3, SKIV2L, SLC2A13, SLC12A7, SLC22A3, SLC25A13, SLC25A37, SLC27A5, SLC30A9, SLC30A10, SMPD1, SMTN, SNRPB, SP140, STAMBP, STXBP2, SULF2, SYNGAP1, SYNJ2, TAZ, TBL2, TDRD7, TECPR2, TFB1M, TM6SF1, TNK2, TOE1, TOR1B, TRAPPC6B, TRIP4, TRMT2A, TRMU, TRPV4, TTC19, TYMP, UMPS, UROD, WDR11, WDR62, WIPI1, WRAP53, XPO1, YY1AP1, and ZC3H14. In such an embodiment, the subject has a first allele carrying a mutation and a second allele from which the target protein is not produced. In another such embodiment, the subject has a first allele carrying a mutation and a second allele encoding a nonfunctional target protein. In another such embodiment, the subject has a first allele carrying a mutation and a second allele encoding a partially functional target protein. In another such an embodiment, the subject has a first allele carrying a mutation and a second allele carrying the mutation. In any of these embodiments, the antisense oligomer binds to a targeted portion of the NSAE pre-mRNA transcribed from the allele carrying a mutation, thereby prevent alternate splicing of NSAEs into the pre-mRNA, and causing an increase in the level of mature mRNA encoding functional target protein, and an increase in the expression of the target protein in the cells of the subject. In related embodiments, the method is a method of using an ASO to increase the expression of a functional protein or functional RNA. In some embodiments, an ASO is used to increase the expression of target protein in cells of a subject having a NSAE pre-mRNA encoding the target protein, wherein the subject has a deficiency, e.g., autosomal dominant mental retardation, in the amount or function of the target protein.

[0691] In some embodiments, the method is a method of decreasing the expression of the target protein by cells of a subject having a NSAE pre-mRNA encoding the target protein, wherein the subject has a disease caused by an excess amount of activity of the target protein, wherein the excess amount of the target protein is caused by a mutation, and wherein the target is any one selected from the group consisting of ABCA5, ABCA7, ABCC3, ABCC5, ABCC8, ABCD1, ABR, ACAD9, ACAP1, ACOX2, ACSF3, ACTN4, ADAM17, ADAMTS13, AKR1E2, ALAD, ALG3, ANKRD29, ANKS3, ANO4, AP3B2, AP3M1, AP5Z1, ARNTL, ASAP3, ATRX, BBS2, BBS4, BRD9, CALM3, CARS1, CASP9, CATSPER1, CCDC40, CCDC88B, CD4, CD58, CES2, CHFR, CLCN2, CNOT3, CNTROB, COL5A3, CPSF1, CSPP1, CTF1, CTH, CYP3A5, DAB2IP, DBN1, DDX51, DEAF1, DGKE, DHDDS, DMKN, DNHD1, DOCK8, DOK5, EIF2B5, ELAC2, ELP1, ENTPD4, ESRRA, ESS2, ETAA1, ETHE1, FANCA, FASTK, FASTKD3, FPGS, FREM1, GAS8, GCK, GGA1, GGA3, GGT1, GLMN, GON4L, GRB14, HDAC3, HELQ, HP1BP3, HPS1, HPS4, IDUA, IFT122, IL17RC, IMPDH1, INVS, IRF3, KCTD3, KLKB1, KYAT1, LAMC3, LDAH, LIMS2, MALT1, MAP3K7, MAPK13, MCAT, MCEE, MPI, MSTO1, NBEAL2, NLE1, NLRC5, NOM1, NOP58, NPHP1, NPR1, NUP188, OSGEP, PABPC4, PCOLCE, PHKA2, PIDD1, PKD1, PLA2G6, PLD2, PLEKHG5, PNPO, POLE, PON2, PRMT7, PRODH, PRPF3, PRPF4, PYCR1, RAD52, REXO1, RFX5, RHBDF2, RMND1, ROBO3, RPGRIP1, RTTN, RUFY3, SEMA3B, SEMA3F, SH2D3A, SIK3, SIRT3, SKIV2L, SLC2A13, SLC12A7, SLC22A3, SLC25A13, SLC25A37, SLC27A5, SLC30A9, SLC30A10, SMPD1, SMTN, SNRPB, SP140, STAMBP, STXBP2, SULF2, SYNGAP1, SYNJ2, TAZ, TBL2, TDRD7, TECPR2, TFB1M, TM6SF1, TNK2, TOE1, TOR1B, TRAPPC6B, TRIP4, TRMT2A, TRMU, TRPV4, TTC19, TYMP, UMPS, UROD, WDR11, WDR62, WIPI1, WRAP53, XPO1, YY1AP1, and ZC3H14. In some embodiments, the antisense oligomer binds to a targeted portion of the NSAE pre-mRNA transcribed from the allele carrying a mutation, thereby increasing alternate splicing of NSAEs into the pre-mRNA, and causing an decrease in the level of mature mRNA encoding the functional target protein, and an decrease in the expression of the target protein in the cells of the subject. In related embodiments, the method is a method of using an ASO to decrease the expression of a functional protein or functional RNA. In some embodiments, an ASO is used to decrease the expression of the target protein in cells of a subject having a NSAE pre-mRNA encoding the target protein, wherein the subject has an excess in the amount or function of the target protein.

[0692] In some embodiments, the method is a method of modulating the expression of the target protein by cells of a subject having a NSAE pre-mRNA encoding the target protein, wherein the subject has a disease caused by a deficient or excess amount of activity of the target protein, wherein the deficient or excess amount of the target protein is caused by a mutation, and wherein the target is any one selected from the group consisting of ABCA5, ABCA7, ABCC3, ABCC5, ABCC8, ABCD1, ABR, ACAD9, ACAP1, ACOX2, ACSF3, ACTN4, ADAM17, ADAMTS13, AKR1E2, ALAD, ALG3, ANKRD29, ANKS3, ANO4, AP3B2, AP3M1, AP5Z1, ARNTL, ASAP3, ATRX, BBS2, BBS4, BRD9, CALM3, CARS1, CASP9, CATSPER1, CCDC40, CCDC88B, CD4, CD58, CES2, CHFR, CLCN2, CNOT3, CNTROB, COL5A3, CPSF1, CSPP1, CTF1, CTH, CYP3A5, DAB2IP, DBN1, DDX51, DEAF1, DGKE, DHDDS, DMKN, DNHD1, DOCK8, DOK5, EIF2B5, ELAC2, ELP1, ENTPD4, ESRRA, ESS2, ETAA1, ETHE1, FANCA, FASTK, FASTKD3, FPGS, FREM1, GAS8, GCK, GGA1, GGA3, GGT1, GLMN, GON4L, GRB14, HDAC3, HELQ, HP1BP3, HPS1, HPS4, IDUA, IFT122, IL17RC, IMPDH1, INVS, IRF3, KCTD3, KLKB1, KYAT1, LAMC3, LDAH, LIMS2, MALT1, MAP3K7, MAPK13, MCAT, MCEE, MPI, MSTO1, NBEAL2, NLE1, NLRC5, NOM1, NOP58, NPHP1, NPR1, NUP188, OSGEP, PABPC4, PCOLCE, PHKA2, PIDD1, PKD1, PLA2G6, PLD2, PLEKHG5, PNPO, POLE, PON2, PRMT7, PRODH, PRPF3, PRPF4, PYCR1, RAD52, REXO1, RFX5, RHBDF2, RMND1, ROBO3, RPGRIP1, RTTN, RUFY3, SEMA3B, SEMA3F, SH2D3A, SIK3, SIRT3, SKIV2L, SLC2A13, SLC12A7, SLC22A3, SLC25A13, SLC25A37, SLC27A5, SLC30A9, SLC30A10, SMPD1, SMTN, SNRPB, SP140, STAMBP, STXBP2, SULF2, SYNGAP1, SYNJ2, TAZ, TBL2, TDRD7, TECPR2, TFB1M, TM6SF1, TNK2, TOE1, TOR1B, TRAPPC6B, TRIP4, TRMT2A, TRMU, TRPV4, TTC19, TYMP, UMPS, UROD, WDR11, WDR62, WIPI1, WRAP53, XPO1, YY1AP1, and ZC3H14. In some embodiments, the antisense oligomer binds to a targeted portion of the NSAE pre-mRNA transcribed from the allele carrying a mutation, thereby modulating alternate splicing of NSAEs into the pre-mRNA, and causing an modulation in the level of mature mRNA encoding the functional target protein, and an modulation in the expression of the target protein in the cells of the subject. In related embodiments, the method is a method of using an ASO to modulate the expression of a functional protein or functional RNA. In some embodiments, an ASO is used to modulate the expression of the target protein in cells of a subject having a NSAE pre-mRNA encoding the target protein, wherein the subject has an abnormality in the amount or function of the target protein.

[0693] In some embodiments, the NSAE pre-mRNA transcript that encodes the protein that is causative of the disease or condition is targeted by the ASOs described herein. In some embodiments, a NSAE pre-mRNA transcript that encodes a protein that is not causative of the disease is targeted by the ASOs. For example, a disease that is the result of a mutation or deficiency of a first protein in a particular pathway may be ameliorated by targeting a NSAE containing pre-mRNA that encodes a second protein, thereby increasing production of the second protein. In some embodiments, the function of the second protein is able to compensate for the mutation or deficiency of the first protein (which is causative of the disease or condition).

[0694] In some embodiments, the subject has:
[0695] (a) a first mutant allele carrying a mutation from which the target protein is produced at a reduced level compared to production from a wild-type allele, and
[0696] (c) a second mutant allele from which
   [0697] (v) the target protein is produced at a reduced level compared to production from a wild-type allele due to the_mutation
   [0698] (vi) the target protein is produced at a reduced level compared to production from a wild-type allele,
   [0699] (vii) the target protein is produced in a form having reduced function compared to an equivalent wild-type protein, or
   [0700] (viii) the target protein is not produced, and
[0701] wherein the NSAE pre-mRNA is transcribed from the first allele and/or the second allele carrying the mutation and wherein the target is any one selected from the group consisting of ABCA5, ABCA7, ABCC3, ABCC5, ABCC8, ABCD1, ABR, ACAD9, ACAP1, ACOX2, ACSF3, ACTN4, ADAM17, ADAMTS13, AKR1E2, ALAD, ALG3, ANKRD29, ANKS3, ANO4, AP3B2, AP3M1, AP5Z1, ARNTL, ASAP3, ATRX, BBS2, BBS4, BRD9, CALM3, CARS1, CASP9, CATSPER1, CCDC40, CCDC88B, CD4, CD58, CES2, CHFR, CLCN2, CNOT3, CNTROB, COL5A3, CPSF1, CSPP1, CTF1, CTH, CYP3A5, DAB2IP, DBN1, DDX51, DEAF1, DGKE, DHDDS, DMKN, DNHD1, DOCK8, DOK5, EIF2B5, ELAC2, ELP1, ENTPD4, ESRRA, ESS2, ETAA1, ETHE1, FANCA, FASTK, FASTKD3, FPGS, FREM1, GAS8, GCK, GGA1, GGA3, GGT1, GLMN, GON4L, GRB14, HDAC3, HELQ, HP1BP3, HPS1, HPS4, IDUA, IFT122, IL17RC, IMPDH1, INVS, IRF3, KCTD3, KLKB1, KYAT1, LAMC3, LDAH, LIMS2, MALT1, MAP3K7, MAPK13, MCAT, MCEE, MPI, MSTO1, NBEAL2, NLE1, NLRC5, NOM1, NOP58, NPHP1, NPR1, NUP188, OSGEP, PABPC4, PCOLCE, PHKA2, PIDD1, PKD1, PLA2G6, PLD2, PLEKHG5, PNPO, POLE, PON2, PRMT7, PRODH, PRPF3, PRPF4, PYCR1, RAD52, REXO1, RFX5, RHBDF2, RMND1, ROBO3, RPGRIP1, RTTN, RUFY3, SEMA3B, SEMA3F, SH2D3A, SIK3, SIRT3, SKIV2L, SLC2A13, SLC12A7, SLC22A3, SLC25A13, SLC25A37, SLC27A5, SLC30A9, SLC30A10, SMPD1, SMTN, SNRPB, SP140, STAMBP, STXBP2, SULF2, SYNGAP1, SYNJ2, TAZ, TBL2, TDRD7, TECPR2, TFB1M, TM6SF1, TNK2, TOE1, TOR1B, TRAPPC6B, TRIP4, TRMT2A, TRMU, TRPV4, TTC19, TYMP, UMPS, UROD, WDR11, WDR62, WIPI1, WRAP53, XPO1, YY1AP1, and ZC3H14. In these embodiments, the ASO binds to a targeted portion of the NSAE pre-mRNA transcribed from the first allele or the second allele, thereby promoting exon inclusion from the NSAE pre-mRNA, and causing an increase in the level of full-length mRNA encoding the target protein and an increase in the expression of the target protein or functional RNA in the cells of the subject. In these embodiments, the target protein or functional RNA having an increase in expression level resulting from exon inclusion from the NSAE pre-mRNA has full function compared to the equivalent wild-type protein (fully-functional). In these embodiments, the ASO binds to a targeted portion of the NSAE pre-mRNA transcribed from the first allele or the second allele, thereby reducing exon inclusion from the NSAE pre-mRNA, and causing a decrease in the level of full-length mRNA encoding the target protein and a decrease in the expression of the target protein or functional RNA in the cells of the subject. In these embodiments, the target protein or functional RNA having a decrease in expression level resulting from exon exclusion from the NSAE pre-mRNA has full function compared to the equivalent wild-type protein (fully-functional).

[0702] In some embodiments, contacting cells with an ASO that is complementary to a targeted portion of a target pre-mRNA transcript results in an increase in the amount of the target protein produced by at least 10, 20, 30, 40, 50, 60, 80, 100, 150, 200, 250, 300, 350, 400, 450, 500, or 1000%, compared to the amount of the protein produced by a cell in the absence of the ASO/absence of treatment, wherein the target is any one selected from the group consisting of ABCA5, ABCA7, ABCC3, ABCC5, ABCC8, ABCD1, ABR, ACAD9, ACAP1, ACOX2, ACSF3, ACTN4, ADAM17, ADAMTS13, AKR1E2, ALAD, ALG3, ANKRD29, ANKS3, ANO4, AP3B2, AP3M1, AP5Z1, ARNTL, ASAP3, ATRX, BBS2, BBS4, BRD9, CALM3, CARS1, CASP9, CATSPER1, CCDC40, CCDC88B, CD4, CD58, CES2, CHFR, CLCN2, CNOT3, CNTROB, COL5A3, CPSF1, CSPP1, CTF1, CTH, CYP3A5, DAB2IP, DBN1, DDX51, DEAF1, DGKE, DHDDS, DMKN, DNHD1, DOCK8, DOK5, EIF2B5, ELAC2, ELP1, ENTPD4, ESRRA, ESS2, ETAA1, ETHE1, FANCA, FASTK, FASTKD3, FPGS, FREM1, GAS8, GCK, GGA1, GGA3, GGT1, GLMN, GON4L, GRB14, HDAC3, HELQ, HP1BP3, HPS1, HPS4, IDUA, IFT122, IL17RC, IMPDH1, INVS, IRF3, KCTD3, KLKB1, KYAT1, LAMC3, LDAH, LIMS2, MALT1, MAP3K7, MAPK13, MCAT, MCEE, MPI, MSTO1, NBEAL2, NLE1, NLRC5, NOM1, NOP58, NPHP1, NPR1, NUP188, OSGEP, PABPC4, PCOLCE, PHKA2, PIDD1, PKD1, PLA2G6, PLD2, PLEKHG5, PNPO, POLE, PON2, PRMT7, PRODH, PRPF3, PRPF4, PYCR1, RAD52, REXO1, RFX5, RHBDF2, RMND1, ROBO3, RPGRIP1, RTTN, RUFY3, SEMA3B, SEMA3F, SH2D3A, SIK3, SIRT3, SKIV2L, SLC2A13, SLC12A7, SLC22A3, SLC25A13, SLC25A37, SLC27A5, SLC30A9, SLC30A10, SMPD1, SMTN, SNRPB, SP140, STAMBP, STXBP2, SULF2, SYNGAP1, SYNJ2, TAZ, TBL2, TDRD7, TECPR2, TFB1M, TM6SF1, TNK2, TOE1, TOR1B, TRAPPC6B, TRIP4, TRMT2A, TRMU, TRPV4, TTC19, TYMP, UMPS, UROD, WDR11, WDR62, WIPI1, WRAP53, XPO1, YY1AP1, and ZC3H14. In some embodiments, the total amount of the target protein produced by the cell to which the antisense oligomer is contacted is increased about 20% to about 300%, about 50% to about 300%, about 100% to about 300%, about 150% to about 300%, about 20% to about 50%, about 20% to about 100%, about 20% to about 150%, about 20% to about 200%, about 20% to about 250%, about 50% to about 100%, about 50% to about 150%, about 50% to about 200%, about 50% to about 250%, about 100% to about 150%, about 100% to about 200%, about 100% to about 250%, about 150% to about 200%, about 150% to about 250%, about 200% to about 250%, at least about 10%, at least about 20%, at least about 50%, at least about 100%, at least about 150%, at least about 200%, at least about 250%, or at least about 300%, compared to the amount of target protein produced by a control compound. In some embodiments, the total amount of the target protein produced by the cell to which the antisense oligomer is contacted is increased about 1.1 to about 10-fold, about 1.5 to about 10-fold, about 2 to about 10-fold, about 3 to about 10-fold, about 4 to about 10-fold, about 1.1 to about 5-fold, about 1.1 to about 6-fold, about 1.1 to about 7-fold, about 1.1 to about 8-fold, about 1.1 to about 9-fold, about 2 to about 5-fold, about 2 to about 6-fold, about 2 to about 7-fold, about 2 to about 8-fold, about 2 to about 9-fold, about 3 to about 6-fold, about 3 to about 7-fold, about 3 to about 8-fold, about 3 to about 9-fold, about 4 to about 7-fold, about 4 to about 8-fold, about 4 to about 9-fold, at least about 1.1-fold, at least about 1.5-fold, at least about 2-fold, at least about 2.5-fold, at least about 3-fold, at least about 3.5-fold, at least about 4-fold, at least about 5-fold, or at least about 10-fold, compared to the amount of target protein produced by a control compound. A control compound can be, for example, an oligonucleotide that is not complementary to a targeted portion of the pre-mRNA.

[0703] In some embodiments, the level of mRNA encoding the target protein is increased 1.1 to 10-fold, when compared to the amount of mRNA encoding the target protein that is produced in a control cell, e.g., one that is not treated with the antisense oligomer or one that is treated with an antisense oligomer that does not bind to the targeted portion of the target containing pre-mRNA, wherein the target is any one selected from the group consisting of ABCA5, ABCA7, ABCC3, ABCC5, ABCC8, ABCD1, ABR, ACAD9, ACAP1, ACOX2, ACSF3, ACTN4, ADAM17, ADAMTS13, AKR1E2, ALAD, ALG3, ANKRD29, ANKS3, ANO4, AP3B2, AP3M1, AP5Z1, ARNTL, ASAP3, ATRX, BBS2, BBS4, BRD9, CALM3, CARS1, CASP9, CATSPER1, CCDC40, CCDC88B, CD4, CD58, CES2, CHFR, CLCN2, CNOT3, CNTROB, COL5A3, CPSF1, CSPP1, CTF1, CTH, CYP3A5, DAB2IP, DBN1, DDX51, DEAF1, DGKE, DHDDS, DMKN, DNHD1, DOCK8, DOK5, EIF2B5, ELAC2, ELP1, ENTPD4, ESRRA, ESS2, ETAA1, ETHE1, FANCA, FASTK, FASTKD3, FPGS, FREM1, GAS8, GCK, GGA1, GGA3, GGT1, GLMN, GON4L, GRB14, HDAC3, HELQ, HP1BP3, HPS1, HPS4, IDUA, IFT122, IL17RC, IMPDH1, INVS, IRF3, KCTD3, KLKB1, KYAT1, LAMC3, LDAH, LIMS2, MALT1, MAP3K7, MAPK13, MCAT, MCEE, MPI, MSTO1, NBEAL2, NLE1, NLRC5, NOM1, NOP58, NPHP1, NPR1, NUP188, OSGEP, PABPC4, PCOLCE, PHKA2, PIDD1, PKD1, PLA2G6, PLD2, PLEKHG5, PNPO, POLE, PON2, PRMT7, PRODH, PRPF3, PRPF4, PYCR1, RAD52, REXO1, RFX5, RHBDF2, RMND1, ROBO3, RPGRIP1, RTTN, RUFY3, SEMA3B, SEMA3F, SH2D3A, SIK3, SIRT3, SKIV2L, SLC2A13, SLC12A7, SLC22A3, SLC25A13, SLC25A37, SLC27A5, SLC30A9, SLC30A10, SMPD1, SMTN, SNRPB, SP140, STAMBP, STXBP2, SULF2, SYNGAP1, SYNJ2, TAZ, TBL2, TDRD7, TECPR2, TFB1M, TM6SF1, TNK2, TOE1, TOR1B, TRAPPC6B, TRIP4, TRMT2A, TRMU, TRPV4, TTC19, TYMP, UMPS, UROD, WDR11, WDR62, WIPI1, WRAP53, XPO1, YY1AP1, and ZC3H14. In some embodiments, the level of mRNA encoding the target protein is increased 1.1 to 10-fold, when compared to the amount of mRNA encoding the target protein that is produced in a control cell, e.g., one that is not treated with the antisense oligomer or one that is treated with an antisense oligomer that does not bind to the targeted portion of the target pre-mRNA.

[0704] In some embodiments of the present invention, a subject can have a mutation in the target gene, wherein the target is any one selected from the group consisting of ABCA5, ABCA7, ABCC3, ABCC5, ABCC8, ABCD1, ABR, ACAD9, ACAP1, ACOX2, ACSF3, ACTN4, ADAM17, ADAMTS13, AKR1E2, ALAD, ALG3, ANKRD29, ANKS3, ANO4, AP3B2, AP3M1, AP5Z1, ARNTL, ASAP3, ATRX, BBS2, BBS4, BRD9, CALM3, CARS1, CASP9, CATSPER1, CCDC40, CCDC88B, CD4, CD58, CES2, CHFR, CLCN2, CNOT3, CNTROB, COL5A3, CPSF1, CSPP1, CTF1, CTH, CYP3A5, DAB2IP, DBN1, DDX51, DEAF1, DGKE, DHDDS, DMKN, DNHD1, DOCK8, DOK5, EIF2B5, ELAC2, ELP1, ENTPD4, ESRRA, ESS2, ETAA1, ETHE1, FANCA, FASTK, FASTKD3, FPGS, FREM1, GAS8, GCK, GGA1, GGA3, GGT1, GLMN, GON4L, GRB14, HDAC3, HELQ, HP1BP3, HPS1, HPS4, IDUA, IFT122, IL17RC, IMPDH1, INVS, IRF3, KCTD3, KLKB1, KYAT1, LAMC3, LDAH, LIMS2, MALT1, MAP3K7, MAPK13, MCAT, MCEE, MPI, MSTO1, NBEAL2, NLE1, NLRC5, NOM1, NOP58, NPHP1, NPR1, NUP188, OSGEP, PABPC4, PCOLCE, PHKA2, PIDD1, PKD1, PLA2G6, PLD2, PLEKHG5, PNPO, POLE, PON2, PRMT7, PRODH, PRPF3, PRPF4, PYCR1, RAD52, REXO1, RFX5, RHBDF2, RMND1, ROBO3, RPGRIP1, RTTN, RUFY3, SEMA3B, SEMA3F, SH2D3A, SIK3, SIRT3, SKIV2L, SLC2A13, SLC12A7, SLC22A3, SLC25A13, SLC25A37, SLC27A5, SLC30A9, SLC30A10, SMPD1, SMTN, SNRPB, SP140, STAMBP, STXBP2, SULF2, SYNGAP1, SYNJ2, TAZ, TBL2, TDRD7, TECPR2, TFB1M, TM6SF1, TNK2, TOE1, TOR1B, TRAPPC6B, TRIP4, TRMT2A, TRMU, TRPV4, TTC19, TYMP, UMPS, UROD, WDR11, WDR62, WIPI1, WRAP53, XPO1, YY1AP1, and ZC3H14. A variety of pathogenic variants have been reported to cause the target deficiency, including missense variants, nonsense variants, single- and double-nucleotide insertions and deletions, complex insertion/deletions, and splice site variants. In some embodiments, disease results from loss of function of the target caused by the target pathogenic variants that generate truncated proteins or proteins with altered conformations or reduced activity.

[0705] In some embodiments, a subject having any mutation in the target gene known in the art and described as above can be treated using the methods and compositions described herein, wherein the target is any one selected from the group consisting of ABCA5, ABCA7, ABCC3, ABCC5, ABCC8, ABCD1, ABR, ACAD9, ACAP1, ACOX2, ACSF3, ACTN4, ADAM17, ADAMTS13, AKR1E2, ALAD, ALG3, ANKRD29, ANKS3, ANO4, AP3B2, AP3M1, AP5Z1, ARNTL, ASAP3, ATRX, BBS2, BBS4, BRD9, CALM3, CARS1, CASP9, CATSPER1, CCDC40, CCDC88B, CD4, CD58, CES2, CHFR, CLCN2, CNOT3, CNTROB, COL5A3, CPSF1, CSPP1, CTF1, CTH, CYP3A5, DAB2IP, DBN1, DDX51, DEAF1, DGKE, DHDDS, DMKN, DNHD1, DOCK8, DOK5, EIF2B5, ELAC2, ELP1, ENTPD4, ESRRA, ESS2, ETAA1, ETHE1, FANCA, FASTK, FASTKD3, FPGS, FREM1, GAS8, GCK, GGA1, GGA3, GGT1, GLMN, GON4L, GRB14, HDAC3, HELQ, HP1BP3, HPS1, HPS4, IDUA, IFT122, IL17RC, IMPDH1, INVS, IRF3, KCTD3, KLKB1, KYAT1, LAMC3, LDAH, LIMS2, MALT1, MAP3K7, MAPK13, MCAT, MCEE, MPI, MSTO1, NBEAL2, NLE1, NLRC5, NOM1, NOP58, NPHP1, NPR1, NUP188, OSGEP, PABPC4, PCOLCE, PHKA2, PIDD1, PKD1, PLA2G6, PLD2, PLEKHG5, PNPO, POLE, PON2, PRMT7, PRODH, PRPF3, PRPF4, PYCR1, RAD52, REXO1, RFX5, RHBDF2, RMND1, ROBO3, RPGRIP1, RTTN, RUFY3, SEMA3B, SEMA3F, SH2D3A, SIK3, SIRT3, SKIV2L, SLC2A13, SLC12A7, SLC22A3, SLC25A13, SLC25A37, SLC27A5, SLC30A9, SLC30A10, SMPD1, SMTN, SNRPB, SP140, STAMBP, STXBP2, SULF2, SYNGAP1, SYNJ2, TAZ, TBL2, TDRD7, TECPR2, TFB1M, TM6SF1, TNK2, TOE1, TOR1B, TRAPPC6B, TRIP4, TRMT2A, TRMU, TRPV4, TTC19, TYMP, UMPS, UROD, WDR11, WDR62, WIPI1, WRAP53, XPO1, YY1AP1, and ZC3H14. In some embodiments, the mutation is within any intron or exon in the target gene.

[0706] In some embodiments, contacting cells with an ASO that is complementary to a targeted portion of a target pre-mRNA transcript results in a decrease in the amount of the target protein produced by at least 10, 20, 30, 40, 50, 60, 80, 100, 150, 200, 250, 300, 350, 400, 450, 500, or 1000%, compared to the amount of the protein produced by a cell in the absence of the ASO/absence of treatment, wherein the target is any one selected from the group consisting of ABCA5, ABCA7, ABCC3, ABCC5, ABCC8, ABCD1, ABR, ACAD9, ACAP1, ACOX2, ACSF3, ACTN4, ADAM17, ADAMTS13, AKR1E2, ALAD, ALG3, ANKRD29, ANKS3, ANO4, AP3B2, AP3M1, AP5Z1, ARNTL, ASAP3, ATRX, BBS2, BBS4, BRD9, CALM3, CARS1, CASP9, CATSPER1, CCDC40, CCDC88B, CD4, CD58, CES2, CHFR, CLCN2, CNOT3, CNTROB, COL5A3, CPSF1, CSPP1, CTF1, CTH, CYP3A5, DAB2IP, DBN1, DDX51, DEAF1, DGKE, DHDDS, DMKN, DNHD1, DOCK8, DOK5, EIF2B5, ELAC2, ELP1, ENTPD4, ESRRA, ESS2, ETAA1, ETHE1, FANCA, FASTK, FASTKD3, FPGS, FREM1, GAS8, GCK, GGA1, GGA3, GGT1, GLMN, GON4L, GRB14, HDAC3, HELQ, HP1BP3, HPS1, HPS4, IDUA, IFT122, IL17RC, IMPDH1, INVS, IRF3, KCTD3, KLKB1, KYAT1, LAMC3, LDAH, LIMS2, MALT1, MAP3K7, MAPK13, MCAT, MCEE, MPI, MSTO1, NBEAL2, NLE1, NLRC5, NOM1, NOP58, NPHP1, NPR1, NUP188, OSGEP, PABPC4, PCOLCE, PHKA2, PIDD1, PKD1, PLA2G6, PLD2, PLEKHG5, PNPO, POLE, PON2, PRMT7, PRODH, PRPF3, PRPF4, PYCR1, RAD52, REXO1, RFX5, RHBDF2, RMND1, ROBO3, RPGRIP1, RTTN, RUFY3, SEMA3B, SEMA3F, SH2D3A, SIK3, SIRT3, SKIV2L, SLC2A13, SLC12A7, SLC22A3, SLC25A13, SLC25A37, SLC27A5, SLC30A9, SLC30A10, SMPD1, SMTN, SNRPB, SP140, STAMBP, STXBP2, SULF2, SYNGAP1, SYNJ2, TAZ, TBL2, TDRD7, TECPR2, TFB1M, TM6SF1, TNK2, TOE1, TOR1B, TRAPPC6B, TRIP4, TRMT2A, TRMU, TRPV4, TTC19, TYMP, UMPS, UROD, WDR11, WDR62, WIPI1, WRAP53, XPO1, YY1AP1, and ZC3H14. In some embodiments, the total amount of the target protein produced by the cell to which the antisense oligomer is contacted is decreased about 20% to about 300%, about 50% to about 300%, about 100% to about 300%, about 150% to about 300%, about 20% to about 50%, about 20% to about 100%, about 20% to about 150%, about 20% to about 200%, about 20% to about 250%, about 50% to about 100%, about 50% to about 150%, about 50% to about 200%, about 50% to about 250%, about 100% to about 150%, about 100% to about 200%, about 100% to about 250%, about 150% to about 200%, about 150% to about 250%, about 200% to about 250%, at least about 10%, at least about 20%, at least about 50%, at least about 100%, at least about 150%, at least about 200%, at least about 250%, or at least about 300%, compared to the amount of target protein produced by a control compound. In some embodiments, the total amount of the target protein produced by the cell to which the antisense oligomer is contacted is decreased about 1.1 to about 10-fold, about 1.5 to about 10-fold, about 2 to about 10-fold, about 3 to about 10-fold, about 4 to about 10-fold, about 1.1 to about 5-fold, about 1.1 to about 6-fold, about 1.1 to about 7-fold, about 1.1 to about 8-fold, about 1.1 to about 9-fold, about 2 to about 5-fold, about 2 to about 6-fold, about 2 to about 7-fold, about 2 to about 8-fold, about 2 to about 9-fold, about 3 to about 6-fold, about 3 to about 7-fold, about 3 to about 8-fold, about 3 to about 9-fold, about 4 to about 7-fold, about 4 to about 8-fold, about 4 to about 9-fold, at least about 1.1-fold, at least about 1.5-fold, at least about 2-fold, at least about 2.5-fold, at least about 3-fold, at least about 3.5-fold, at least about 4-fold, at least about 5-fold, or at least about 10-fold, compared to the amount of target protein produced by a control compound. A control compound can be, for example, an oligonucleotide that is not complementary to a targeted portion of the pre-mRNA.

[0707] In some embodiments, the level of mRNA encoding the target protein is decreased 1.1 to 10-fold, when compared to the amount of mRNA encoding the target protein that is produced in a control cell, e.g., one that is not treated with the antisense oligomer or one that is treated with an antisense oligomer that does not bind to the targeted portion of the target containing pre-mRNA, wherein the target is any one selected from the group consisting of ABCA5, ABCA7, ABCC3, ABCC5, ABCC8, ABCD1, ABR, ACAD9, ACAP1, ACOX2, ACSF3, ACTN4, ADAM17, ADAMTS13, AKR1E2, ALAD, ALG3, ANKRD29, ANKS3, ANO4, AP3B2, AP3M1, AP5Z1, ARNTL, ASAP3, ATRX, BBS2, BBS4, BRD9, CALM3, CARS1, CASP9, CATSPER1, CCDC40, CCDC88B, CD4, CD58, CES2, CHFR, CLCN2, CNOT3, CNTROB, COL5A3, CPSF1, CSPP1, CTF1, CTH, CYP3A5, DAB2IP, DBN1, DDX51, DEAF1, DGKE, DHDDS, DMKN, DNHD1, DOCK8, DOK5, EIF2B5, ELAC2, ELP1, ENTPD4, ESRRA, ESS2, ETAA1, ETHE1, FANCA, FASTK, FASTKD3, FPGS, FREM1, GAS8, GCK, GGA1, GGA3, GGT1, GLMN, GON4L, GRB14, HDAC3, HELQ, HP1BP3, HPS1, HPS4, IDUA, IFT122, IL17RC, IMPDH1, INVS, IRF3, KCTD3, KLKB1, KYAT1, LAMC3, LDAH, LIMS2, MALT1, MAP3K7, MAPK13, MCAT, MCEE, MPI, MSTO1, NBEAL2, NLE1, NLRC5, NOM1, NOP58, NPHP1, NPR1, NUP188, OSGEP, PABPC4, PCOLCE, PHKA2, PIDD1, PKD1, PLA2G6, PLD2, PLEKHG5, PNPO, POLE, PON2, PRMT7, PRODH, PRPF3, PRPF4, PYCR1, RAD52, REXO1, RFX5, RHBDF2, RMND1, ROBO3, RPGRIP1, RTTN, RUFY3, SEMA3B, SEMA3F, SH2D3A, SIK3, SIRT3, SKIV2L, SLC2A13, SLC12A7, SLC22A3, SLC25A13, SLC25A37, SLC27A5, SLC30A9, SLC30A10, SMPD1, SMTN, SNRPB, SP140, STAMBP, STXBP2, SULF2, SYNGAP1, SYNJ2, TAZ, TBL2, TDRD7, TECPR2, TFB1M, TM6SF1, TNK2, TOE1, TOR1B, TRAPPC6B, TRIP4, TRMT2A, TRMU, TRPV4, TTC19, TYMP, UMPS, UROD, WDR11, WDR62, WIPI1, WRAP53, XPO1, YY1AP1, and ZC3H14.

[0708] In some embodiments, the level of mRNA encoding the target protein is decreased 1.1 to 10-fold, when compared to the amount of mRNA encoding the target protein that is produced in a control cell, e.g., one that is not treated with the antisense oligomer or one that is treated with an antisense oligomer that does not bind to the targeted portion of the target pre-mRNA, wherein the target is any one selected from the group consisting of ABCA5, ABCA7, ABCC3, ABCC5, ABCC8, ABCD1, ABR, ACAD9, ACAP1, ACOX2, ACSF3, ACTN4, ADAM17, ADAMTS13, AKR1E2, ALAD, ALG3, ANKRD29, ANKS3, ANO4, AP3B2, AP3M1, AP5Z1, ARNTL, ASAP3, ATRX, BBS2, BBS4, BRD9, CALM3, CARS1, CASP9, CATSPER1, CCDC40, CCDC88B, CD4, CD58, CES2, CHFR, CLCN2, CNOT3, CNTROB, COL5A3, CPSF1, CSPP1, CTF1, CTH, CYP3A5, DAB2IP, DBN1, DDX51, DEAF1, DGKE, DHDDS, DMKN, DNHD1, DOCK8, DOK5, EIF2B5, ELAC2, ELP1, ENTPD4, ESRRA, ESS2, ETAA1, ETHE1, FANCA, FASTK, FASTKD3, FPGS, FREM1, GAS8, GCK, GGA1, GGA3, GGT1, GLMN, GON4L, GRB14, HDAC3, HELQ, HP1BP3, HPS1, HPS4, IDUA, IFT122, IL17RC, IMPDH1, INVS, IRF3, KCTD3, KLKB1, KYAT1, LAMC3, LDAH, LIMS2, MALT1, MAP3K7, MAPK13, MCAT, MCEE, MPI, MSTO1, NBEAL2, NLE1, NLRC5, NOM1, NOP58, NPHP1, NPR1, NUP188, OSGEP, PABPC4, PCOLCE, PHKA2, PIDD1, PKD1, PLA2G6, PLD2, PLEKHG5, PNPO, POLE, PON2, PRMT7, PRODH, PRPF3, PRPF4, PYCR1, RAD52, REXO1, RFX5, RHBDF2, RMND1, ROBO3, RPGRIP1, RTTN, RUFY3, SEMA3B, SEMA3F, SH2D3A, SIK3, SIRT3, SKIV2L, SLC2A13, SLC12A7, SLC22A3, SLC25A13, SLC25A37, SLC27A5, SLC30A9, SLC30A10, SMPD1, SMTN, SNRPB, SP140, STAMBP, STXBP2, SULF2, SYNGAP1, SYNJ2, TAZ, TBL2, TDRD7, TECPR2, TFB1M, TM6SF1, TNK2, TOE1, TOR1B, TRAPPC6B, TRIP4, TRMT2A, TRMU, TRPV4, TTC19, TYMP, UMPS, UROD, WDR11, WDR62, WIPI1, WRAP53, XPO1, YY1AP1, and ZC3H14.

[0709] In some embodiments of the present invention, a subject can have a mutation in the target gene, wherein the target is any one selected from the group consisting of ABCA5, ABCA7, ABCC3, ABCC5, ABCC8, ABCD1, ABR, ACAD9, ACAP1, ACOX2, ACSF3, ACTN4, ADAM17, ADAMTS13, AKR1E2, ALAD, ALG3, ANKRD29, ANKS3, ANO4, AP3B2, AP3M1, AP5Z1, ARNTL, ASAP3, ATRX, BBS2, BBS4, BRD9, CALM3, CARS1, CASP9, CATSPER1, CCDC40, CCDC88B, CD4, CD58, CES2, CHFR, CLCN2, CNOT3, CNTROB, COL5A3, CPSF1, CSPP1, CTF1, CTH, CYP3A5, DAB2IP, DBN1, DDX51, DEAF1, DGKE, DHDDS, DMKN, DNHD1, DOCK8, DOK5, EIF2B5, ELAC2, ELP1, ENTPD4, ESRRA, ESS2, ETAA1, ETHE1, FANCA, FASTK, FASTKD3, FPGS, FREM1, GAS8, GCK, GGA1, GGA3, GGT1, GLMN, GON4L, GRB14, HDAC3, HELQ, HP1BP3, HPS1, HPS4, IDUA, IFT122, IL17RC, IMPDH1, INVS, IRF3, KCTD3, KLKB1, KYAT1, LAMC3, LDAH, LIMS2, MALT1, MAP3K7, MAPK13, MCAT, MCEE, MPI, MSTO1, NBEAL2, NLE1, NLRC5, NOM1, NOP58, NPHP1, NPR1, NUP188, OSGEP, PABPC4, PCOLCE, PHKA2, PIDD1, PKD1, PLA2G6, PLD2, PLEKHG5, PNPO, POLE, PON2, PRMT7, PRODH, PRPF3, PRPF4, PYCR1, RAD52, REXO1, RFX5, RHBDF2, RMND1, ROBO3, RPGRIP1, RTTN, RUFY3, SEMA3B, SEMA3F, SH2D3A, SIK3, SIRT3, SKIV2L, SLC2A13, SLC12A7, SLC22A3, SLC25A13, SLC25A37, SLC27A5, SLC30A9, SLC30A10, SMPD1, SMTN, SNRPB, SP140, STAMBP, STXBP2, SULF2, SYNGAP1, SYNJ2, TAZ, TBL2, TDRD7, TECPR2, TFB1M, TM6SF1, TNK2, TOE1, TOR1B, TRAPPC6B, TRIP4, TRMT2A, TRMU, TRPV4, TTC19, TYMP, UMPS, UROD, WDR11, WDR62, WIPI1, WRAP53, XPO1, YY1AP1, and ZC3H14. A variety of pathogenic variants may cause the target protein overexpression, including missense variants, nonsense variants, single- and double-nucleotide insertions and deletions, complex insertion/deletions, and splice site variants. In some embodiments, disease results from an overexpression of function of the target protein caused by the pathogenic variants in the target that generate truncated proteins or proteins with altered conformations or increased activity.

[0710] In some embodiments, a subject having any mutation in the target gene known in the art and described as above can be treated using the methods and compositions described herein, wherein the target is any one selected from the group consisting of ABCA5, ABCA7, ABCC3, ABCC5, ABCC8, ABCD1, ABR, ACAD9, ACAP1, ACOX2, ACSF3, ACTN4, ADAM17, ADAMTS13, AKR1E2, ALAD, ALG3, ANKRD29, ANKS3, ANO4, AP3B2, AP3M1, AP5Z1, ARNTL, ASAP3, ATRX, BBS2, BBS4, BRD9, CALM3, CARS1, CASP9, CATSPER1, CCDC40, CCDC88B, CD4, CD58, CES2, CHFR, CLCN2, CNOT3, CNTROB, COL5A3, CPSF1, CSPP1, CTF1, CTH, CYP3A5, DAB2IP, DBN1, DDX51, DEAF1, DGKE, DHDDS, DMKN, DNHD1, DOCK8, DOK5, EIF2B5, ELAC2, ELP1, ENTPD4, ESRRA, ESS2, ETAA1, ETHE1, FANCA, FASTK, FASTKD3, FPGS, FREM1, GAS8, GCK, GGA1, GGA3, GGT1, GLMN, GON4L, GRB14, HDAC3, HELQ, HP1BP3, HPS1, HPS4, IDUA, IFT122, IL17RC, IMPDH1, INVS, IRF3, KCTD3, KLKB1, KYAT1, LAMC3, LDAH, LIMS2, MALT1, MAP3K7, MAPK13, MCAT, MCEE, MPI, MSTO1, NBEAL2, NLE1, NLRC5, NOM1, NOP58, NPHP1, NPR1, NUP188, OSGEP, PABPC4, PCOLCE, PHKA2, PIDD1, PKD1, PLA2G6, PLD2, PLEKHG5, PNPO, POLE, PON2, PRMT7, PRODH, PRPF3, PRPF4, PYCR1, RAD52, REXO1, RFX5, RHBDF2, RMND1, ROBO3, RPGRIP1, RTTN, RUFY3, SEMA3B, SEMA3F, SH2D3A, SIK3, SIRT3, SKIV2L, SLC2A13, SLC12A7, SLC22A3, SLC25A13, SLC25A37, SLC27A5, SLC30A9, SLC30A10, SMPD1, SMTN, SNRPB, SP140, STAMBP, STXBP2, SULF2, SYNGAP1, SYNJ2, TAZ, TBL2, TDRD7, TECPR2, TFB1M, TM6SF1, TNK2, TOE1, TOR1B, TRAPPC6B, TRIP4, TRMT2A, TRMU, TRPV4, TTC19, TYMP, UMPS, UROD, WDR11, WDR62, WIPI1, WRAP53, XPO1, YY1AP1, and ZC3H14. In some embodiments, the mutation is within any intron or exon in the target gene.

### Alternative Splicing

[0711] As used herein, a “non-sense mediated RNA decay alternative exon” (or “NSAE” or “NMD exon”) is an exon created from alternative splicing events that contains a premature stop codon or other sequences that facilitate degradation of the mRNA containing the of the instant exon. “NSAE pre-mRNA” is a pre-mRNA transcript that contains at least one non-sense mediated RNA decay alternative exon. Alternative or aberrant splicing of the pre-mRNA can result in the inclusion of at least one NSAE in the mature mRNA transcripts. The terms “mature mRNA,” “fully processed,” and “fully-spliced mRNA,” are used interchangeably herein to describe a fully processed mRNA. Inclusion of at least one NSAE can result in non-productive mRNA. Mature NSAE-containing mRNA may sometimes lead to aberrant protein expression. The term “canonical exon” refers to the exon that does not lead to non-sense mediated decay, or default exon, or exon that is not the product of alternative splicing. The term “canonical splicing” refers to a splicing process that results in the preservation of the canonical exon in the mature RNA.

[0712] A NSAE can be created as a result of splicing out additional basepairs.

[0713] The degree of alternative splicing can be expressed as percent alternative splicing, e.g., the percentage of transcripts in which a given NSAE is included. In brief, percent alternative splicing can be calculated as the percentage of the amount of RNA transcripts with the NSAE, over the sum of the average of the amount of RNA transcripts with a NSAE plus the average of the amount of RNA transcripts with only the canonical exons.

[0714] In some embodiments, a NSAE is an exon that is identified as a NSAE based on a determination of at least about 5%, at least about 10%, at least about 15%, at least about 20%, at least about 25%, at least about 30%, at least about 35%, at least about 40%, at least about 45%, or at least about 50%, exclusion from the RNA transcript. In some embodiments, a NSAE is an exon that is identified as a NSAE based on a determination of about 5% to about 100%, about 5% to about 95%, about 5% to about 90%, about 5% to about 85%, about 5% to about 80%, about 5% to about 75%, about 5% to about 70%, about 5% to about 65%, about 5% to about 60%, about 5% to about 55%, about 5% to about 50%, about 5% to about 45%, about 5% to about 40%, about 5% to about 35%, about 5% to about 30%, about 5% to about 25%, about 5% to about 20%, about 5% to about 15%, about 10% to about 100%, about 10% to about 95%, about 10% to about 90%, about 10% to about 85%, about 10% to about 80%, about 10% to about 75%, about 10% to about 70%, about 10% to about 65%, about 10% to about 60%, about 10% to about 55%, about 10% to about 50%, about 10% to about 45%, about 10% to about 40%, about 10% to about 35%, about 10% to about 30%, about 10% to about 25%, about 10% to about 20%, about 15% to about 100%, about 15% to about 95%, about 15% to about 90%, about 15% to about 85%, about 15% to about 80%, about 15% to about 75%, about 15% to about 70%, about 15% to about 65%, about 15% to about 60%, about 15% to about 55%, about 15% to about 50%, about 15% to about 45%, about 15% to about 40%, about 15% to about 35%, about 15% to about 30%, about 15% to about 25%, about 20% to about 100%, about 20% to about 95%, about 20% to about 90%, about 20% to about 85%, about 20% to about 80%, about 20% to about 75%, about 20% to about 70%, about 20% to about 65%, about 20% to about 60%, about 20% to about 55%, about 20% to about 50%, about 20% to about 45%, about 20% to about 40%, about 20% to about 35%, about 20% to about 30%, about 25% to about 100%, about 25% to about 95%, about 25% to about 90%, about 25% to about 85%, about 25% to about 80%, about 25% to about 75%, about 25% to about 70%, about 25% to about 65%, about 25% to about 60%, about 25% to about 55%, about 25% to about 50%, about 25% to about 45%, about 25% to about 40%, or about 25% to about 35%, exclusion from the RNA transcript. ENCODE data (described by, e.g., Tilgner, et al., 2012, “Deep sequencing of subcellular RNA fractions shows splicing to be predominantly co-transcriptional in the human genome but inefficient for lncRNAs,” Genome Research 22(9):1616-25) can be used to aid in identifying NSAE's created from alternative splicing events.

[0715] In some embodiments, contacting cells with an ASO that is complementary to a targeted portion of a SYNGAP1 pre-mRNA transcript results in an increase in the amount of SYNGAP1 protein produced by at least 10, 20, 30, 40, 50, 60, 80, 100, 150, 200, 250, 300, 350, 400, 450, 500, or 1000%, compared to the amount of the protein produced by a cell in the absence of the ASO/absence of treatment. In some embodiments, the total amount of SYNGAP1 protein produced by the cell to which the antisense oligomer is contacted is increased about 20% to about 300%, about 50% to about 300%, about 100% to about 300%, about 150% to about 300%, about 20% to about 50%, about 20% to about 100%, about 20% to about 150%, about 20% to about 200%, about 20% to about 250%, about 50% to about 100%, about 50% to about 150%, about 50% to about 200%, about 50% to about 250%, about 100% to about 150%, about 100% to about 200%, about 100% to about 250%, about 150% to about 200%, about 150% to about 250%, about 200% to about 250%, at least about 10%, at least about 20%, at least about 50%, at least about 100%, at least about 150%, at least about 200%, at least about 250%, or at least about 300%, compared to the amount of target protein produced by a control compound. In some embodiments, the total amount of SYNGAP1 protein produced by the cell to which the antisense oligomer is contacted is increased about 1.1 to about 10-fold, about 1.5 to about 10-fold, about 2 to about 10-fold, about 3 to about 10-fold, about 4 to about 10-fold, about 1.1 to about 5-fold, about 1.1 to about 6-fold, about 1.1 to about 7-fold, about 1.1 to about 8-fold, about 1.1 to about 9-fold, about 2 to about 5-fold, about 2 to about 6-fold, about 2 to about 7-fold, about 2 to about 8-fold, about 2 to about 9-fold, about 3 to about 6-fold, about 3 to about 7-fold, about 3 to about 8-fold, about 3 to about 9-fold, about 4 to about 7-fold, about 4 to about 8-fold, about 4 to about 9-fold, at least about 1.1-fold, at least about 1.5-fold, at least about 2-fold, at least about 2.5-fold, at least about 3-fold, at least about 3.5-fold, at least about 4-fold, at least about 5-fold, or at least about 10-fold, compared to the amount of target protein produced by a control compound. A control compound can be, for example, an oligonucleotide that is not complementary to a targeted portion of the pre-mRNA.

[0716] In some embodiments, contacting cells with an ASO that is complementary to a targeted portion of a SYNGAP1 pre-mRNA transcript results in a decrease in the amount of SYNGAP1 protein produced by at least 10, 20, 30, 40, 50, 60, 80, 100, 150, 200, 250, 300, 350, 400, 450, 500, or 1000%, compared to the amount of the protein produced by a cell in the absence of the ASO/absence of treatment. In some embodiments, the mutation is within any intron or exon in the target gene. In some embodiments, the total amount of SYNGAP1 protein produced by the cell to which the antisense oligomer is contacted is decreased about 20% to about 300%, about 50% to about 300%, about 100% to about 300%, about 150% to about 300%, about 20% to about 50%, about 20% to about 100%, about 20% to about 150%, about 20% to about 200%, about 20% to about 250%, about 50% to about 100%, about 50% to about 150%, about 50% to about 200%, about 50% to about 250%, about 100% to about 150%, about 100% to about 200%, about 100% to about 250%, about 150% to about 200%, about 150% to about 250%, about 200% to about 250%, at least about 10%, at least about 20%, at least about 50%, at least about 100%, at least about 150%, at least about 200%, at least about 250%, or at least about 300%, compared to the amount of target protein produced by a control compound. In some embodiments, the total amount of SYNGAP1 protein produced by the cell to which the antisense oligomer is contacted is decreased about 1.1 to about 10-fold, about 1.5 to about 10-fold, about 2 to about 10-fold, about 3 to about 10-fold, about 4 to about 10-fold, about 1.1 to about 5-fold, about 1.1 to about 6-fold, about 1.1 to about 7-fold, about 1.1 to about 8-fold, about 1.1 to about 9-fold, about 2 to about 5-fold, about 2 to about 6-fold, about 2 to about 7-fold, about 2 to about 8-fold, about 2 to about 9-fold, about 3 to about 6-fold, about 3 to about 7-fold, about 3 to about 8-fold, about 3 to about 9-fold, about 4 to about 7-fold, about 4 to about 8-fold, about 4 to about 9-fold, at least about 1.1-fold, at least about 1.5-fold, at least about 2-fold, at least about 2.5-fold, at least about 3-fold, at least about 3.5-fold, at least about 4-fold, at least about 5-fold, or at least about 10-fold, compared to the amount of target protein produced by a control compound. A control compound can be, for example, an oligonucleotide that is not complementary to a targeted portion of the pre-mRNA.

[0717] In some embodiments, contacting cells with an ASO that is complementary to a targeted portion of a SYNGAP1 pre-mRNA transcript results in an increase in the amount of mRNA encoding SYNGAP1, including the mature mRNA encoding the target protein. In some embodiments, the amount of mRNA encoding SYNGAP1 protein, or the mature mRNA encoding the SYNGAP1 protein, is increased by at least 10, 20, 30, 40, 50, 60, 80, 100, 150, 200, 250, 300, 350, 400, 450, 500, or 1000%, compared to the amount of the protein produced by a cell in the absence of the ASO/absence of treatment. In some embodiments, the total amount of the mRNA encoding SYNGAP1 protein, or the mature mRNA encoding SYNGAP1 protein produced in the cell to which the antisense oligomer is contacted is increased about 20% to about 300%, about 50% to about 300%, about 100% to about 300%, about 150% to about 300%, about 20% to about 50%, about 20% to about 100%, about 20% to about 150%, about 20% to about 200%, about 20% to about 250%, about 50% to about 100%, about 50% to about 150%, about 50% to about 200%, about 50% to about 250%, about 100% to about 150%, about 100% to about 200%, about 100% to about 250%, about 150% to about 200%, about 150% to about 250%, about 200% to about 250%, at least about 10%, at least about 20%, at least about 50%, at least about 100%, at least about 150%, at least about 200%, at least about 250%, or at least about 300%, compared to the amount of mature RNA produced in an untreated cell, e.g., an untreated cell or a cell treated with a control compound. In some embodiments, the total amount of the mRNA encoding SYNGAP1 protein, or the mature mRNA encoding SYNGAP1 protein produced in the cell to which the antisense oligomer is contacted is increased about 1.1 to about 10-fold, about 1.5 to about 10-fold, about 2 to about 10-fold, about 3 to about 10-fold, about 4 to about 10-fold, about 1.1 to about 5-fold, about 1.1 to about 6-fold, about 1.1 to about 7-fold, about 1.1 to about 8-fold, about 1.1 to about 9-fold, about 2 to about 5-fold, about 2 to about 6-fold, about 2 to about 7-fold, about 2 to about 8-fold, about 2 to about 9-fold, about 3 to about 6-fold, about 3 to about 7-fold, about 3 to about 8-fold, about 3 to about 9-fold, about 4 to about 7-fold, about 4 to about 8-fold, about 4 to about 9-fold, at least about 1.1-fold, at least about 1.5-fold, at least about 2-fold, at least about 2.5-fold, at least about 3-fold, at least about 3.5-fold, at least about 4-fold, at least about 5-fold, or at least about 10-fold compared to the amount of mature RNA produced in an untreated cell, e.g., an untreated cell or a cell treated with a control compound. A control compound can be, for example, an oligonucleotide that is not complementary to a targeted portion of the SYNGAP1 pre-mRNA.

[0718] In some embodiments, contacting cells with an ASO that is complementary to a targeted portion of a SYNGAP1 pre-mRNA transcript results in a decrease in the amount of mRNA encoding SYNGAP1, including the mature mRNA encoding the target protein. In some embodiments, the mutation is within any intron or exon in the target gene. In some embodiments, the amount of mRNA encoding SYNGAP1 protein, or the mature mRNA encoding the SYNGAP1 protein, is decreased by at least 10, 20, 30, 40, 50, 60, 80, 100, 150, 200, 250, 300, 350, 400, 450, 500, or 1000%, compared to the amount of the protein produced by a cell in the absence of the ASO/absence of treatment. In some embodiments, the total amount of the mRNA encoding SYNGAP1 protein, or the mature mRNA encoding SYNGAP1 protein produced in the cell to which the antisense oligomer is contacted is decreased about 20% to about 300%, about 50% to about 300%, about 100% to about 300%, about 150% to about 300%, about 20% to about 50%, about 20% to about 100%, about 20% to about 150%, about 20% to about 200%, about 20% to about 250%, about 50% to about 100%, about 50% to about 150%, about 50% to about 200%, about 50% to about 250%, about 100% to about 150%, about 100% to about 200%, about 100% to about 250%, about 150% to about 200%, about 150% to about 250%, about 200% to about 250%, at least about 10%, at least about 20%, at least about 50%, at least about 100%, at least about 150%, at least about 200%, at least about 250%, or at least about 300%, compared to the amount of mature RNA produced in an untreated cell, e.g., an untreated cell or a cell treated with a control compound. In some embodiments, the total amount of the mRNA encoding SYNGAP1 protein, or the mature mRNA encoding SYNGAP1 protein produced in the cell to which the antisense oligomer is contacted is decreased about 1.1 to about 10-fold, about 1.5 to about 10-fold, about 2 to about 10-fold, about 3 to about 10-fold, about 4 to about 10-fold, about 1.1 to about 5-fold, about 1.1 to about 6-fold, about 1.1 to about 7-fold, about 1.1 to about 8-fold, about 1.1 to about 9-fold, about 2 to about 5-fold, about 2 to about 6-fold, about 2 to about 7-fold, about 2 to about 8-fold, about 2 to about 9-fold, about 3 to about 6-fold, about 3 to about 7-fold, about 3 to about 8-fold, about 3 to about 9-fold, about 4 to about 7-fold, about 4 to about 8-fold, about 4 to about 9-fold, at least about 1.1-fold, at least about 1.5-fold, at least about 2-fold, at least about 2.5-fold, at least about 3-fold, at least about 3.5-fold, at least about 4-fold, at least about 5-fold, or at least about 10-fold compared to the amount of mature RNA produced in an untreated cell, e.g., an untreated cell or a cell treated with a control compound. A control compound can be, for example, an oligonucleotide that is not complementary to a targeted portion of the SYNGAP1 pre-mRNA.

[0719] In some embodiments, contacting cells with an ASO that is complementary to a targeted portion of a target pre-mRNA transcript results in an increase in the amount of the target protein produced by at least 10, 20, 30, 40, 50, 60, 80, 100, 150, 200, 250, 300, 350, 400, 450, 500, or 1000%, compared to the amount of the protein produced by a cell in the absence of the ASO/absence of treatment, wherein the target is any one selected from the group consisting of ABCA5, ABCA7, ABCC3, ABCC5, ABCC8, ABCD1, ABR, ACAD9, ACAP1, ACOX2, ACSF3, ACTN4, ADAM17, ADAMTS13, AKR1E2, ALAD, ALG3, ANKRD29, ANKS3, ANO4, AP3B2, AP3M1, AP5Z1, ARNTL, ASAP3, ATRX, BBS2, BBS4, BRD9, CALM3, CARS1, CASP9, CATSPER1, CCDC40, CCDC88B, CD4, CD58, CES2, CHFR, CLCN2, CNOT3, CNTROB, COL5A3, CPSF1, CSPP1, CTF1, CTH, CYP3A5, DAB2IP, DBN1, DDX51, DEAF1, DGKE, DHDDS, DMKN, DNHD1, DOCK8, DOK5, EIF2B5, ELAC2, ELP1, ENTPD4, ESRRA, ESS2, ETAA1, ETHE1, FANCA, FASTK, FASTKD3, FPGS, FREM1, GAS8, GCK, GGA1, GGA3, GGT1, GLMN, GON4L, GRB14, HDAC3, HELQ, HP1BP3, HPS1, HPS4, IDUA, IFT122, IL17RC, IMPDH1, INVS, IRF3, KCTD3, KLKB1, KYAT1, LAMC3, LDAH, LIMS2, MALT1, MAP3K7, MAPK13, MCAT, MCEE, MPI, MSTO1, NBEAL2, NLE1, NLRC5, NOM1, NOP58, NPHP1, NPR1, NUP188, OSGEP, PABPC4, PCOLCE, PHKA2, PIDD1, PKD1, PLA2G6, PLD2, PLEKHG5, PNPO, POLE, PON2, PRMT7, PRODH, PRPF3, PRPF4, PYCR1, RAD52, REXO1, RFX5, RHBDF2, RMND1, ROBO3, RPGRIP1, RTTN, RUFY3, SEMA3B, SEMA3F, SH2D3A, SIK3, SIRT3, SKIV2L, SLC2A13, SLC12A7, SLC22A3, SLC25A13, SLC25A37, SLC27A5, SLC30A9, SLC30A10, SMPD1, SMTN, SNRPB, SP140, STAMBP, STXBP2, SULF2, SYNGAP1, SYNJ2, TAZ, TBL2, TDRD7, TECPR2, TFB1M, TM6SF1, TNK2, TOE1, TOR1B, TRAPPC6B, TRIP4, TRMT2A, TRMU, TRPV4, TTC19, TYMP, UMPS, UROD, WDR11, WDR62, WIPI1, WRAP53, XPO1, YY1AP1, and ZC3H14. In some embodiments, the mutation is within any intron or exon in the target gene. In some embodiments, the total amount of the target protein produced by the cell to which the antisense oligomer is contacted is increased about 20% to about 300%, about 50% to about 300%, about 100% to about 300%, about 150% to about 300%, about 20% to about 50%, about 20% to about 100%, about 20% to about 150%, about 20% to about 200%, about 20% to about 250%, about 50% to about 100%, about 50% to about 150%, about 50% to about 200%, about 50% to about 250%, about 100% to about 150%, about 100% to about 200%, about 100% to about 250%, about 150% to about 200%, about 150% to about 250%, about 200% to about 250%, at least about 10%, at least about 20%, at least about 50%, at least about 100%, at least about 150%, at least about 200%, at least about 250%, or at least about 300%, compared to the amount of target protein produced by a control compound. In some embodiments, the total amount of the target protein produced by the cell to which the antisense oligomer is contacted is increased about 1.1 to about 10-fold, about 1.5 to about 10-fold, about 2 to about 10-fold, about 3 to about 10-fold, about 4 to about 10-fold, about 1.1 to about 5-fold, about 1.1 to about 6-fold, about 1.1 to about 7-fold, about 1.1 to about 8-fold, about 1.1 to about 9-fold, about 2 to about 5-fold, about 2 to about 6-fold, about 2 to about 7-fold, about 2 to about 8-fold, about 2 to about 9-fold, about 3 to about 6-fold, about 3 to about 7-fold, about 3 to about 8-fold, about 3 to about 9-fold, about 4 to about 7-fold, about 4 to about 8-fold, about 4 to about 9-fold, at least about 1.1-fold, at least about 1.5-fold, at least about 2-fold, at least about 2.5-fold, at least about 3-fold, at least about 3.5-fold, at least about 4-fold, at least about 5-fold, or at least about 10-fold, compared to the amount of target protein produced by a control compound. A control compound can be, for example, an oligonucleotide that is not complementary to a targeted portion of the pre-mRNA.

[0720] In some embodiments, contacting cells with an ASO that is complementary to a targeted portion of a target pre-mRNA transcript results in a decrease in the amount of the target protein produced by at least 10, 20, 30, 40, 50, 60, 80, 100, 150, 200, 250, 300, 350, 400, 450, 500, or 1000%, compared to the amount of the protein produced by a cell in the absence of the ASO/absence of treatment, wherein the target is any one selected from the group consisting of ABCA5, ABCA7, ABCC3, ABCC5, ABCC8, ABCD1, ABR, ACAD9, ACAP1, ACOX2, ACSF3, ACTN4, ADAM17, ADAMTS13, AKR1E2, ALAD, ALG3, ANKRD29, ANKS3, ANO4, AP3B2, AP3M1, AP5Z1, ARNTL, ASAP3, ATRX, BBS2, BBS4, BRD9, CALM3, CARS1, CASP9, CATSPER1, CCDC40, CCDC88B, CD4, CD58, CES2, CHFR, CLCN2, CNOT3, CNTROB, COL5A3, CPSF1, CSPP1, CTF1, CTH, CYP3A5, DAB2IP, DBN1, DDX51, DEAF1, DGKE, DHDDS, DMKN, DNHD1, DOCK8, DOK5, EIF2B5, ELAC2, ELP1, ENTPD4, ESRRA, ESS2, ETAA1, ETHE1, FANCA, FASTK, FASTKD3, FPGS, FREM1, GAS8, GCK, GGA1, GGA3, GGT1, GLMN, GON4L, GRB14, HDAC3, HELQ, HP1BP3, HPS1, HPS4, IDUA, IFT122, IL17RC, IMPDH1, INVS, IRF3, KCTD3, KLKB1, KYAT1, LAMC3, LDAH, LIMS2, MALT1, MAP3K7, MAPK13, MCAT, MCEE, MPI, MSTO1, NBEAL2, NLE1, NLRC5, NOM1, NOP58, NPHP1, NPR1, NUP188, OSGEP, PABPC4, PCOLCE, PHKA2, PIDD1, PKD1, PLA2G6, PLD2, PLEKHG5, PNPO, POLE, PON2, PRMT7, PRODH, PRPF3, PRPF4, PYCR1, RAD52, REXO1, RFX5, RHBDF2, RMND1, ROBO3, RPGRIP1, RTTN, RUFY3, SEMA3B, SEMA3F, SH2D3A, SIK3, SIRT3, SKIV2L, SLC2A13, SLC12A7, SLC22A3, SLC25A13, SLC25A37, SLC27A5, SLC30A9, SLC30A10, SMPD1, SMTN, SNRPB, SP140, STAMBP, STXBP2, SULF2, SYNGAP1, SYNJ2, TAZ, TBL2, TDRD7, TECPR2, TFB1M, TM6SF1, TNK2, TOE1, TOR1B, TRAPPC6B, TRIP4, TRMT2A, TRMU, TRPV4, TTC19, TYMP, UMPS, UROD, WDR11, WDR62, WIPI1, WRAP53, XPO1, YY1AP1, and ZC3H14. In some embodiments, the mutation is within any intron or exon in the target gene. In some embodiments, the total amount of the target protein produced by the cell to which the antisense oligomer is contacted is decreased about 20% to about 300%, about 50% to about 300%, about 100% to about 300%, about 150% to about 300%, about 20% to about 50%, about 20% to about 100%, about 20% to about 150%, about 20% to about 200%, about 20% to about 250%, about 50% to about 100%, about 50% to about 150%, about 50% to about 200%, about 50% to about 250%, about 100% to about 150%, about 100% to about 200%, about 100% to about 250%, about 150% to about 200%, about 150% to about 250%, about 200% to about 250%, at least about 10%, at least about 20%, at least about 50%, at least about 100%, at least about 150%, at least about 200%, at least about 250%, or at least about 300%, compared to the amount of target protein produced by a control compound. In some embodiments, the total amount of the target protein produced by the cell to which the antisense oligomer is contacted is decreased about 1.1 to about 10-fold, about 1.5 to about 10-fold, about 2 to about 10-fold, about 3 to about 10-fold, about 4 to about 10-fold, about 1.1 to about 5-fold, about 1.1 to about 6-fold, about 1.1 to about 7-fold, about 1.1 to about 8-fold, about 1.1 to about 9-fold, about 2 to about 5-fold, about 2 to about 6-fold, about 2 to about 7-fold, about 2 to about 8-fold, about 2 to about 9-fold, about 3 to about 6-fold, about 3 to about 7-fold, about 3 to about 8-fold, about 3 to about 9-fold, about 4 to about 7-fold, about 4 to about 8-fold, about 4 to about 9-fold, at least about 1.1-fold, at least about 1.5-fold, at least about 2-fold, at least about 2.5-fold, at least about 3-fold, at least about 3.5-fold, at least about 4-fold, at least about 5-fold, or at least about 10-fold, compared to the amount of target protein produced by a control compound. A control compound can be, for example, an oligonucleotide that is not complementary to a targeted portion of the pre-mRNA.

[0721] In some embodiments, contacting cells with an ASO that is complementary to a targeted portion of a target pre-mRNA transcript results in an increase in the amount of mRNA encoding the target protein, including the mature mRNA encoding the target protein, wherein the target is any one selected from the group consisting of ABCA5, ABCA7, ABCC3, ABCC5, ABCC8, ABCD1, ABR, ACAD9, ACAP1, ACOX2, ACSF3, ACTN4, ADAM17, ADAMTS13, AKR1E2, ALAD, ALG3, ANKRD29, ANKS3, ANO4, AP3B2, AP3M1, AP5Z1, ARNTL, ASAP3, ATRX, BBS2, BBS4, BRD9, CALM3, CARS1, CASP9, CATSPER1, CCDC40, CCDC88B, CD4, CD58, CES2, CHFR, CLCN2, CNOT3, CNTROB, COL5A3, CPSF1, CSPP1, CTF1, CTH, CYP3A5, DAB2IP, DBN1, DDX51, DEAF1, DGKE, DHDDS, DMKN, DNHD1, DOCK8, DOK5, EIF2B5, ELAC2, ELP1, ENTPD4, ESRRA, ESS2, ETAA1, ETHE1, FANCA, FASTK, FASTKD3, FPGS, FREM1, GAS8, GCK, GGA1, GGA3, GGT1, GLMN, GON4L, GRB14, HDAC3, HELQ, HP1BP3, HPS1, HPS4, IDUA, IFT122, IL17RC, IMPDH1, INVS, IRF3, KCTD3, KLKB1, KYAT1, LAMC3, LDAH, LIMS2, MALT1, MAP3K7, MAPK13, MCAT, MCEE, MPI, MSTO1, NBEAL2, NLE1, NLRC5, NOM1, NOP58, NPHP1, NPR1, NUP188, OSGEP, PABPC4, PCOLCE, PHKA2, PIDD1, PKD1, PLA2G6, PLD2, PLEKHG5, PNPO, POLE, PON2, PRMT7, PRODH, PRPF3, PRPF4, PYCR1, RAD52, REXO1, RFX5, RHBDF2, RMND1, ROBO3, RPGRIP1, RTTN, RUFY3, SEMA3B, SEMA3F, SH2D3A, SIK3, SIRT3, SKIV2L, SLC2A13, SLC12A7, SLC22A3, SLC25A13, SLC25A37, SLC27A5, SLC30A9, SLC30A10, SMPD1, SMTN, SNRPB, SP140, STAMBP, STXBP2, SULF2, SYNGAP1, SYNJ2, TAZ, TBL2, TDRD7, TECPR2, TFB1M, TM6SF1, TNK2, TOE1, TOR1B, TRAPPC6B, TRIP4, TRMT2A, TRMU, TRPV4, TTC19, TYMP, UMPS, UROD, WDR11, WDR62, WIPI1, WRAP53, XPO1, YY1AP1, and ZC3H14. In some embodiments, the mutation is within any intron or exon in the target gene. In some embodiments, the amount of mRNA encoding the target protein, or the mature mRNA encoding the target protein, is increased by at least 10, 20, 30, 40, 50, 60, 80, 100, 150, 200, 250, 300, 350, 400, 450, 500, or 1000%, compared to the amount of the protein produced by a cell in the absence of the ASO/absence of treatment. In some embodiments, the total amount of the mRNA encoding the target protein, or the mature mRNA encoding the target protein produced in the cell to which the antisense oligomer is contacted is increased about 20% to about 300%, about 50% to about 300%, about 100% to about 300%, about 150% to about 300%, about 20% to about 50%, about 20% to about 100%, about 20% to about 150%, about 20% to about 200%, about 20% to about 250%, about 50% to about 100%, about 50% to about 150%, about 50% to about 200%, about 50% to about 250%, about 100% to about 150%, about 100% to about 200%, about 100% to about 250%, about 150% to about 200%, about 150% to about 250%, about 200% to about 250%, at least about 10%, at least about 20%, at least about 50%, at least about 100%, at least about 150%, at least about 200%, at least about 250%, or at least about 300%, compared to the amount of mature RNA produced in an untreated cell, e.g., an untreated cell or a cell treated with a control compound. In some embodiments, the total amount of the mRNA encoding the target protein, or the mature mRNA encoding the target protein produced in the cell to which the antisense oligomer is contacted is increased about 1.1 to about 10-fold, about 1.5 to about 10-fold, about 2 to about 10-fold, about 3 to about 10-fold, about 4 to about 10-fold, about 1.1 to about 5-fold, about 1.1 to about 6-fold, about 1.1 to about 7-fold, about 1.1 to about 8-fold, about 1.1 to about 9-fold, about 2 to about 5-fold, about 2 to about 6-fold, about 2 to about 7-fold, about 2 to about 8-fold, about 2 to about 9-fold, about 3 to about 6-fold, about 3 to about 7-fold, about 3 to about 8-fold, about 3 to about 9-fold, about 4 to about 7-fold, about 4 to about 8-fold, about 4 to about 9-fold, at least about 1.1-fold, at least about 1.5-fold, at least about 2-fold, at least about 2.5-fold, at least about 3-fold, at least about 3.5-fold, at least about 4-fold, at least about 5-fold, or at least about 10-fold compared to the amount of mature RNA produced in an untreated cell, e.g., an untreated cell or a cell treated with a control compound. A control compound can be, for example, an oligonucleotide that is not complementary to a targeted portion of the target pre-mRNA.

[0722] In some embodiments, contacting cells with an ASO that is complementary to a targeted portion of a target pre-mRNA transcript results in a decrease in the amount of mRNA encoding the target protein, including the mature mRNA encoding the target protein, wherein the target is any one selected from the group consisting of ABCA5, ABCA7, ABCC3, ABCC5, ABCC8, ABCD1, ABR, ACAD9, ACAP1, ACOX2, ACSF3, ACTN4, ADAM17, ADAMTS13, AKR1E2, ALAD, ALG3, ANKRD29, ANKS3, ANO4, AP3B2, AP3M1, AP5Z1, ARNTL, ASAP3, ATRX, BBS2, BBS4, BRD9, CALM3, CARS1, CASP9, CATSPER1, CCDC40, CCDC88B, CD4, CD58, CES2, CHFR, CLCN2, CNOT3, CNTROB, COL5A3, CPSF1, CSPP1, CTF1, CTH, CYP3A5, DAB2IP, DBN1, DDX51, DEAF1, DGKE, DHDDS, DMKN, DNHD1, DOCK8, DOK5, EIF2B5, ELAC2, ELP1, ENTPD4, ESRRA, ESS2, ETAA1, ETHE1, FANCA, FASTK, FASTKD3, FPGS, FREM1, GAS8, GCK, GGA1, GGA3, GGT1, GLMN, GON4L, GRB14, HDAC3, HELQ, HP1BP3, HPS1, HPS4, IDUA, IFT122, IL17RC, IMPDH1, INVS, IRF3, KCTD3, KLKB1, KYAT1, LAMC3, LDAH, LIMS2, MALT1, MAP3K7, MAPK13, MCAT, MCEE, MPI, MSTO1, NBEAL2, NLE1, NLRC5, NOM1, NOP58, NPHP1, NPR1, NUP188, OSGEP, PABPC4, PCOLCE, PHKA2, PIDD1, PKD1, PLA2G6, PLD2, PLEKHG5, PNPO, POLE, PON2, PRMT7, PRODH, PRPF3, PRPF4, PYCR1, RAD52, REXO1, RFX5, RHBDF2, RMND1, ROBO3, RPGRIP1, RTTN, RUFY3, SEMA3B, SEMA3F, SH2D3A, SIK3, SIRT3, SKIV2L, SLC2A13, SLC12A7, SLC22A3, SLC25A13, SLC25A37, SLC27A5, SLC30A9, SLC30A10, SMPD1, SMTN, SNRPB, SP140, STAMBP, STXBP2, SULF2, SYNGAP1, SYNJ2, TAZ, TBL2, TDRD7, TECPR2, TFB1M, TM6SF1, TNK2, TOE1, TOR1B, TRAPPC6B, TRIP4, TRMT2A, TRMU, TRPV4, TTC19, TYMP, UMPS, UROD, WDR11, WDR62, WIPI1, WRAP53, XPO1, YY1AP1, and ZC3H14. In some embodiments, the mutation is within any intron or exon in the target gene. In some embodiments, the amount of mRNA encoding the target protein, or the mature mRNA encoding the target protein, is decreased by at least 10, 20, 30, 40, 50, 60, 80, 100, 150, 200, 250, 300, 350, 400, 450, 500, or 1000%, compared to the amount of the protein produced by a cell in the absence of the ASO/absence of treatment. In some embodiments, the total amount of the mRNA encoding the target protein, or the mature mRNA encoding the target protein produced in the cell to which the antisense oligomer is contacted is decreased about 20% to about 300%, about 50% to about 300%, about 100% to about 300%, about 150% to about 300%, about 20% to about 50%, about 20% to about 100%, about 20% to about 150%, about 20% to about 200%, about 20% to about 250%, about 50% to about 100%, about 50% to about 150%, about 50% to about 200%, about 50% to about 250%, about 100% to about 150%, about 100% to about 200%, about 100% to about 250%, about 150% to about 200%, about 150% to about 250%, about 200% to about 250%, at least about 10%, at least about 20%, at least about 50%, at least about 100%, at least about 150%, at least about 200%, at least about 250%, or at least about 300%, compared to the amount of mature RNA produced in an untreated cell, e.g., an untreated cell or a cell treated with a control compound. In some embodiments, the total amount of the mRNA encoding the target protein, or the mature mRNA encoding the target protein produced in the cell to which the antisense oligomer is contacted is decreased about 1.1 to about 10-fold, about 1.5 to about 10-fold, about 2 to about 10-fold, about 3 to about 10-fold, about 4 to about 10-fold, about 1.1 to about 5-fold, about 1.1 to about 6-fold, about 1.1 to about 7-fold, about 1.1 to about 8-fold, about 1.1 to about 9-fold, about 2 to about 5-fold, about 2 to about 6-fold, about 2 to about 7-fold, about 2 to about 8-fold, about 2 to about 9-fold, about 3 to about 6-fold, about 3 to about 7-fold, about 3 to about 8-fold, about 3 to about 9-fold, about 4 to about 7-fold, about 4 to about 8-fold, about 4 to about 9-fold, at least about 1.1-fold, at least about 1.5-fold, at least about 2-fold, at least about 2.5-fold, at least about 3-fold, at least about 3.5-fold, at least about 4-fold, at least about 5-fold, or at least about 10-fold compared to the amount of mature RNA produced in an untreated cell, e.g., an untreated cell or a cell treated with a control compound. A control compound can be, for example, an oligonucleotide that is not complementary to a targeted portion of the target pre-mRNA.

### Therapeutic Agents

[0723] In various embodiments of the present disclosure, compositions and methods comprising a therapeutic agent are provided to modulate protein expression level of SYNGAP1. In some embodiments, provided herein are compositions and methods to modulate alternative splicing of SYNGAP1 pre-mRNA. In some embodiments, provided herein are compositions and methods to modulate alternative splicing in the splicing of SYNGAP1 pre-mRNA, e.g., to prevent inclusion of a NSAE during splicing of SYNGAP1 pre-mRNA and preserve canonical exons.

[0724] In various embodiments of the present disclosure, compositions and methods comprising a therapeutic agent are provided to modulate protein expression level of the target. In some embodiments, provided herein are compositions and methods to modulate alternative splicing of the target pre-mRNA. In some embodiments, provided herein are compositions and methods to modulate alternative splicing in the splicing of the target pre-mRNA, e.g., to prevent inclusion of a NSAE during splicing of the target pre-mRNA and preserve canonical exons, wherein the target is any one selected from the group consisting of ABCA5, ABCA7, ABCC3, ABCC5, ABCC8, ABCD1, ABR, ACAD9, ACAP1, ACOX2, ACSF3, ACTN4, ADAM17, ADAMTS13, AKR1E2, ALAD, ALG3, ANKRD29, ANKS3, ANO4, AP3B2, AP3M1, AP5Z1, ARNTL, ASAP3, ATRX, BBS2, BBS4, BRD9, CALM3, CARS1, CASP9, CATSPER1, CCDC40, CCDC88B, CD4, CD58, CES2, CHFR, CLCN2, CNOT3, CNTROB, COL5A3, CPSF1, CSPP1, CTF1, CTH, CYP3A5, DAB2IP, DBN1, DDX51, DEAF1, DGKE, DHDDS, DMKN, DNHD1, DOCK8, DOK5, EIF2B5, ELAC2, ELP1, ENTPD4, ESRRA, ESS2, ETAA1, ETHE1, FANCA, FASTK, FASTKD3, FPGS, FREM1, GAS8, GCK, GGA1, GGA3, GGT1, GLMN, GON4L, GRB14, HDAC3, HELQ, HP1BP3, HPS1, HPS4, IDUA, IFT122, IL17RC, IMPDH1, INVS, IRF3, KCTD3, KLKB1, KYAT1, LAMC3, LDAH, LIMS2, MALT1, MAP3K7, MAPK13, MCAT, MCEE, MPI, MSTO1, NBEAL2, NLE1, NLRC5, NOM1, NOP58, NPHP1, NPR1, NUP188, OSGEP, PABPC4, PCOLCE, PHKA2, PIDD1, PKD1, PLA2G6, PLD2, PLEKHG5, PNPO, POLE, PON2, PRMT7, PRODH, PRPF3, PRPF4, PYCR1, RAD52, REXO1, RFX5, RHBDF2, RMND1, ROBO3, RPGRIP1, RTTN, RUFY3, SEMA3B, SEMA3F, SH2D3A, SIK3, SIRT3, SKIV2L, SLC2A13, SLC12A7, SLC22A3, SLC25A13, SLC25A37, SLC27A5, SLC30A9, SLC30A10, SMPD1, SMTN, SNRPB, SP140, STAMBP, STXBP2, SULF2, SYNGAP1, SYNJ2, TAZ, TBL2, TDRD7, TECPR2, TFB1M, TM6SF1, TNK2, TOE1, TOR1B, TRAPPC6B, TRIP4, TRMT2A, TRMU, TRPV4, TTC19, TYMP, UMPS, UROD, WDR11, WDR62, WIPI1, WRAP53, XPO1, YY1AP1, and ZC3H14.

[0725] A therapeutic agent disclosed herein can be an alternative splicing repressor agent. In some embodiments, a therapeutic agent may comprise a polynucleic acid polymer. In other embodiments, a therapeutic agent may comprise a small molecule. In other embodiments, a therapeutic agent may comprise a polypeptide. In some embodiments, the therapeutic agent is a nucleic acid binding protein, with or without being complexed with a nucleic acid molecule. In other embodiments, the therapeutic agent is a nucleic acid molecule that encodes for another therapeutic agent. In further embodiments, the therapeutic agent is incorporated into a viral delivery system, such as an adenovirus-associated vector.

[0726] According to one aspect of the present disclosure, provided herein is a method of treatment or prevention of a condition associated with a functional-SYNGAP1 protein deficiency, comprising administering an alternative splicing repressor agent to a subject to increase levels of functional SYNGAP1 protein, wherein the agent binds to a region of the pre-mRNA transcript to decrease inclusion of the NSAE in the mature transcript. For example, provided herein is a method of treatment or prevention of a condition associated with a functional-SYNGAP1 protein deficiency, comprising administering an alternative splicing repressor agent to a subject to increase levels of functional SYNGAP1 protein, wherein the agent binds to a region of an exon or an intron (e.g., exon 10 or 11, intron 10 or intron 11 in human SYNGAP1 gene) of the pre-mRNA transcript.

[0727] According to one aspect of the present disclosure, provided herein is a method of treatment or prevention of a condition associated with a functional target protein deficiency, comprising administering an alternative splicing repressor agent to a subject to increase levels of functional target protein, wherein the agent binds to a region of the pre-mRNA transcript to decrease inclusion of the NSAE in the mature transcript. For example, provided herein is a method of treatment or prevention of a condition associated with a functional target protein deficiency, comprising administering an alternative splicing repressor agent to a subject to increase levels of functional target protein, wherein the agent binds to a region of an exon or an intron of the pre-mRNA transcript, wherein the target is any one selected from the group consisting of ABCA5, ABCA7, ABCC3, ABCC5, ABCC8, ABCD1, ABR, ACAD9, ACAP1, ACOX2, ACSF3, ACTN4, ADAM17, ADAMTS13, AKR1E2, ALAD, ALG3, ANKRD29, ANKS3, ANO4, AP3B2, AP3M1, AP5Z1, ARNTL, ASAP3, ATRX, BBS2, BBS4, BRD9, CALM3, CARS1, CASP9, CATSPER1, CCDC40, CCDC88B, CD4, CD58, CES2, CHFR, CLCN2, CNOT3, CNTROB, COL5A3, CPSF1, CSPP1, CTF1, CTH, CYP3A5, DAB2IP, DBN1, DDX51, DEAF1, DGKE, DHDDS, DMKN, DNHD1, DOCK8, DOK5, EIF2B5, ELAC2, ELP1, ENTPD4, ESRRA, ESS2, ETAA1, ETHE1, FANCA, FASTK, FASTKD3, FPGS, FREM1, GAS8, GCK, GGA1, GGA3, GGT1, GLMN, GON4L, GRB14, HDAC3, HELQ, HP1BP3, HPS1, HPS4, IDUA, IFT122, IL17RC, IMPDH1, INVS, IRF3, KCTD3, KLKB1, KYAT1, LAMC3, LDAH, LIMS2, MALT1, MAP3K7, MAPK13, MCAT, MCEE, MPI, MSTO1, NBEAL2, NLE1, NLRC5, NOM1, NOP58, NPHP1, NPR1, NUP188, OSGEP, PABPC4, PCOLCE, PHKA2, PIDD1, PKD1, PLA2G6, PLD2, PLEKHG5, PNPO, POLE, PON2, PRMT7, PRODH, PRPF3, PRPF4, PYCR1, RAD52, REXO1, RFX5, RHBDF2, RMND1, ROBO3, RPGRIP1, RTTN, RUFY3, SEMA3B, SEMA3F, SH2D3A, SIK3, SIRT3, SKIV2L, SLC2A13, SLC12A7, SLC22A3, SLC25A13, SLC25A37, SLC27A5, SLC30A9, SLC30A10, SMPD1, SMTN, SNRPB, SP140, STAMBP, STXBP2, SULF2, SYNGAP1, SYNJ2, TAZ, TBL2, TDRD7, TECPR2, TFB1M, TM6SF1, TNK2, TOE1, TOR1B, TRAPPC6B, TRIP4, TRMT2A, TRMU, TRPV4, TTC19, TYMP, UMPS, UROD, WDR11, WDR62, WIPI1, WRAP53, XPO1, YY1AP1, and ZC3H14.

[0728] In some embodiments, provided herein is a method of treatment or prevention of a condition associated with a functional-SYNGAP1 protein overexpression, comprising administering an alternative splicing modulator agent to a subject to decrease levels of functional SYNGAP1 protein, wherein the agent binds to a region of the pre-mRNA transcript to increase inclusion of the NSAE in the mature transcript. For example, provided herein is a method of treatment or prevention of a condition associated with a functional-SYNGAP1 protein overexpression, comprising administering an alternative splicing modulator agent to a subject to decrease levels of functional SYNGAP1 protein, wherein the agent binds to a region of an exon or an intron (e.g., exon 10 or 11, intron 10 or intron 11 in human SYNGAP1 gene) of the pre-mRNA transcript.

[0729] According to one aspect of the present disclosure, provided herein is a method of treatment or prevention of a condition associated with a functional target protein overexpression, comprising administering an alternative splicing modulator agent to a subject to decrease levels of functional target protein, wherein the agent binds to a region of the pre-mRNA transcript to increase inclusion of the NSAE in the mature transcript. For example, provided herein is a method of treatment or prevention of a condition associated with a functional target protein overexpression, comprising administering an alternative splicing repressor agent to a subject to decrease levels of functional target protein, wherein the agent binds to a region of an exon or an intron of the pre-mRNA transcript, wherein the target is any one selected from the group consisting of ABCA5, ABCA7, ABCC3, ABCC5, ABCC8, ABCD1, ABR, ACAD9, ACAP1, ACOX2, ACSF3, ACTN4, ADAM17, ADAMTS13, AKR1E2, ALAD, ALG3, ANKRD29, ANKS3, ANO4, AP3B2, AP3M1, AP5Z1, ARNTL, ASAP3, ATRX, BBS2, BBS4, BRD9, CALM3, CARS1, CASP9, CATSPER1, CCDC40, CCDC88B, CD4, CD58, CES2, CHFR, CLCN2, CNOT3, CNTROB, COL5A3, CPSF1, CSPP1, CTF1, CTH, CYP3A5, DAB2IP, DBN1, DDX51, DEAF1, DGKE, DHDDS, DMKN, DNHD1, DOCK8, DOK5, EIF2B5, ELAC2, ELP1, ENTPD4, ESRRA, ESS2, ETAA1, ETHE1, FANCA, FASTK, FASTKD3, FPGS, FREM1, GAS8, GCK, GGA1, GGA3, GGT1, GLMN, GON4L, GRB14, HDAC3, HELQ, HP1BP3, HPS1, HPS4, IDUA, IFT122, IL17RC, IMPDH1, INVS, IRF3, KCTD3, KLKB1, KYAT1, LAMC3, LDAH, LIMS2, MALT1, MAP3K7, MAPK13, MCAT, MCEE, MPI, MSTO1, NBEAL2, NLE1, NLRC5, NOM1, NOP58, NPHP1, NPR1, NUP188, OSGEP, PABPC4, PCOLCE, PHKA2, PIDD1, PKD1, PLA2G6, PLD2, PLEKHG5, PNPO, POLE, PON2, PRMT7, PRODH, PRPF3, PRPF4, PYCR1, RAD52, REXO1, RFX5, RHBDF2, RMND1, ROBO3, RPGRIP1, RTTN, RUFY3, SEMA3B, SEMA3F, SH2D3A, SIK3, SIRT3, SKIV2L, SLC2A13, SLC12A7, SLC22A3, SLC25A13, SLC25A37, SLC27A5, SLC30A9, SLC30A10, SMPD1, SMTN, SNRPB, SP140, STAMBP, STXBP2, SULF2, SYNGAP1, SYNJ2, TAZ, TBL2, TDRD7, TECPR2, TFB1M, TM6SF1, TNK2, TOE1, TOR1B, TRAPPC6B, TRIP4, TRMT2A, TRMU, TRPV4, TTC19, TYMP, UMPS, UROD, WDR11, WDR62, WIPI1, WRAP53, XPO1, YY1AP1, and ZC3H14.

[0730] Where reference is made to reducing alternative splicing in the mature mRNA, the reduction may be complete, e.g., 100%, or may be partial. The reduction may be clinically significant. The reduction/correction may be relative to the level of alternative splicing in the subject without treatment, or relative to the amount of alternative splicing in a population of similar subjects. The reduction/correction may be at least 10% less alternative splicing relative to the average subject, or the subject prior to treatment. The reduction may be at least 20% less alternative splicing relative to an average subject, or the subject prior to treatment. The reduction may be at least 40% less alternative splicing relative to an average subject, or the subject prior to treatment. The reduction may be at least 50% less alternative splicing relative to an average subject, or the subject prior to treatment. The reduction may be at least 60% less alternative splicing relative to an average subject, or the subject prior to treatment. The reduction may be at least 80% less alternative splicing relative to an average subject, or the subject prior to treatment. The reduction may be at least 90% less alternative splicing relative to an average subject, or the subject prior to treatment.

[0731] Where reference is made to increasing alternative splicing in the mature mRNA, the increase may be complete, e.g., 100%, or may be partial. The increase may be clinically significant. The increase/correction may be relative to the level of alternative splicing in the subject without treatment, or relative to the amount of alternative splicing in a population of similar subjects. The increase/correction may be at least 10% more alternative splicing relative to the average subject, or the subject prior to treatment. The increase may be at least 20% more alternative splicing relative to an average subject, or the subject prior to treatment. The increase may be at least 40% more alternative splicing relative to an average subject, or the subject prior to treatment. The increase may be at least 50% more alternative splicing relative to an average subject, or the subject prior to treatment. The increase may be at least 60% more alternative splicing relative to an average subject, or the subject prior to treatment. The increase may be at least 80% more alternative splicing relative to an average subject, or the subject prior to treatment. The increase may be at least 90% more alternative splicing relative to an average subject, or the subject prior to treatment.

[0732] Where reference is made to increasing functional-SYNGAP1 protein levels, the increase may be clinically significant. The increase may be relative to the level of functional-SYNGAP1 protein in the subject without treatment, or relative to the amount of functional-SYNGAP1 protein in a population of similar subjects. The increase may be at least 10% more functional-SYNGAP1 protein relative to the average subject, or the subject prior to treatment. The increase may be at least 20% more functional-SYNGAP1 protein relative to the average subject, or the subject prior to treatment. The increase may be at least 40% more functional-SYNGAP1 protein relative to the average subject, or the subject prior to treatment. The increase may be at least 50% more functional-SYNGAP1 protein relative to the average subject, or the subject prior to treatment. The increase may be at least 80% more functional-SYNGAP1 protein relative to the average subject, or the subject prior to treatment. The increase may be at least 100% more functional-SYNGAP1 protein relative to the average subject, or the subject prior to treatment. The increase may be at least 200% more functional-SYNGAP1 protein relative to the average subject, or the subject prior to treatment. The increase may be at least 500% more functional-SYNGAP1 protein relative to the average subject, or the subject prior to treatment.

[0733] Where reference is made to decreasing functional-SYNGAP1 protein levels, the decrease may be clinically significant. The decrease may be relative to the level of functional-SYNGAP1 protein in the subject without treatment, or relative to the amount of functional-SYNGAP1 protein in a population of similar subjects. The decrease may be at least 10% less functional-SYNGAP1 protein relative to the average subject, or the subject prior to treatment. The decrease may be at least 20% less functional-SYNGAP1 protein relative to the average subject, or the subject prior to treatment. The decrease may be at least 40% less functional-SYNGAP1 protein relative to the average subject, or the subject prior to treatment. The decrease may be at least 50% less functional-SYNGAP1 protein relative to the average subject, or the subject prior to treatment. The decrease may be at least 80% less functional-SYNGAP1 protein relative to the average subject, or the subject prior to treatment. The decrease may be at least 100% less functional-SYNGAP1 protein relative to the average subject, or the subject prior to treatment.

[0734] Where reference is made to increasing functional target protein levels, the increase may be clinically significant, wherein the target is any one selected from the group consisting of ABCA5, ABCA7, ABCC3, ABCC5, ABCC8, ABCD1, ABR, ACAD9, ACAP1, ACOX2, ACSF3, ACTN4, ADAM17, ADAMTS13, AKR1E2, ALAD, ALG3, ANKRD29, ANKS3, ANO4, AP3B2, AP3M1, AP5Z1, ARNTL, ASAP3, ATRX, BBS2, BBS4, BRD9, CALM3, CARS1, CASP9, CATSPER1, CCDC40, CCDC88B, CD4, CD58, CES2, CHFR, CLCN2, CNOT3, CNTROB, COL5A3, CPSF1, CSPP1, CTF1, CTH, CYP3A5, DAB2IP, DBN1, DDX51, DEAF1, DGKE, DHDDS, DMKN, DNHD1, DOCK8, DOK5, EIF2B5, ELAC2, ELP1, ENTPD4, ESRRA, ESS2, ETAA1, ETHE1, FANCA, FASTK, FASTKD3, FPGS, FREM1, GAS8, GCK, GGA1, GGA3, GGT1, GLMN, GON4L, GRB14, HDAC3, HELQ, HP1BP3, HPS1, HPS4, IDUA, IFT122, IL17RC, IMPDH1, INVS, IRF3, KCTD3, KLKB1, KYAT1, LAMC3, LDAH, LIMS2, MALT1, MAP3K7, MAPK13, MCAT, MCEE, MPI, MSTO1, NBEAL2, NLE1, NLRC5, NOM1, NOP58, NPHP1, NPR1, NUP188, OSGEP, PABPC4, PCOLCE, PHKA2, PIDD1, PKD1, PLA2G6, PLD2, PLEKHG5, PNPO, POLE, PON2, PRMT7, PRODH, PRPF3, PRPF4, PYCR1, RAD52, REXO1, RFX5, RHBDF2, RMND1, ROBO3, RPGRIP1, RTTN, RUFY3, SEMA3B, SEMA3F, SH2D3A, SIK3, SIRT3, SKIV2L, SLC2A13, SLC12A7, SLC22A3, SLC25A13, SLC25A37, SLC27A5, SLC30A9, SLC30A10, SMPD1, SMTN, SNRPB, SP140, STAMBP, STXBP2, SULF2, SYNGAP1, SYNJ2, TAZ, TBL2, TDRD7, TECPR2, TFB1M, TM6SF1, TNK2, TOE1, TOR1B, TRAPPC6B, TRIP4, TRMT2A, TRMU, TRPV4, TTC19, TYMP, UMPS, UROD, WDR11, WDR62, WIPI1, WRAP53, XPO1, YY1AP1, and ZC3H14. The increase may be relative to the level of functional target protein in the subject without treatment, or relative to the amount of functional target protein in a population of similar subjects. The increase may be at least 10% more functional target protein relative to the average subject, or the subject prior to treatment. The increase may be at least 20% more functional target protein relative to the average subject, or the subject prior to treatment. The increase may be at least 40% more functional target protein relative to the average subject, or the subject prior to treatment. The increase may be at least 50% more functional target protein relative to the average subject, or the subject prior to treatment. The increase may be at least 80% more functional target protein relative to the average subject, or the subject prior to treatment. The increase may be at least 100% more functional target protein relative to the average subject, or the subject prior to treatment. The increase may be at least 200% more functional target protein relative to the average subject, or the subject prior to treatment. The increase may be at least 500% more functional target protein relative to the average subject, or the subject prior to treatment.

[0735] Where reference is made to decreasing functional target protein levels, the decrease may be clinically significant, wherein the target is any one selected from the group consisting of ABCA5, ABCA7, ABCC3, ABCC5, ABCC8, ABCD1, ABR, ACAD9, ACAP1, ACOX2, ACSF3, ACTN4, ADAM17, ADAMTS13, AKR1E2, ALAD, ALG3, ANKRD29, ANKS3, ANO4, AP3B2, AP3M1, AP5Z1, ARNTL, ASAP3, ATRX, BBS2, BBS4, BRD9, CALM3, CARS1, CASP9, CATSPER1, CCDC40, CCDC88B, CD4, CD58, CES2, CHFR, CLCN2, CNOT3, CNTROB, COL5A3, CPSF1, CSPP1, CTF1, CTH, CYP3A5, DAB2IP, DBN1, DDX51, DEAF1, DGKE, DHDDS, DMKN, DNHD1, DOCK8, DOK5, EIF2B5, ELAC2, ELP1, ENTPD4, ESRRA, ESS2, ETAA1, ETHE1, FANCA, FASTK, FASTKD3, FPGS, FREM1, GAS8, GCK, GGA1, GGA3, GGT1, GLMN, GON4L, GRB14, HDAC3, HELQ, HP1BP3, HPS1, HPS4, IDUA, IFT122, IL17RC, IMPDH1, INVS, IRF3, KCTD3, KLKB1, KYAT1, LAMC3, LDAH, LIMS2, MALT1, MAP3K7, MAPK13, MCAT, MCEE, MPI, MSTO1, NBEAL2, NLE1, NLRC5, NOM1, NOP58, NPHP1, NPR1, NUP188, OSGEP, PABPC4, PCOLCE, PHKA2, PIDD1, PKD1, PLA2G6, PLD2, PLEKHG5, PNPO, POLE, PON2, PRMT7, PRODH, PRPF3, PRPF4, PYCR1, RAD52, REXO1, RFX5, RHBDF2, RMND1, ROBO3, RPGRIP1, RTTN, RUFY3, SEMA3B, SEMA3F, SH2D3A, SIK3, SIRT3, SKIV2L, SLC2A13, SLC12A7, SLC22A3, SLC25A13, SLC25A37, SLC27A5, SLC30A9, SLC30A10, SMPD1, SMTN, SNRPB, SP140, STAMBP, STXBP2, SULF2, SYNGAP1, SYNJ2, TAZ, TBL2, TDRD7, TECPR2, TFB1M, TM6SF1, TNK2, TOE1, TOR1B, TRAPPC6B, TRIP4, TRMT2A, TRMU, TRPV4, TTC19, TYMP, UMPS, UROD, WDR11, WDR62, WIPI1, WRAP53, XPO1, YY1AP1, and ZC3H14. The decrease may be relative to the level of functional target protein in the subject without treatment, or relative to the amount of functional target protein in a population of similar subjects. The decrease may be at least 10% less functional target protein relative to the average subject, or the subject prior to treatment. The decrease may be at least 20% less functional target protein relative to the average subject, or the subject prior to treatment. The decrease may be at least 40% less functional target protein relative to the average subject, or the subject prior to treatment. The decrease may be at least 50% less functional target protein relative to the average subject, or the subject prior to treatment. The decrease may be at least 80% less functional target protein relative to the average subject, or the subject prior to treatment. The decrease may be at least 100% less functional target protein relative to the average subject, or the subject prior to treatment.

[0736] In embodiments wherein the alternative splicing repressor agent comprises a polynucleic acid polymer, the polynucleic acid polymer may be about 50 nucleotides in length. In embodiments wherein the alternative splicing modulator agent comprises a polynucleic acid polymer, the polynucleic acid polymer may be about 50 nucleotides in length. The polynucleic acid polymer may be about 45 nucleotides in length. The polynucleic acid polymer may be about 40 nucleotides in length. The polynucleic acid polymer may be about 35 nucleotides in length. The polynucleic acid polymer may be about 30 nucleotides in length. The polynucleic acid polymer may be about 24 nucleotides in length. The polynucleic acid polymer may be about 25 nucleotides in length. The polynucleic acid polymer may be about 20 nucleotides in length. The polynucleic acid polymer may be about 19 nucleotides in length. The polynucleic acid polymer may be about 18 nucleotides in length. The polynucleic acid polymer may be about 17 nucleotides in length. The polynucleic acid polymer may be about 16 nucleotides in length. The polynucleic acid polymer may be about 15 nucleotides in length. The polynucleic acid polymer may be about 14 nucleotides in length. The polynucleic acid polymer may be about 13 nucleotides in length. The polynucleic acid polymer may be about 12 nucleotides in length. The polynucleic acid polymer may be about 11 nucleotides in length. The polynucleic acid polymer may be about 10 nucleotides in length. The polynucleic acid polymer may be between about 10 and about 50 nucleotides in length. The polynucleic acid polymer may be between about 10 and about 45 nucleotides in length. The polynucleic acid polymer may be between about 10 and about 40 nucleotides in length. The polynucleic acid polymer may be between about 10 and about 35 nucleotides in length. The polynucleic acid polymer may be between about 10 and about 30 nucleotides in length. The polynucleic acid polymer may be between about 10 and about 25 nucleotides in length. The polynucleic acid polymer may be between about 10 and about 20 nucleotides in length. The polynucleic acid polymer may be between about 15 and about 25 nucleotides in length. The polynucleic acid polymer may be between about 15 and about 30 nucleotides in length. The polynucleic acid polymer may be between about 12 and about 30 nucleotides in length.

[0737] The sequence of the polynucleic acid polymer may be at least 50%, 55%, 60%, 65%, 70%, 75%, 80%, 85%, 90%, 91%, 92%, 93%, 94%, 95%, 96%, 97%, 98%, 99%, or 99.5% complementary to a target sequence of an mRNA transcript, e.g., a partially processed mRNA transcript. The sequence of the polynucleic acid polymer may be 100% complementary to a target sequence of a pre-mRNA transcript.

[0738] The sequence of the polynucleic acid polymer may have 4 or fewer mismatches to a target sequence of the pre-mRNA transcript. The sequence of the polynucleic acid polymer may have 3 or fewer mismatches to a target sequence of the pre-mRNA transcript. The sequence of the polynucleic acid polymer may have 2 or fewer mismatches to a target sequence of the pre-mRNA transcript. The sequence of the polynucleic acid polymer may have 1 or fewer mismatches to a target sequence of the pre-mRNA transcript. The sequence of the polynucleic acid polymer may have no mismatches to a target sequence of the pre-mRNA transcript.

[0739] In some embodiments, the polynucleic acid polymer may specifically hybridize to a target sequence of the pre-mRNA transcript. For example, the polynucleic acid polymer may have 91%, 92%, 93%, 94%, 95%, 96%, 97%, 98%, 99%, 99.5% or 100% sequence complementarity to a target sequence of the pre-mRNA transcript. The hybridization may be under high stringent hybridization conditions.

[0740] The polynucleic acid polymer may have a sequence with at least 50%, 55%, 60%, 65%, 70%, 75%, 80%, 85%, 90%, 91%, 92%, 93%, 94%, 95%, 96%, 97%, 98%, 99%, or 99.5% sequence identity to a sequence of Table 1, Table 6A, and Table 6B. The polynucleic acid polymer may have a sequence with 100% sequence identity to a sequence selected from the group consisting of Table 1, Table 6A, and Table 6B. In some embodiments, the polynucleic acid polymer comprises a sequence with at least 50%, 55%, 60%, 65%, 70%, 75%, 80%, 85%, 90%, 91%, 92%, 93%, 94%, 95%, 96%, 97%, 98%, 99%, or 99.5% sequence identity to any one selected from the group consisting of SEQ ID NO: 1-SEQ ID NO: 165, and SEQ ID NO: 1301-SEQ ID NO: 10225. In some embodiments, the polynucleic acid polymer comprises a sequence with 100% sequence identity to any one selected from the group consisting of SEQ ID NO: 1-SEQ ID NO: 165, and SEQ ID NO: 1301-SEQ ID NO: 10225. In some embodiments the polynucleic acid polymer is a polynucleic acid polymer of at least 50%, 55%, 60%, 65%, 70%, 75%, 80%, 85%, 90%, 91%, 92%, 93%, 94%, 95%, 96%, 97%, 98%, 99%, or 99.5% sequence identity to any one selected from the group consisting of SEQ ID NO: 1-SEQ ID NO: 165, and SEQ ID NO: 1301-SEQ ID NO: 10225. In some embodiments, the polynucleic acid polymer is a polynucleic acid polymer of any one selected from the group consisting of SEQ ID NO: 1-SEQ ID NO: 165, and SEQ ID NO: 1301-SEQ ID NO: 10225.

TABLE 1
(gene = SYNGAP1)

| ASO (Bolde = 2′MOE, | | | | | | | |
|---|---|---|---|---|---|---|---|
| Italicized = LNA, | SEQ | ASO sequence with | SEQ | | | | Name |
| underlined C = 5methylC) | ID | no mismatches | ID | Coordinate | | | Position |
| Sequence 5′-3′ | NO: | Sequence 5′-3′ | NO: | Chr | Start | End | ID |
| ATGGGAGAGAGATGGAGG | 1 | | | chr6 | 33440369 | 33440387 | SYNGAP |
| | | | | | | | 1-IVS10- |
| | | | | | | | 166 |
| CAGAGATGGGAGAGAGAT | 2 | | | chr6 | 33440374 | 33440392 | SYNGAP |
| | | | | | | | 1-IVS10- |
| | | | | | | | 161 |
| AGAGACAGAGATGGGAGA | 3 | | | chr6 | 33440379 | 33440397 | SYNGAP |
| | | | | | | | 1-IVS10- |
| | | | | | | | 156 |
| CAGGGAGAGACAGAGATG | 4 | | | chr6 | 33440384 | 33440402 | SYNGAP |
| | | | | | | | 1-IVS10- |
| | | | | | | | 151 |
| GACACCAGGGAGAGACAG | 5 | | | chr6 | 33440389 | 33440407 | SYNGAP |
| | | | | | | | 1-IVS10- |
| | | | | | | | 146 |
| AAACAGACACCAGGGAGA | 6 | | | chr6 | 33440394 | 33440412 | SYNGAP |
| | | | | | | | 1-IVS10- |
| | | | | | | | 141 |
| AAGAAAAACAGACACCAG | 7 | | | chr6 | 33440399 | 33440417 | SYNGAP |
| | | | | | | | 1-IVS10- |
| | | | | | | | 136 |
| AGGAGAAGAAAAACAGAC | 8 | | | chr6 | 33440404 | 33440422 | SYNGAP |
| | | | | | | | 1-IVS10- |
| | | | | | | | 131 |
| AGAGGAGGAGAAGAAAAA | 9 | | | chr6 | 33440409 | 33440427 | SYNGAP |
| | | | | | | | 1-IVS10- |
| | | | | | | | 126 |
| CAAGGAGAGGAGGAGAAG | 10 | | | chr6 | 33440414 | 33440432 | SYNGAP |
| | | | | | | | 1-IVS10- |
| | | | | | | | 121 |
| AGAGACAAGGAGAGGAGG | 11 | | | chr6 | 33440419 | 33440437 | SYNGAP |
| | | | | | | | 1-IVS10- |
| | | | | | | | 116 |
| GGGAGAGAGACAAGGAGA | 12 | | | chr6 | 33440424 | 33440442 | SYNGAP |
| | | | | | | | 1-IVS10- |
| | | | | | | | 111 |
| GGTGTGGGAGAGAGACAA | 13 | | | chr6 | 33440429 | 33440447 | SYNGAP |
| | | | | | | | 1-IVS10- |
| | | | | | | | 106 |
| GGAGGGTTGTGGGAGAGA | 14 | GGAGGGGTGTG | 144 | chr6 | 33440434 | 33440452 | SYNGAP |
| | | GGAGAGA | | | | | 1-IVS10- |
| | | | | | | | 101 |
| GAGATGGATGGGTGTGGG | 15 | GAGATGGAGGG | 145 | chr6 | 33440439 | 33440457 | SYNGAP |
| | | GTGTGGG | | | | | 1-IVS10- |
| | | | | | | | 96 |
| GGAGAGAGATGGATGGGT | 16 | GGAGAGAGATG | 146 | chr6 | 33440444 | 33440462 | SYNGAP |
| | | GAGGGGT | | | | | 1-IVS10- |
| | | | | | | | 91 |
| ACGTGGGAGAGAGATGGA | 17 | | | chr6 | 33440449 | 33440467 | SYNGAP |
| | | | | | | | 1-IVS10- |
| | | | | | | | 86 |
| GAGACACGTGGGAGAGAG | 18 | | | chr6 | 33440454 | 33440472 | SYNGAP |
| | | | | | | | 1-IVS10- |
| | | | | | | | 81 |
| AGGGAGAGACACGTGGGA | 19 | GGGGAGAGACA | 147 | chr6 | 33440459 | 33440477 | SYNGAP |
| | | CGTGGGA | | | | | 1-IVS10- |
| | | | | | | | 76 |
| GGTGAGGGAAGAGACACG | 20 | GGTGAGGGGAG | 148 | chr6 | 33440464 | 33440482 | SYNGAP |
| | | AGACACG | | | | | 1-IVS10- |
| | | | | | | | 71 |
| GAGAAGGTGAAGGGAGAG | 21 | GAGAAGGTGAG | 149 | chr6 | 33440469 | 33440487 | SYNGAP |
| | | GGGAGAG | | | | | 1-IVS10- |
| | | | | | | | 66 |
| AGGGAGAGAAGGTGAGGG | 22 | GGGGAGAGAAG | 150 | chr6 | 33440474 | 33440492 | SYNGAP |
| | | GTGAGGG | | | | | 1-IVS10- |
| | | | | | | | 61 |
| TGGAGGGAGAGAGAAGGT | 23 | TGGAGGGGGAG | 151 | chr6 | 33440479 | 33440497 | SYNGAP |
| | | AGAAGGT | | | | | 1-IVS10- |
| | | | | | | | 56 |
| AGAAATGGAGAGGGAGAG | 24 | AGAAATGGAGG | 152 | chr6 | 33440484 | 33440502 | SYNGAP |
| | | GGGAGAG | | | | | 1-IVS10- |
| | | | | | | | 51 |
| GAGAGAGAAATGGAGGGA | 25 | GAGAGAGAAAT | 153 | chr6 | 33440489 | 33440507 | SYNGAP |
| | | GGAGGGG | | | | | 1-IVS10- |
| | | | | | | | 46 |
| TTAGGGAGAGAGAAATGG | 26 | | | chr6 | 33440494 | 33440512 | SYNGAP |
| | | | | | | | 1-IVS10- |
| | | | | | | | 41 |
| ACAGATTAGGGAGAGAGA | 27 | | | chr6 | 33440499 | 33440517 | SYNGAP |
| | | | | | | | 1-IVS10- |
| | | | | | | | 36 |
| AACAGACAGATTAGGGAG | 28 | | | chr6 | 33440504 | 33440522 | SYNGAP |
| | | | | | | | 1-IVS10- |
| | | | | | | | 31 |
| GAGGGAACAGACAGATTA | 29 | | | chr6 | 33440509 | 33440527 | SYNGAP |
| | | | | | | | 1-IVS10- |
| | | | | | | | 26 |
| TGGCAGAGGGAACAGACA | 30 | | | chr6 | 33440514 | 33440532 | SYNGAP |
| | | | | | | | 1-IVS10- |
| | | | | | | | 21 |
| GGCCATGGCAGAGGGAAC | 31 | | | chr6 | 33440519 | 33440537 | SYNGAP |
| | | | | | | | 1-IVS10- |
| | | | | | | | 16 |
| AAGGGAGCCATGGCAGAG | 32 | AAGGGGGCCAT | 154 | chr6 | 33440524 | 33440542 | SYNGAP |
| | | GGCAGAG | | | | | 1-IVS10- |
| | | | | | | | 11 |
| TGAAGAAGGAGGCCATGG | 33 | TGAAGAAGGGG | 155 | chr6 | 33440529 | 33440547 | SYNGAP |
| | | GCCATGG | | | | | 1-IVS10-6 |
| CTGCTTGAAGAAGAGGGC | 34 | CTGCTTGAAGA | 156 | chr6 | 33440534 | 33440552 | SYNGAP |
| | | AGGGGGC | | | | | 1-IVS10-1 |
| GGAGGCTGCTTGAAGAAG | 35 | | | chr6 | 33440539 | 33440557 | SYNGAP |
| | | | | | | | 1- |
| | | | | | | | I10AltE11 |
| | | | | | | | +5 |
| AGATGGGAGGCTGCTTGA | 36 | | | chr6 | 33440544 | 33440562 | SYNGAP |
| | | | | | | | 1- |
| | | | | | | | I10AltE11 |
| | | | | | | | +10 |
| GAGCAAGATGGGAGGCTG | 37 | | | chr6 | 33440549 | 33440567 | SYNGAP |
| | | | | | | | 1- |
| | | | | | | | I10AltE11 |
| | | | | | | | +15 |
| CAGGAGCAAGATGGGAGG | 38 | | | chr6 | 33440552 | 33440570 | SYNGAP |
| | | | | | | | 1- |
| | | | | | | | AltEx11+ |
| | | | | | | | 1 |
| GACCGCAGGAGCAAGATG | 39 | | | chr6 | 33440557 | 33440575 | SYNGAP |
| | | | | | | | 1- |
| | | | | | | | AltEx11+ |
| | | | | | | | 6 |
| GGAGGGACCGCAGGAGCA | 40 | | | chr6 | 33440562 | 33440580 | SYNGAP |
| | | | | | | | 1- |
| | | | | | | | AltEx11+ |
| | | | | | | | 11 |
| GGGAAGGAGGGACCGCAG | 41 | | | chr6 | 33440567 | 33440585 | SYNGAP |
| | | | | | | | 1- |
| | | | | | | | AltEx11+ |
| | | | | | | | 16 |
| AGACAGGGAAGGAGGGAC | 42 | | | chr6 | 33440572 | 33440590 | SYNGAP |
| | | | | | | | 1- |
| | | | | | | | AltEx11+ |
| | | | | | | | 21 |
| GAGAGAGACAGGGAAGGA | 43 | | | chr6 | 33440577 | 33440595 | SYNGAP |
| | | | | | | | 1- |
| | | | | | | | AltEx11+ |
| | | | | | | | 26 |
| AGGGTGAGAGAGACAGGG | 44 | GGGGTGAGAGA | 157 | chr6 | 33440582 | 33440600 | SYNGAP |
| | | GACAGGG | | | | | 1- |
| | | | | | | | AltEx11+ |
| | | | | | | | 31 |
| AAACAGGGATGAGAGAGA | 45 | AAACAGGGGTG | 158 | chr6 | 33440587 | 33440605 | SYNGAP |
| | | AGAGAGA | | | | | 1- |
| | | | | | | | AltEx11+ |
| | | | | | | | 36 |
| TGTGGAAACAAGGGTGAG | 46 | TGTGGAAACAG | 159 | chr6 | 33440592 | 33440610 | SYNGAP |
| | | GGGTGAG | | | | | 1- |
| | | | | | | | AltEx11+ |
| | | | | | | | 41 |
| GAGGGTGTGGAAACAGGG | 47 | | | chr6 | 33440597 | 33440615 | SYNGAP |
| | | | | | | | 1- |
| | | | | | | | AltEx11+ |
| | | | | | | | 46 |
| GAGGTGAGGGTGTGGAAA | 48 | | | chr6 | 33440602 | 33440620 | SYNGAP |
| | | | | | | | 1- |
| | | | | | | | AltEx11+ |
| | | | | | | | 51 |
| GGTAGGAGGTGAGGGTGT | 49 | | | chr6 | 33440607 | 33440625 | SYNGAP |
| | | | | | | | 1- |
| | | | | | | | AltEx11+ |
| | | | | | | | 56 |
| AGGGTGGTAGGAGGTGAG | 50 | GGGGTGGTAGG | 160 | chr6 | 33440612 | 33440630 | SYNGAP |
| | | AGGTGAG | | | | | 1- |
| | | | | | | | AltEx11+ |
| | | | | | | | 61 |
| TGAGGGAGGTGGTAGGAG | 51 | TGAGGGGGGTG | 161 | chr6 | 33440617 | 33440635 | SYNGAP |
| | | GTAGGAG | | | | | 1- |
| | | | | | | | AltEx11+ |
| | | | | | | | 66 |
| CATGCTGAGGAGGGTGGT | 52 | CATGCTGAGGG | 162 | chr6 | 33440622 | 33440640 | SYNGAP |
| | | GGGTGGT | | | | | 1- |
| | | | | | | | AltEx11+ |
| | | | | | | | 71 |
| GGGAACATGCTGAGAGGG | 53 | GGGAACATGCT | 163 | chr6 | 33440627 | 33440645 | SYNGAP |
| | | GAGGGGG | | | | | 1- |
| | | | | | | | AltEx11+ |
| | | | | | | | 76 |
| TTCCAGGGAACATGCTGA | 54 | | | chr6 | 33440632 | 33440650 | SYNGAP |
| | | | | | | | 1- |
| | | | | | | | AltEx11+ |
| | | | | | | | 81 |
| TCAGCTTCCAGGGAACAT | 55 | | | chr6 | 33440637 | 33440655 | SYNGAP |
| | | | | | | | 1- |
| | | | | | | | AltEx11+ |
| | | | | | | | 86 |
| GGGAGAGAGATGGATGGG | 56 | GGGAGAGAGAT | 164 | chr6 | 33440445 | 33440463 | SYNGAP |
| | | GGAGGGG | | | | | 1-IVS10- |
| | | | | | | | 90 |
| TGGGAGAGAGATGGAGGG | 57 | | | chr6 | 33440446 | 33440464 | SYNGAP |
| | | | | | | | 1-IVS10- |
| | | | | | | | 89 |
| GTGGGAGAGAGATGGAGG | 58 | | | chr6 | 33440447 | 33440465 | SYNGAP |
| | | | | | | | 1-IVS10- |
| | | | | | | | 88 |
| CGTGGGAGAGAGATGGAG | 59 | | | chr6 | 33440448 | 33440466 | SYNGAP |
| | | | | | | | 1-IVS10- |
| | | | | | | | 87 |
| CACGTGGGAGAGAGATGG | 60 | | | chr6 | 33440450 | 33440468 | SYNGAP |
| | | | | | | | 1-IVS10- |
| | | | | | | | 85 |
| ACACGTGGGAGAGAGATG | 61 | | | chr6 | 33440451 | 33440469 | SYNGAP |
| | | | | | | | 1-IVS10- |
| | | | | | | | 84 |
| GACACGTGGGAGAGAGAT | 62 | | | chr6 | 33440452 | 33440470 | SYNGAP |
| | | | | | | | 1-IVS10- |
| | | | | | | | 83 |
| AGACACGTGGGAGAGAGA | 63 | | | chr6 | 33440453 | 33440471 | SYNGAP |
| | | | | | | | 1-IVS10- |
| | | | | | | | 82 |
| AGAGACACGTGGGAGAGA | 64 | | | chr6 | 33440455 | 33440473 | SYNGAP |
| | | | | | | | 1-IVS10- |
| | | | | | | | 80 |
| GAGAGACACGTGGGAGAG | 65 | | | chr6 | 33440456 | 33440474 | SYNGAP |
| | | | | | | | 1-IVS10- |
| | | | | | | | 79 |
| GGAGAGACACGTGGGAGA | 66 | | | chr6 | 33440457 | 33440475 | SYNGAP |
| | | | | | | | 1-IVS10- |
| | | | | | | | 78 |
| GGGAGAGACACGTGGGAG | 67 | | | chr6 | 33440458 | 33440476 | SYNGAP |
| | | | | | | | 1-IVS10- |
| | | | | | | | 77 |
| AGGGAACATGCTGATGGG | 68 | AGGGAACATGC | 165 | chr6 | 33440628 | 33440646 | SYNGAP |
| | | TGAGGGG | | | | | 1- |
| | | | | | | | AltEX11+ |
| | | | | | | | 77 |
| CAGGGAACATGCTGAGGG | 69 | | | chr6 | 33440629 | 33440647 | SYNGAP |
| | | | | | | | 1- |
| | | | | | | | AltEX11+ |
| | | | | | | | 78 |
| CCAGGGAACATGCTGAGG | 70 | | | chr6 | 33440630 | 33440648 | SYNGAP |
| | | | | | | | 1- |
| | | | | | | | AltEX11+ |
| | | | | | | | 79 |
| TCCAGGGAACATGCTGAG | 71 | | | chr6 | 33440631 | 33440649 | SYNGAP |
| | | | | | | | 1- |
| | | | | | | | AltEX11+ |
| | | | | | | | 80 |
| CTTCCAGGGAACATGCTG | 72 | | | chr6 | 33440633 | 33440651 | SYNGAP |
| | | | | | | | 1- |
| | | | | | | | AltEX11+ |
| | | | | | | | 82 |
| GCTTCCAGGGAACATGCT | 73 | | | chr6 | 33440634 | 33440652 | SYNGAP |
| | | | | | | | 1- |
| | | | | | | | AltEX11+ |
| | | | | | | | 83 |
| AGCTTCCAGGGAACATGC | 74 | | | chr6 | 33440635 | 33440653 | SYNGAP |
| | | | | | | | 1- |
| | | | | | | | AltEX11+ |
| | | | | | | | 84 |
| CAGCTTCCAGGGAACATG | 75 | | | chr6 | 33440636 | 33440654 | SYNGAP |
| | | | | | | | 1- |
| | | | | | | | AltEX11+ |
| | | | | | | | 85 |
| GAGACACGTGGGAGAG | 76 | | | chr6 | 33440456 | 33440472 | SYNGAP |
| | | | | | | | 1-IVS10- |
| | | | | | | | 81(16) |
| GACACGTGGGAGAGAG | 77 | | | chr6 | 33440454 | 33440470 | SYNGAP |
| | | | | | | | 1-IVS10- |
| | | | | | | | 83(16) |
| CACGTGGGAGAGAGAT | 78 | | | chr6 | 33440452 | 33440468 | SYNGAP |
| | | | | | | | 1-IVS10- |
| | | | | | | | 85(16) |
| CGTGGGAGAGAGATGG | 79 | | | chr6 | 33440450 | 33440466 | SYNGAP |
| | | | | | | | 1-IVS10- |
| | | | | | | | 87(16) |
| GTGGGAGAGAGATGGA | 80 | | | chr6 | 33440449 | 33440465 | SYNGAP |
| | | | | | | | 1-IVS10- |
| | | | | | | | 88(16) |
| GAGACACGTGGGAG | 81 | | | chr6 | 33440458 | 33440472 | SYNGAP |
| | | | | | | | 1-IVS10- |
| | | | | | | | 81(14) |
| GACACGTGGGAGAG | 82 | | | chr6 | 33440456 | 33440470 | SYNGAP |
| | | | | | | | 1-IVS10- |
| | | | | | | | 83(14) |
| CACGTGGGAGAGAG | 83 | | | chr6 | 33440454 | 33440468 | SYNGAP |
| | | | | | | | 1-IVS10- |
| | | | | | | | 85(14) |
| CGTGGGAGAGAGAT | 84 | | | chr6 | 33440452 | 33440466 | SYNGAP |
| | | | | | | | 1-IVS10- |
| | | | | | | | 87(14) |
| TGGGAGAGAGATGG | 85 | | | chr6 | 33440450 | 33440464 | SYNGAP |
| | | | | | | | 1-IVS10- |
| | | | | | | | 89(14) |
| GGGAGAGAGATGGA | 86 | | | chr6 | 33440449 | 33440463 | SYNGAP |
| | | | | | | | 1-IVS10- |
| | | | | | | | 90(14) |
| GAGACACGTGGG | 87 | | | chr6 | 33440460 | 33440472 | SYNGAP |
| | | | | | | | 1-IVS10- |
| | | | | | | | 81(12) |
| GACACGTGGGAG | 88 | | | chr6 | 33440458 | 33440470 | SYNGAP |
| | | | | | | | 1-IVS10- |
| | | | | | | | 83(12) |
| CACGTGGGAGAG | 89 | | | chr6 | 33440456 | 33440468 | SYNGAP |
| | | | | | | | 1-IVS10- |
| | | | | | | | 85(12) |
| CGTGGGAGAGAG | 90 | | | chr6 | 33440454 | 33440466 | SYNGAP |
| | | | | | | | 1-IVS10- |
| | | | | | | | 87(12) |
| TGGGAGAGAGAT | 91 | | | chr6 | 33440452 | 33440464 | SYNGAP |
| | | | | | | | 1-IVS10- |
| | | | | | | | 89(12) |
| GGAGAGAGATGG | 92 | | | chr6 | 33440450 | 33440462 | SYNGAP |
| | | | | | | | 1-IVS10- |
| | | | | | | | 91(12) |
| GAGAGAGATGGA | 93 | | | chr6 | 33440449 | 33440461 | SYNGAP |
| | | | | | | | 1-IVS10- |
| | | | | | | | 92(12) |
| CCAGGGAGAGACAGAGAT | 94 | | | chr6 | 33440385 | 33440403 | SYNGAP |
| | | | | | | | 1-IVS10- |
| | | | | | | | 150 |
| ACCAGGGAGAGACAGAGA | 95 | | | chr6 | 33440386 | 33440404 | SYNGAP |
| | | | | | | | 1-IVS10- |
| | | | | | | | 149 |
| CACCAGGGAGAGACAGAG | 96 | | | chr6 | 33440387 | 33440405 | SYNGAP |
| | | | | | | | 1-IVS10- |
| | | | | | | | 148 |
| ACACCAGGGAGAGACAGA | 97 | | | chr6 | 33440388 | 33440406 | SYNGAP |
| | | | | | | | 1-IVS10- |
| | | | | | | | 147 |
| AGACACCAGGGAGAGACA | 98 | | | chr6 | 33440390 | 33440408 | SYNGAP |
| | | | | | | | 1-IVS10- |
| | | | | | | | 145 |
| CAGACACCAGGGAGAGAC | 99 | | | chr6 | 33440391 | 33440409 | SYNGAP |
| | | | | | | | 1-IVS10- |
| | | | | | | | 144 |
| ACAGACACCAGGGAGAGA | 100 | | | chr6 | 33440392 | 33440410 | SYNGAP |
| | | | | | | | 1-IVS10- |
| | | | | | | | 143 |
| AACAGACACCAGGGAGAG | 101 | | | chr6 | 33440393 | 33440411 | SYNGAP |
| | | | | | | | 1-IVS10- |
| | | | | | | | 142 |
| AAAACAGACACCAGGGAG | 102 | | | chr6 | 33440395 | 33440413 | SYNGAP |
| | | | | | | | 1-IVS10- |
| | | | | | | | 140 |
| AAAAACAGACACCAGGGA | 103 | | | chr6 | 33440396 | 33440414 | SYNGAP |
| | | | | | | | 1-IVS10- |
| | | | | | | | 139 |
| GAAAAACAGACACCAGGG | 104 | | | chr6 | 33440397 | 33440415 | SYNGAP |
| | | | | | | | 1-IVS10- |
| | | | | | | | 138 |
| AGAAAAACAGACACCAGG | 105 | | | chr6 | 33440398 | 33440416 | SYNGAP |
| | | | | | | | 1-IVS10- |
| | | | | | | | 137 |
| GAGACAGGGAAGGAGGGA | 106 | | | chr6 | 33440573 | 33440591 | SYNGAP |
| | | | | | | | 1- |
| | | | | | | | AltEx11+ |
| | | | | | | | 22 |
| AGAGACAGGGAAGGAGGG | 107 | | | chr6 | 33440574 | 33440592 | SYNGAP |
| | | | | | | | 1- |
| | | | | | | | AltEx11+ |
| | | | | | | | 23 |
| GAGAGACAGGGAAGGAGG | 108 | | | chr6 | 33440575 | 33440593 | SYNGAP |
| | | | | | | | 1- |
| | | | | | | | AltEx11+ |
| | | | | | | | 24 |
| AGAGAGACAGGGAAGGAG | 109 | | | chr6 | 33440576 | 33440594 | SYNGAP |
| | | | | | | | 1- |
| | | | | | | | AltEx11+ |
| | | | | | | | 25 |
| TGAGAGAGACAGGGAAGG | 110 | | | chr6 | 33440578 | 33440596 | SYNGAP |
| | | | | | | | 1- |
| | | | | | | | AltEx11+ |
| | | | | | | | 27 |
| GTGAGAGAGACAGGGAAG | 111 | | | chr6 | 33440579 | 33440597 | SYNGAP |
| | | | | | | | 1- |
| | | | | | | | AltEx11+ |
| | | | | | | | 28 |
| GGTGAGAGAGACAGGGAA | 112 | | | chr6 | 33440580 | 33440598 | SYNGAP |
| | | | | | | | 1- |
| | | | | | | | AltEx11+ |
| | | | | | | | 29 |
| GGGTGAGAGAGACAGGGA | 113 | | | chr6 | 33440581 | 93344059 | SYNGAP |
| | | | | | | | 1- |
| | | | | | | | AltEx11+ |
| | | | | | | | 30 |
| TTCCAGGGAACATGCTGA | 114 | | | chr6 | 33440630 | 33440650 | SYNGAP |
| GG | | | | | | | 1- |
| | | | | | | | AltEX11+ |
| | | | | | | | 79 |
| AGGGAACATGCTGAGG | 115 | | | chr6 | 33440630 | 33440646 | SYNGAP |
| | | | | | | | 1- |
| | | | | | | | AltEX11+ |
| | | | | | | | 79 |
| CAGGGAACATGCTGAG | 116 | | | chr6 | 33440631 | 33440647 | SYNGAP |
| | | | | | | | 1- |
| | | | | | | | AltEX11+ |
| | | | | | | | 80 |
| CCAGGGAACATGCTGA | 117 | | | chr6 | 33440632 | 33440648 | SYNGAP |
| | | | | | | | 1- |
| | | | | | | | AltEX11+ |
| | | | | | | | 81 |
| TCCAGGGAACATGCTG | 118 | | | chr6 | 33440633 | 33440649 | SYNGAP |
| | | | | | | | 1- |
| | | | | | | | AltEX11+ |
| | | | | | | | 82 |
| TTCCAGGGAACATGCT | 119 | | | chr6 | 33440634 | 33440650 | SYNGAP |
| | | | | | | | 1- |
| | | | | | | | AltEx11+ |
| | | | | | | | 83 |
| [symbol] A [symbol] GG [symbol] AC [symbol] TG [symbol] TG [symbol] GG | 120 | | | chr6 | 33440630 | 33440648 | SYNGAP |
| | | | | | | | 1- |
| | | | | | | | AltEX11+ |
| | | | | | | | 79 |
| [symbol] CC [symbol] GG [symbol] AA [symbol] AT [symbol] CT [symbol] AG | 121 | | | chr6 | 33440631 | 33440649 | SYNGAP |
| | | | | | | | 1- |
| | | | | | | | AltEX11+ |
| | | | | | | | 80 |
| [symbol] T [symbol] AG [symbol] GA [symbol] CA [symbol] GC [symbol] GA | 122 | | | chr6 | 33440632 | 33440650 | SYNGAP |
| | | | | | | | 1- |
| | | | | | | | AltEx11+ |
| | | | | | | | 81 |
| [symbol] GG [symbol] AA [symbol] AT [symbol] CT [symbol] AG [symbol] | 123 | | | chr6 | 33440630 | 33440646 | SYNGAP |
| | | | | | | | 1- |
| | | | | | | | AltEX11+ |
| | | | | | | | 79 |
| [symbol] AG [symbol] GA [symbol] CA [symbol] GC [symbol] GA [symbol] | 124 | | | chr6 | 33440631 | 33440647 | SYNGAP |
| | | | | | | | 1- |
| | | | | | | | AltEX11+ |
| | | | | | | | 80 |
| [symbol] A [symbol] GG [symbol] AC [symbol] TG [symbol] TG [symbol] | 125 | | | chr6 | 33440632 | 33440648 | SYNGAP |
| | | | | | | | 1- |
| | | | | | | | AltEX11+ |
| | | | | | | | 81 |
| [symbol] CC [symbol] GG [symbol] AA [symbol] AT [symbol] CT [symbol] | 126 | | | chr6 | 33440633 | 33440649 | SYNGAP |
| | | | | | | | 1- |
| | | | | | | | AltEX11+ |
| | | | | | | | 82 |
| [symbol] T [symbol] AG [symbol] GA [symbol] CA [symbol] GC [symbol] | 127 | | | chr6 | 33440634 | 33440650 | SYNGAP |
| | | | | | | | 1- |
| | | | | | | | AltEx11+ |
| | | | | | | | 83 |
| [symbol] GGG [symbol] AC [symbol] TG [symbol] TG [symbol] GG | 128 | | | chr6 | 33440630 | 33440648 | SYNGAP |
| | | | | | | | 1- |
| | | | | | | | AltEX11+ |
| | | | | | | | 79a |
| [symbol] CC [symbol] GG [symbol] AAC [symbol] T [symbol] CT [symbol] AG | 129 | | | chr6 | 33440631 | 33440649 | SYNGAP |
| | | | | | | | 1- |
| | | | | | | | AltEX11+ |
| | | | | | | | 80a |
| [symbol] TCC [symbol] GG [symbol] AAC [symbol] T [symbol] CTG [symbol] | 130 | | | chr6 | 33440632 | 33440650 | SYNGAP |
| | | | | | | | 1- |
| | | | | | | | AltEx11+ |
| | | | | | | | 81a |
| [symbol] GG [symbol] A [symbol] CAT [symbol] CT [symbol] AG [symbol] | 131 | | | chr6 | 33440630 | 33440646 | SYNGAP |
| | | | | | | | 1- |
| | | | | | | | AltEX11+ |
| | | | | | | | 79a |
| C [symbol] G [symbol] GA [symbol] CAT [symbol] CT [symbol] A [symbol] | 132 | | | chr6 | 33440631 | 33440647 | SYNGAP |
| | | | | | | | 1- |
| | | | | | | | AltEX11+ |
| | | | | | | | 80a |
| [symbol] GGG [symbol] AC [symbol] TG [symbol] TG [symbol] | 133 | | | chr6 | 33440632 | 33440648 | SYNGAP |
| | | | | | | | 1- |
| | | | | | | | AltEX11+ |
| | | | | | | | 81a |
| [symbol] CC [symbol] GG [symbol] A [symbol] CAT [symbol] CT [symbol] | 134 | | | chr6 | 33440633 | 33440649 | SYNGAP |
| | | | | | | | 1- |
| | | | | | | | AltEX11+ |
| | | | | | | | 82a |
| [symbol] TCC [symbol] G [symbol] GA [symbol] CAT [symbol] C [symbol] | 135 | | | chr6 | 33440634 | 33440650 | SYNGAP |
| | | | | | | | 1- |
| | | | | | | | AltEx11+ |
| | | | | | | | 83a |
| CAGACACCAGGGAGAGAC | 136 | | | chr6 | 33440389 | 33440409 | SYNGAP |
| AG | | | | | | | 1-IVS10- |
| | | | | | | | 146(20) |
| ACAGACACCAGGGAGAGA | 137 | | | chr6 | 33440389 | 33440410 | SYNGAP |
| CAG | | | | | | | 1-IVS10- |
| | | | | | | | 146(21) |
| AACAGACACCAGGGAGAG | 138 | | | chr6 | 33440389 | 33440411 | SYNGAP |
| ACAG | | | | | | | 1-IVS10- |
| | | | | | | | 146(22) |
| AAACAGACACCAGGGAGA | 139 | | | chr6 | 33440389 | 33440412 | SYNGAP |
| GACAG | | | | | | | 1-IVS10- |
| | | | | | | | 146(23) |
| CAGACACCAGGGAGAGAC | 140 | | | chr6 | 33440389 | 33440409 | SYNGAP |
| AG | | | | | | | 1-IVS10- |
| | | | | | | | 146(20)-P |
| ACAGACACCAGGGAGAGA | 141 | | | chr6 | 33440389 | 33440410 | SYNGAP |
| CAG | | | | | | | 1-IVS10- |
| | | | | | | | 146(21)-P |
| AACAGACACCAGGGAGAG | 142 | | | chr6 | 33440389 | 33440411 | SYNGAP |
| ACAG | | | | | | | 1-IVS10- |
| | | | | | | | 146(22)-P |
| AAACAGACACCAGGGAGA | 143 | | | chr6 | 33440389 | 33440412 | SYNGAP |
| GACAG | | | | | | | 1-IVS10- |
| | | | | | | | 146(23)-P |

TABLE 2
SYNGAP1

| | |
|---|---|
| Canonical intron | SEQ ID NO: 166 |
| chr6: 33438919-33440728 | |
| Alternative intron | SEQ ID NO: 167 |
| chr6: 33438919-33440552 | |
| Canonical exon | SEQ ID NO: 168 |
| chr6: 33440729-33440965 | |
| Alternative exon | SEQ ID NO: 169 |
| chr6: 33440553-33440965 | |

TABLE 3
ABCA5

| | |
|---|---|
| Canonical exon chr17: 50659237-50659368 | SEQ ID NO: 170 |
| Alternative exon chr17: 50659182-50659368 | SEQ ID NO: 171 |
| Canonical intron chr17: 50658497-50659236 | SEQ ID NO: 172 |
| Alternative intron chr17: 50658497-50659181 | SEQ ID NO: 173 |

ABCA7

| | |
|---|---|
| Canonical exon chr19: 1063760-1063863 | SEQ ID NO: 174 |
| Alternative exon chr19: 1063760-1063899 | SEQ ID NO: 175 |
| Canonical intron chr19: 1063864-1064160 | SEQ ID NO: 176 |
| Alternative intron chr19: 1063900-1064160 | SEQ ID NO: 177 |

ABCC3

| | |
|---|---|
| Canonical exon chr17: 50659237-50659368 | SEQ ID NO: 178 |
| Alternative exon chr17: 50659182-50659368 | SEQ ID NO: 179 |
| Canonical intron chr17: 50658497-50659236 | SEQ ID NO: 180 |
| Alternative intron chr17: 50658497-50659181 | SEQ ID NO: 181 |

ABCC5

| | |
|---|---|
| Canonical exon chr3: 183971563-183971919 | SEQ ID NO: 182 |
| Alternative exon chr3: 183971563-183972034 | SEQ ID NO: 183 |
| Canonical intron chr3: 183971920-183977516 | SEQ ID NO: 184 |
| Alternative intron chr3: 183972035-183977516 | SEQ ID NO: 185 |

ABCC8

| | |
|---|---|
| Canonical exon chr11: 17406888-17407129 | SEQ ID NO: 186 |
| Alternative exon chr11: 17406888-17407209 | SEQ ID NO: 187 |
| Canonical intron chr11: 17407130-17407353 | SEQ ID NO: 188 |
| Alternative intron chr11: 17407210-17407353 | SEQ ID NO: 189 |

ABCD1

| | |
|---|---|
| Canonical exon chrX: 153736345-153736513 | SEQ ID NO: 190 |
| Alternative exon chrX: 153736345-153736911 | SEQ ID NO: 191 |
| Canonical intron chrX: 153736514-153737156 | SEQ ID NO: 192 |
| Alternative intron chrX: 153736912-153737156 | SEQ ID NO: 193 |

ABR

| | |
|---|---|
| Canonical exon chr17: 1007165-1007312 | SEQ ID NO: 194 |
| Alternative exon chr17: 1006775-1007312 | SEQ ID NO: 195 |
| Alternative exon chr17: 1006840-1007312 | SEQ ID NO: 196 |
| Alternative exon chr17: 1006905-1007312 | SEQ ID NO: 197 |
| Canonical intron chr17: 1006170-1007164 | SEQ ID NO: 198 |
| Alternative intron chr17: 1006170-1006774 | SEQ ID NO: 199 |
| Alternative intron chr17: 1006170-1006839 | SEQ ID NO: 200 |
| Alternative intron chr17: 1006170-1006904 | SEQ ID NO: 201 |

ACAD9

| | |
|---|---|
| Canonical exon chr3: 128879620-128879841 | SEQ ID NO: 202 |
| Canonical exon chr3: 128879629-128879841 | SEQ ID NO: 203 |
| Alternative exon chr3: 128879620-128880017 | SEQ ID NO: 204 |
| Alternative exon chr3: 128879629-128880017 | SEQ ID NO: 205 |
| Canonical intron chr3: 128879842-128884652 | SEQ ID NO: 206 |
| Alternative intron chr3: 128880018-128884652 | SEQ ID NO: 207 |

ACAP1

| | |
|---|---|
| Canonical exon | SEQ ID NO: 208 |
| Canonical intron | SEQ ID NO: 209 |
| Alternative exon | SEQ ID NO: 210 |
| Alternative intron | SEQ ID NO: 211 |

ACOX2

| | |
|---|---|
| Canonical exon chr3: 58534360-58534522 | SEQ ID NO: 212 |
| Alternative exon chr3: 58534360-58534608 | SEQ ID NO: 213 |
| Canonical intron chr3: 58534523-58534946 | SEQ ID NO: 214 |
| Alternative intron chr3: 58534609-58534946 | SEQ ID NO: 215 |

ACSF3

| | |
|---|---|
| Canonical exon chr16: 89145267-89145400 | SEQ ID NO: 216 |
| Canonical exon chr16: 89145267-89145401 | SEQ ID NO: 217 |
| Alternative exon chr16: 89145214-89145400 | SEQ ID NO: 218 |
| Alternative exon chr16: 89145214-89145401 | SEQ ID NO: 219 |
| Canonical intron chr16: 89133263-89145266 | SEQ ID NO: 220 |
| Alternative intron chr16: 89133263-89145213 | SEQ ID NO: 221 |

ACTN4

| | |
|---|---|
| Canonical exon chr19: 38727946-38728026 | SEQ ID NO: 222 |
| Alternative exon chr19: 38727946-38728381 | SEQ ID NO: 223 |
| Canonical intron chr19: 38728027-38728995 | SEQ ID NO: 224 |
| Alternative intron chr19: 38728382-38728995 | SEQ ID NO: 225 |

ADAM17

| | |
|---|---|
| Canonical exon chr2: 9526111-9526244 | SEQ ID NO: 226 |
| Alternative exon chr2: 9526111-9526264 | SEQ ID NO: 227 |
| Canonical intron chr2: 9526245-9527785 | SEQ ID NO: 228 |
| Alternative intron chr2 9526265 9527785 | SEQ ID NO: 229 |

ADAMTS13

| | |
|---|---|
| Canonical exon | SEQ ID NO: 230 |
| Canonical exon | SEQ ID NO: 231 |
| Canonical intron | SEQ ID NO: 232 |
| Canonical intron | SEQ ID NO: 233 |
| Alternative exon | SEQ ID NO: 234 |
| Alternative exon | SEQ ID NO: 235 |
| Alternative exon | SEQ ID NO: 236 |
| Alternative intron | SEQ ID NO: 237 |
| Alternative intron | SEQ ID NO: 238 |

AKR1E2

| | |
|---|---|
| Canonical exon chr10: 4847148-4847230 | SEQ ID NO: 239 |
| Alternative exon chr10: 4847148-4847299 | SEQ ID NO: 240 |
| Canonical intron chr10: 4847231-4847487 | SEQ ID NO: 241 |
| Alternative intron chr10: 4847300-4847487 | SEQ ID NO: 242 |

ALAD

| | |
|---|---|
| Canonical exon chr9: 113392119-113392169 | SEQ ID NO: 243 |
| Canonical exon chr9: 113392132-113392169 | SEQ ID NO: 244 |
| Alternative exon chr9: 113392119-113392335 | SEQ ID NO: 245 |
| Alternative exon chr9: 113392132-113392335 | SEQ ID NO: 246 |
| Canonical intron chr9: 113392170-113393446 | SEQ ID NO: 247 |
| Alternative intron chr9: 113392336-113393446 | SEQ ID NO: 248 |

ALG3

| | |
|---|---|
| Canonical exon | SEQ ID NO: 249 |
| Canonical exon | SEQ ID NO: 250 |
| Canonical intron | SEQ ID NO: 251 |
| Canonical intron | SEQ ID NO: 252 |
| Alternative exon | SEQ ID NO: 253 |
| Alternative exon | SEQ ID NO: 254 |
| Alternative intron | SEQ ID NO: 255 |

ANKRD29

| | |
|---|---|
| Canonical exon chr18: 23619531-23619629 | SEQ ID NO: 256 |
| Alternative exon chr18: 23619395-23619629 | SEQ ID NO: 257 |
| Canonical intron chr18: 23617828-23619530 | SEQ ID NO: 258 |
| Alternative intron chr18: 23617828-23619394 | SEQ ID NO: 259 |

ANKS3

| | |
|---|---|
| Canonical exon | SEQ ID NO: 260 |
| Canonical intron | SEQ ID NO: 261 |
| Alternative exon | SEQ ID NO: 262 |
| Alternative intron | SEQ ID NO: 263 |

ANO4

| | |
|---|---|
| Canonical exon chr12: 100974845-100974889 | SEQ ID NO: 264 |
| Alternative exon chr12: 100974783-100974889 | SEQ ID NO: 265 |
| Canonical intron chr12: 100971407-100974844 | SEQ ID NO: 266 |
| Alternative intron chr12: 100971407-100974782 | SEQ ID NO: 267 |

AP3B2

| | |
|---|---|
| Canonical exon chr15: 82663127-82663233 | SEQ ID NO: 268 |
| Alternative exon chr15: 82663127-82663295 | SEQ ID NO: 269 |
| Canonical intron chr15: 82663234-82663559 | SEQ ID NO: 270 |
| Alternative intron chr15: 82663296-82663559 | SEQ ID NO: 271 |

AP3M1

| | |
|---|---|
| Canonical exon chr10: 74126148-74126355 | SEQ ID NO: 272 |
| Alternative exon chr10: 74126126-74126355 | SEQ ID NO: 273 |
| Canonical intron chr10: 74124525-74126147 | SEQ ID NO: 274 |
| Alternative intron chr10: 74124525-74126125 | SEQ ID NO: 275 |

AP5Z1

| | |
|---|---|
| Canonical exon chr7: 4787634-4787776 | SEQ ID NO: 276 |
| Alternative exon chr7: 4787596-4787776 | SEQ ID NO: 277 |
| Canonical intron chr7: 4786429-4787633 | SEQ ID NO: 278 |
| Alternative intron chr7: 4786429-4787595 | SEQ ID NO: 279 |

ARNTL

| | |
|---|---|
| Canonical exon chr11: 13376640-13376728 | SEQ ID NO: 280 |
| Alternative exon chr11: 13376545-13376728 | SEQ ID NO: 281 |
| Canonical intron chr11: 13375763-13376639 | SEQ ID NO: 282 |
| Alternative intron chr11: 13375763-13376544 | SEQ ID NO: 283 |

ASAP3

| | |
|---|---|
| Canonical exon | SEQ ID NO: 284 |
| Canonical intron | SEQ ID NO: 285 |
| Alternative exon | SEQ ID NO: 286 |
| Alternative intron | SEQ ID NO: 287 |

ATRX

| | |
|---|---|
| Canonical exon chrX: 77785982-77786208 | SEQ ID NO: 288 |
| Canonical exon chrX: 77785982-77786216 | SEQ ID NO: 289 |
| Canonical exon chrX: 77785982-77786220 | SEQ ID NO: 290 |
| Canonical exon chrX: 77785982-77786225 | SEQ ID NO: 291 |
| Alternative exon chrX: 77785845-77786208 | SEQ ID NO: 292 |
| Alternative exon chrX:77785845-77786216 | SEQ ID NO: 293 |
| Alternative exon chrX: 77785845-77786220 | SEQ ID NO: 294 |
| Alternative exon chrX: 77785845-77786225 | SEQ ID NO: 295 |
| Canonical intron chrX: 77717244-77785981 | SEQ ID NO: 296 |
| Alternative intron chrX: 77717244-77785844 | SEQ ID NO: 297 |

BBS2

| | |
|---|---|
| Canonical exon chr16: 56498437-56498568 | SEQ ID NO: 298 |
| Alternative exon chr16: 56498437-56498693 | SEQ ID NO: 299 |
| Canonical intron chr16: 56498569-56499777 | SEQ ID NO: 300 |
| Alternative intron chr16: 56498694-56499777 | SEQ ID NO: 301 |

BBS4

| | |
|---|---|
| Canonical exon chr15: 72686179-72686251 | SEQ ID NO: 302 |
| Canonical exon chr15: 72686207-72686251 | SEQ ID NO: 303 |
| Canonical exon chr15: 72686237-72686251 | SEQ ID NO: 304 |
| Alternative exon chr15: 72686179-72686564 | SEQ ID NO: 305 |
| Alternative exon chr15:72686207-72686564 | SEQ ID NO: 306 |
| Alternative exon chr15: 72686237-72686564 | SEQ ID NO: 307 |
| Canonical intron chr15: 72686252-72695176 | SEQ ID NO: 308 |
| Alternative intron chr15: 72686565-72695176 | SEQ ID NO: 309 |

BRD9

| | |
|---|---|
| Canonical exon chr5: 889587-889647 | SEQ ID NO: 310 |
| Alternative exon chr5: 889587-889766 | SEQ ID NO: 311 |
| Canonical intron chr5: 889648-891154 | SEQ ID NO: 312 |
| Alternative intron chr5: 889767-891154 | SEQ ID NO: 313 |

CALM3

| | |
|---|---|
| Canonical exon chr19: 46608924-46608981 | SEQ ID NO: 314 |
| Alternative exon chr19: 46608482-46608981 | SEQ ID NO: 315 |
| Canonical intron chr19: 46608328-46608923 | SEQ ID NO: 316 |
| Alternative intron chr19: 46608328-46608481 | SEQ ID NO: 317 |

CARS1

| | |
|---|---|
| Canonical exon | SEQ ID NO: 318 |
| Canonical intron | SEQ ID NO: 319 |
| Alternative exon | SEQ ID NO: 320 |
| Alternative intron | SEQ ID NO: 321 |

CASP9

| | |
|---|---|
| Canonical exon chr1: 15506899-15507075 | SEQ ID NO: 322 |
| Alternative exon chr1: 15506899-15507133 | SEQ ID NO: 323 |
| Canonical intron chr1: 15507076-15507872 | SEQ ID NO: 324 |
| Alternative intron chr1: 15507134-15507872 | SEQ ID NO: 325 |

CATSPER1

| | |
|---|---|
| Canonical exon | SEQ ID NO: 326 |
| Canonical intron | SEQ ID NO: 327 |
| Alternative exon | SEQ ID NO: 328 |
| Alternative intron | SEQ ID NO: 329 |

CCDC40

| | |
|---|---|
| Canonical exon | SEQ ID NO: 330 |
| Canonical intron | SEQ ID NO: 331 |
| Alternative exon | SEQ ID NO: 332 |
| Alternative intron | SEQ ID NO: 333 |

CCDC88B

| | |
|---|---|
| Canonical exon chr11: 64342522-64342680 | SEQ ID NO: 334 |
| Alternative exon chr11: 64342522-64342807 | SEQ ID NO: 335 |
| Canonical intron chr11: 64342681-64343178 | SEQ ID NO: 336 |
| Alternative intron chr11: 64342808-64343178 | SEQ ID NO: 337 |

CD4

| | |
|---|---|
| Canonical exon chr12: 6818421-6818542 | SEQ ID NO: 338 |
| Alternative exon chr12: 6818421-6818650 | SEQ ID NO: 339 |
| Canonical intron chr12: 6818543-6818846 | SEQ ID NO: 340 |
| Alternative intron chr12: 6818651-6818846 | SEQ ID NO: 341 |

CD58

| | |
|---|---|
| Canonical exon chr1: 116518700-116519267 | SEQ ID NO: 342 |
| Canonical exon chr1: 116519231-116519267 | SEQ ID NO: 343 |
| Alternative exon chr1: 116518700-116519302 | SEQ ID NO: 344 |
| Alternative exon chr1: 116519231-116519302 | SEQ ID NO: 345 |
| Canonical intron chr1: 116519268-116521905 | SEQ ID NO: 346 |
| Alternative intron chr1: 116519303-116521905 | SEQ ID NO: 347 |

CES2

| | |
|---|---|
| Canonical exon | SEQ ID NO: 348 |
| Canonical exon | SEQ ID NO: 349 |
| Canonical exon | SEQ ID NO: 350 |
| Canonical intron | SEQ ID NO: 351 |
| Alternative exon | SEQ ID NO: 352 |
| Alternative exon | SEQ ID NO: 353 |
| Alternative exon | SEQ ID NO: 354 |
| Alternative exon | SEQ ID NO: 355 |
| Alternative exon | SEQ ID NO: 356 |
| Alternative exon | SEQ ID NO: 357 |
| Alternative intron | SEQ ID NO: 358 |
| Alternative intron | SEQ ID NO: 359 |

CHFR

| | |
|---|---|
| Canonical exon chr12: 132848085-132848155 | SEQ ID NO: 360 |
| Alternative exon chr12: 132848085-132848257 | SEQ ID NO: 361 |
| Canonical intron chr12: 132848156-132848640 | SEQ ID NO: 362 |
| Alternative intron chr12: 132848258-132848640 | SEQ ID NO: 363 |

CLCN2

| | |
|---|---|
| Canonical exon chr3: 184354548-184354607 | SEQ ID NO: 364 |
| Canonical exon chr3: 184354548-184354658 | SEQ ID NO: 365 |
| Alternative exon chr3: 184354548-184354714 | SEQ ID NO: 366 |
| Canonical intron chr3: 184354608-184354903 | SEQ ID NO: 367 |
| Canonical intron chr3: 184354659-184354903 | SEQ ID NO: 368 |
| Alternative intron chr3: 184354715-184354903 | SEQ ID NO: 369 |

CNOT3

| | |
|---|---|
| Canonical exon chr19: 54145598-54145698 | SEQ ID NO: 370 |
| Canonical exon chr19: 54145598-54145718 | SEQ ID NO: 371 |
| Canonical exon chr19: 54145598-54145817 | SEQ ID NO: 372 |
| Alternative exon chr19: 54145542-54145698 | SEQ ID NO: 373 |
| Alternative exon chr19: 54145542-54145718 | SEQ ID NO: 374 |
| Alternative exon chr19: 54145542-54145817 | SEQ ID NO: 375 |
| Canonical intron chr19: 54144333-54145597 | SEQ ID NO: 376 |
| Alternative intron chr19: 54144333-54145541 | SEQ ID NO: 377 |

CNTROB

| | |
|---|---|
| Canonical exon chr17: 7936366-7936482 | SEQ ID NO: 378 |
| Alternative exon chr17: 7936238-7936482 | SEQ ID NO: 379 |
| Canonical intron chr17: 7935146-7936365 | SEQ ID NO: 380 |
| Alternative intron chr17: 7935146-7936237 | SEQ ID NO: 381 |

COL5A3

| | |
|---|---|
| Canonical exon | SEQ ID NO: 382 |
| Canonical intron | SEQ ID NO: 383 |
| Alternative exon | SEQ ID NO: 384 |
| Alternative intron | SEQ ID NO: 385 |

CPSF1

| | |
|---|---|
| Canonical exon | SEQ ID NO: 386 |
| Canonical intron | SEQ ID NO: 387 |
| Alternative exon | SEQ ID NO: 388 |
| Alternative intron | SEQ ID NO: 389 |

CSPP1

| | |
|---|---|
| Canonical exon chr8: 67064368-67064496 | SEQ ID NO: 390 |
| Alternative exon chr8: 67064368-67064538 | SEQ ID NO: 391 |
| Canonical intron chr8: 67064497-67074242 | SEQ ID NO: 392 |
| Alternative intron chr8: 67064539-67074242 | SEQ ID NO: 393 |

CTF1

| | |
|---|---|
| Canonical exon chr16: 30899415-30899533 | SEQ ID NO: 394 |
| Canonical exon chr16: 30899418-30899533 | SEQ ID NO: 395 |
| Alternative exon chr16: 30899307-30899533 | SEQ ID NO: 396 |
| Canonical intron chr16: 30896669-30899414 | SEQ ID NO: 397 |
| Canonical intron chr16: 30896669-30899417 | SEQ ID NO: 398 |
| Alternative intron chr16: 30896669-30899306 | SEQ ID NO: 399 |

CTH

| | |
|---|---|
| Canonical exon chr1: 70411218-70411583 | SEQ ID NO: 400 |
| Canonical exon chr1: 70411268-70411583 | SEQ ID NO: 401 |
| Canonical exon chr1: 70411383-70411583 | SEQ ID NO: 402 |
| Alternative exon chr1: 70411218-70411656 | SEQ ID NO: 403 |
| Alternative exon chr1: 70411268-70411656 | SEQ ID NO: 404 |
| Alternative exon chr1: 70411383-70411656 | SEQ ID NO: 405 |
| Canonical intron chr1: 70411584-70415955 | SEQ ID NO: 406 |
| Alternative intron chr1: 70411657-70415955 | SEQ ID NO: 407 |

CYP3A5

| | |
|---|---|
| Canonical exon chr7: 99666601-99666689 | SEQ ID NO: 408 |
| Alternative exon chr7: 99666601-99666810 | SEQ ID NO: 409 |
| Canonical intron chr7: 99666690-99666951 | SEQ ID NO: 410 |
| Alternative intron chr7: 99666811-99666951 | SEQ ID NO: 411 |

DAB2IP

| | |
|---|---|
| Canonical exon chr9: 121678678-121678781 | SEQ ID NO: 412 |
| Alternative exon chr9: 121678678-121678917 | SEQ ID NO: 413 |
| Canonical intron chr9: 121678782-121699324 | SEQ ID NO: 414 |
| Alternative intron chr9: 121678918-121699324 | SEQ ID NO: 415 |

DBN1

| | |
|---|---|
| Canonical exon chr5: 177468108-177468217 | SEQ ID NO: 416 |
| Canonical exon chr5: 177468108-177468220 | SEQ ID NO: 417 |
| Alternative exon chr5: 177467996-177468217 | SEQ ID NO: 418 |
| Alternative exon chr5: 177467996-177468220 | SEQ ID NO: 419 |
| Alternative exon chr5: 177468052-177468217 | SEQ ID NO: 420 |
| Alternative exon chr5: 177468052-177468220 | SEQ ID NO: 421 |
| Canonical intron chr5: 177467818-177468107 | SEQ ID NO: 422 |
| Alternative intron chr5: 177467818-177467995 | SEQ ID NO: 423 |
| Alternative intron chr5: 177467818-177468051 | SEQ ID NO: 424 |

DDX51

| | |
|---|---|
| Canonical exon chr12: 132141275-132141420 | SEQ ID NO: 425 |
| Alternative exon chr12: 132141103-132141420 | SEQ ID NO: 426 |
| Canonical intron chr12: 132141021-132141274 | SEQ ID NO: 427 |
| Alternative intron chr12: 132141021-132141102 | SEQ ID NO: 428 |

DEAF1

| | |
|---|---|
| Canonical exon chr11: 694759-695532 | SEQ ID NO: 429 |
| Alternative exon chr11: 694679-695532 | SEQ ID NO: 430 |
| Canonical intron chr11: 691599-694758 | SEQ ID NO: 431 |
| Alternative intron chr11: 691599-694678 | SEQ ID NO: 432 |

DCKE

| | |
|---|---|
| Canonical exon chr17: 56856512-56856625 | SEQ ID NO: 433 |
| Alternative exon chr17: 56856512-56856665 | SEQ ID NO: 434 |
| Canonical intron chr17: 56856626-56858593 | SEQ ID NO: 435 |
| Alternative intron chr17: 56856666-56858593 | SEQ ID NO: 436 |

DHDDS

| | |
|---|---|
| Canonical exon | SEQ ID NO: 437 |
| Canonical exon | SEQ ID NO: 438 |
| Canonical exon | SEQ ID NO: 439 |
| Canonical intron | SEQ ID NO: 440 |
| Alternative exon | SEQ ID NO: 441 |
| Alternative exon | SEQ ID NO: 442 |
| Alternative exon | SEQ ID NO: 443 |
| Alternative intron | SEQ ID NO: 444 |

DMKN

| | |
|---|---|
| Canonical exon chr19: 35498716-35498763 | SEQ ID NO: 445 |
| Alternative exon chr19: 35498598-35498763 | SEQ ID NO: 446 |
| Canonical intron chr19: 35497539-35498715 | SEQ ID NO: 447 |
| Alternative intron chr19: 35497539-35498597 | SEQ ID NO: 448 |

DNHD1

| | |
|---|---|
| Canonical exon chr canonical_exon_chr11_6566241_6566393 | SEQ ID NO: 449 |
| Alternative exon chr nmd_exon_chr11_6566101_6566393 | SEQ ID NO: 450 |
| Canonical intron chr canonical_intron_chr11_6565992_6566240 | SEQ ID NO: 451 |
| Alternative intron chr nmd_intron_chr11_6565992_6566100 | SEQ ID NO: 452 |

DOCK8

| | |
|---|---|
| Canonical exon chr9: 214865-215029 | SEQ ID NO: 453 |
| Alternative exon chr9: 214865-215416 | SEQ ID NO: 454 |
| Canonical intron chr9: 215030-271626 | SEQ ID NO: 455 |
| Alternative intron chr9: 215417-271626 | SEQ ID NO: 456 |

DOK5

| | |
|---|---|
| Canonical exon chr20: 54475593-54476012 | SEQ ID NO: 457 |
| Alternative exon chr20: 54475593-54476185 | SEQ ID NO: 458 |
| Canonical intron chr20: 54476013-54554932 | SEQ ID NO: 459 |
| Alternative intron chr20: 54476186-54554932 | SEQ ID NO: 460 |

EIF2B5

| | |
|---|---|
| Canonical exon chr3: 184140080-184140157 | SEQ ID NO: 461 |
| Alternative exon chr3: 184140080-184140221 | SEQ ID NO: 462 |
| Canonical intron chr3: 184140158-184140417 | SEQ ID NO: 463 |
| Alternative intron chr3: 184140222-184140417 | SEQ ID NO: 464 |

ELAC2

| | |
|---|---|
| Canonical exon chr17: 13017703-13017966 | SEQ ID NO: 465 |
| Canonical exon chr17: 13017703-13017999 | SEQ ID NO: 466 |
| Canonical exon chr17: 13017703-13018027 | SEQ ID NO: 467 |
| Alternative exon chr17: 13017567-13017966 | SEQ ID NO: 468 |
| Alternative exon chr17: 13017567-13017999 | SEQ ID NO: 469 |
| Alternative exon chr17: 13017567-13018027 | SEQ ID NO: 470 |
| Canonical intron chr17: 13017122-13017702 | SEQ ID NO: 471 |
| Alternative intron chr17: 13017122-13017566 | SEQ ID NO: 472 |

ELP1

| | |
|---|---|
| Canonical exon chr9: 108896953-108897038 | SEQ ID NO: 473 |
| Alternative exon chr9:108896891-108897038 | SEQ ID NO: 474 |
| Canonical intron chr9: 108896645-108896952 | SEQ ID NO: 475 |
| Alternative intron chr9:108896645-108896890 | SEQ ID NO: 476 |

ENTPD4

| | |
|---|---|
| Canonical exon chr8: 23434317-23434478 | SEQ ID NO: 477 |
| Alternative exon chr8: 23434317-23434681 | SEQ ID NO: 478 |
| Canonical intron chr8: 23434479-23435391 | SEQ ID NO: 479 |
| Alternative intron chr8: 23434682-23435391 | SEQ ID NO: 480 |

ESRRA

| | |
|---|---|
| Canonical exon chr11: 64313951-64314067 | SEQ ID NO: 481 |
| Alternative exon chr11: 64313854-64314067 | SEQ ID NO: 482 |
| Canonical intron chr11: 64307505-64313950 | SEQ ID NO: 483 |
| Alternative intron chr11: 64307505-64313853 | SEQ ID NO: 484 |

ESS2

| | |
|---|---|
| Canonical exon chr22: 19138215-19138317 | SEQ ID NO: 485 |
| Alternative exon chr22: 19138215-19138479 | SEQ ID NO: 486 |
| Canonical intron chr22: 19138318-19139158 | SEQ ID NO: 487 |
| Alternative intron chr22: 19138480-19139158 | SEQ ID NO: 488 |

ETAA1

| | |
|---|---|
| Canonical exon chr2: 67405236-67405335 | SEQ ID NO: 489 |
| Alternative exon chr2: 67404997-67405335 | SEQ ID NO: 490 |
| Canonical intron chr2: 67402975-67405235 | SEQ ID NO: 491 |
| Alternative intron chr2: 67402975-67404996 | SEQ ID NO: 492 |

ETHE1

| | |
|---|---|
| Canonical exon chr19: 43527097-43527201 | SEQ ID NO: 493 |
| Alternative exon chr19: 43526937-43527201 | SEQ ID NO: 494 |
| Canonical intron chr19: 43526660-43527096 | SEQ ID NO: 495 |
| Alternative intron chr19: 43526660-43526936 | SEQ ID NO: 496 |

FANCA

| | |
|---|---|
| Canonical exon chr16: 89739994-89740078 | SEQ ID NO: 497 |
| Canonical exon chr16: 89739994-89740099 | SEQ ID NO: 498 |
| Alternative exon chr16: 89739706-89740078 | SEQ ID NO: 499 |
| Alternative exon chr16: 89739706-89740099 | SEQ ID NO: 500 |
| Canonical intron chr16: 89739554-89739993 | SEQ ID NO: 501 |
| Alternative intron chr16: 89739554-89739705 | SEQ ID NO: 502 |

FASTK

| | |
|---|---|
| Canonical exon | SEQ ID NO: 503 |
| Canonical exon | SEQ ID NO: 504 |
| Canonical exon | SEQ ID NO: 505 |
| Canonical exon | SEQ ID NO: 506 |
| Canonical intron | SEQ ID NO: 507 |
| Alternative exon | SEQ ID NO: 508 |
| Alternative exon | SEQ ID NO: 509 |
| Alternative exon | SEQ ID NO: 510 |
| Alternative exon | SEQ ID NO: 511 |
| Alternative exon | SEQ ID NO: 512 |
| Alternative exon | SEQ ID NO: 513 |
| Alternative exon | SEQ ID NO: 514 |
| Alternative exon | SEQ ID NO: 515 |
| Alternative intron | SEQ ID NO: 516 |
| Alternative intron | SEQ ID NO: 517 |

FASTKD3

| | |
|---|---|
| Canonical exon chr5: 7861583-7861652 | SEQ ID NO: 518 |
| Alternative exon chr5: 7861583-7861773 | SEQ ID NO: 519 |
| Canonical intron chr5: 7861653-7862822 | SEQ ID NO: 520 |
| Alternative intron chr5: 7861774-7862822 | SEQ ID NO: 521 |

FPGS

| | |
|---|---|
| Canonical exon chr9: 127807586-127807688 | SEQ ID NO: 522 |
| Alternative exon chr9: 127807586-127807775 | SEQ ID NO: 523 |
| Canonical intron chr9: 127807689-127808233 | SEQ ID NO: 524 |
| Alternative intron chr9: 127807776-127808233 | SEQ ID NO: 525 |

FREM1

| | |
|---|---|
| Canonical exon | SEQ ID NO: 526 |
| Canonical intron | SEQ ID NO: 527 |
| Alternative exon | SEQ ID NO: 528 |
| Alternative exon | SEQ ID NO: 529 |
| Alternative intron | SEQ ID NO: 530 |
| Alternative intron | SEQ ID NO: 531 |

GAS8

| | |
|---|---|
| Canonical exon chr16: 90031299-90031496 | SEQ ID NO: 532 |
| Canonical exon chr16: 90035633-90035687 | SEQ ID NO: 533 |
| Alternative exon chr16: 90031190-90031496 | SEQ ID NO: 534 |
| Alternative exon chr16: 90035633-90035879 | SEQ ID NO: 535 |
| Canonical intron chr16: 90027723-90031298 | SEQ ID NO: 536 |
| Canonical intron chr16: 90035688-90036380 | SEQ ID NO: 537 |
| Alternative intron chr16: 90027723-90031189 | SEQ ID NO: 538 |
| Alternative intron chr16: 90035880-90036380 | SEQ ID NO: 539 |

GCK

| | |
|---|---|
| Canonical exon chr7: 44146463-44146618 | SEQ ID NO: 540 |
| Alternative exon chr7: 44146074-44146618 | SEQ ID NO: 541 |
| Canonical intron chr7: 44145731-44146462 | SEQ ID NO: 542 |
| Alternative intron chr7: 44145731-44146073 | SEQ ID NO: 543 |

GGA1

| | |
|---|---|
| Canonical exon | SEQ ID NO: 544 |
| Canonical exon | SEQ ID NO: 545 |
| Canonical exon | SEQ ID NO: 546 |
| Canonical exon | SEQ ID NO: 547 |
| Canonical intron | SEQ ID NO: 548 |
| Alternative exon | SEQ ID NO: 549 |
| Alternative exon | SEQ ID NO: 550 |
| Alternative exon | SEQ ID NO: 551 |
| Alternative exon | SEQ ID NO: 552 |
| Alternative intron | SEQ ID NO: 553 |

GGA3

| | |
|---|---|
| Canonical exon chr17: 75243063-75243166 | SEQ ID NO: 554 |
| Alternative exon chr17: 75243063-75243258 | SEQ ID NO: 555 |
| Canonical intron chr17: 75243167-75243446 | SEQ ID NO: 556 |
| Alternative intron chr17: 75243259-75243446 | SEQ ID NO: 557 |

GGT1

| | |
|---|---|
| Canonical exon chr22: 24627432-24627619 | SEQ ID NO: 558 |
| Alternative exon chr22: 24627410-24627619 | SEQ ID NO: 559 |
| Canonical intron chr22: 24623917-24627431 | SEQ ID NO: 560 |
| Alternative intron chr22: 24623917-24627409 | SEQ ID NO: 561 |

GLMN

| | |
|---|---|
| Canonical exon chr1: 92266419-92266492 | SEQ ID NO: 562 |
| Canonical exon chr1: 92290198-92290306 | SEQ ID NO: 563 |
| Alternative exon chr1: 92266419-92266593 | SEQ ID NO: 564 |
| Alternative exon chr1: 92290198-92290330 | SEQ ID NO: 565 |
| Canonical intron chr1: 92266493-92266699 | SEQ ID NO: 566 |
| Canonical intron chr1: 92290307-92291417 | SEQ ID NO: 567 |
| Alternative intron chr1: 92266594-92266699 | SEQ ID NO: 568 |
| Alternative intron chr1: 92290331-92291417 | SEQ ID NO: 569 |

GON4L

| | |
|---|---|
| Canonical exon chr1: 155775002-155775173 | SEQ ID NO: 570 |
| Alternative exon chr1: 155774963-155775173 | SEQ ID NO: 571 |
| Canonical intron chr1: 155773211-155775001 | SEQ ID NO: 572 |
| Alternative intron chr1: 155773211-155774962 | SEQ ID NO: 573 |

GRB14

| | |
|---|---|
| Canonical exon chr2: 164508455-164508550 | SEQ ID NO: 574 |
| Alternative exon chr2: 164508455-164508603 | SEQ ID NO: 575 |
| Canonical intron chr2: 164508551-164508741 | SEQ ID NO: 576 |
| Alternative intron chr2: 164508604-164508741 | SEQ ID NO: 577 |

HDAC3

| | |
|---|---|
| Canonical exon chr5: 141628114-141628187 | SEQ ID NO: 578 |
| Alternative exon chr5: 141628114-141628212 | SEQ ID NO: 579 |
| Canonical intron chr5: 141628188-141628558 | SEQ ID NO: 580 |
| Alternative intron chr5: 141628213-141628558 | SEQ ID NO: 581 |

HELQ

| | |
|---|---|
| Canonical exon | SEQ ID NO: 582 |
| Canonical intron | SEQ ID NO: 583 |
| Alternative exon | SEQ ID NO: 584 |
| Alternative intron | SEQ ID NO: 585 |

HP1BP3

| | |
|---|---|
| Canonical exon chr1: 20749723-20749882 | SEQ ID NO: 586 |
| Alternative exon chr1: 20749723-20749975 | SEQ ID NO: 587 |
| Canonical intron chr1: 20749883-20757165 | SEQ ID NO: 588 |
| Alternative intron chr1: 20749976-20757165 | SEQ ID NO: 589 |

HPS1

| | |
|---|---|
| Canonical exon chr10: 98433983-98434091 | SEQ ID NO: 590 |
| Alternative exon chr10: 98433940-98434091 | SEQ ID NO: 591 |
| Canonical intron chr10: 98431292-98433982 | SEQ ID NO: 592 |
| Alternative intron chr10: 98431292-98433939 | SEQ ID NO: 593 |

HPS4

| | |
|---|---|
| Canonical exon chr22: 26470719-26470813 | SEQ ID NO: 594 |
| Alternative exon chr22: 26470719-26470922 | SEQ ID NO: 595 |
| Canonical intron chr22: 26470814-26472301 | SEQ ID NO: 596 |
| Alternative intron chr22: 26470923-26472301 | SEQ ID NO: 597 |

IDUA

| | |
|---|---|
| Canonical exon chr4: 1001679-1001715 | SEQ ID NO: 598 |
| Canonical exon chr4: 1001679-1001881 | SEQ ID NO: 599 |
| Alternative exon chr4: 1001651-1001715 | SEQ ID NO: 600 |
| Alternative exon chr4: 1001651-1001881 | SEQ ID NO: 601 |
| Canonical intron chr4: 1001564-1001678 | SEQ ID NO: 602 |
| Alternative intron chr4: 1001564-1001650 | SEQ ID NO: 603 |

IFT122

| | |
|---|---|
| Canonical exon chr3: 129515488-129515599 | SEQ ID NO: 604 |
| Alternative exon chr3: 129515400-129515599 | SEQ ID NO: 605 |
| Canonical intron chr3: 129514555-129515487 | SEQ ID NO: 606 |
| Alternative intron chr3: 129514555-129515399 | SEQ ID NO: 607 |

IL17RC

| | |
|---|---|
| Canonical exon chr3: 9923881-9924020 | SEQ ID NO: 608 |
| Alternative exon chr3: 9923881-9924137 | SEQ ID NO: 609 |
| Canonical intron chr3: 9924021-9924231 | SEQ ID NO: 610 |
| Alternative intron chr3: 9924138-9924231 | SEQ ID NO: 611 |

IMPDH1

| | |
|---|---|
| Canonical exon chr7: 128400095-128400182 | SEQ ID NO: 612 |
| Canonical exon chr7: 128400135-128400182 | SEQ ID NO: 613 |
| Alternative exon chr7: 128400095-128400204 | SEQ ID NO: 614 |
| Alternative exon chr7: 128400135-128400204 | SEQ ID NO: 615 |
| Canonical intron chr7: 128400183-128400332 | SEQ ID NO: 616 |
| Alternative intron chr7: 128400205-128400332 | SEQ ID NO: 617 |

INVS

| | |
|---|---|
| Canonical exon chr9: 100292326-100292436 | SEQ ID NO: 618 |
| Alternative exon chr9: 100292326-100292873 | SEQ ID NO: 619 |
| Canonical intron chr9: 100292437-100292946 | SEQ ID NO: 620 |
| Alternative intron chr9: 100292874-100292946 | SEQ ID NO: 621 |

IRF3

| | |
|---|---|
| Canonical exon chr19: 49661948-49662328 | SEQ ID NO: 622 |
| Alternative exon chr19: 49661450-49662328 | SEQ ID NO: 623 |
| Canonical intron chr19: 49660829-49661947 | SEQ ID NO: 624 |
| Canonical intron chr19: 49660845-49661947 | SEQ ID NO: 625 |
| Alternative intron chr19: 49660829-49661449 | SEQ ID NO: 626 |
| Alternative intron chr19: 49660845-49661449 | SEQ ID NO: 627 |

KCTD3

| | |
|---|---|
| Canonical exon chr1: 215578001-215578081 | SEQ ID NO: 628 |
| Alternative exon chr1: 215577929-215578081 | SEQ ID NO: 629 |
| Canonical intron chr1: 215577729-215578000 | SEQ ID NO: 630 |
| Alternative intron chr1: 215577729-215577928 | SEQ ID NO: 631 |

KLKB1

| | |
|---|---|
| Canonical exon chr4: 186250243-186250402 | SEQ ID NO: 632 |
| Alternative exon chr4: 186250243-186250433 | SEQ ID NO: 633 |
| Canonical intron chr4: 186250403-186251218 | SEQ ID NO: 634 |
| Alternative intron chr4: 186250434-186251218 | SEQ ID NO: 635 |

KYAT1

| | |
|---|---|
| Canonical exon chr9: 128835997-128836073 | SEQ ID NO: 636 |
| Canonical exon chr9: 128836009-128836073 | SEQ ID NO: 637 |
| Alternative exon chr9: 128835997-128836105 | SEQ ID NO: 638 |
| Alternative exon chr9: 128836009-128836105 | SEQ ID NO: 639 |
| Canonical intron chr9: 128836074-128836801 | SEQ ID NO: 640 |
| Alternative intron chr9: 128836106-128836801 | SEQ ID NO: 641 |

LAMC3

| | |
|---|---|
| Canonical exon chr9: 131085524-131085723 | SEQ ID NO: 642 |
| Canonical exon chr9: 131085608-131085723 | SEQ ID NO: 643 |
| Alternative exon chr9: 131085524-131085871 | SEQ ID NO: 644 |
| Alternative exon chr9: 131085608-131085871 | SEQ ID NO: 645 |
| Canonical intron chr9: 131085724-131087475 | SEQ ID NO: 646 |
| Alternative intron chr9: 131085872-131087475 | SEQ ID NO: 647 |

LDAH

| | |
|---|---|
| Canonical exon chr2: 20686907-20687094 | SEQ ID NO: 648 |
| Alternative exon chr2: 20686838-20687094 | SEQ ID NO: 649 |
| Canonical intron chr2: 20685658-20686906 | SEQ ID NO: 650 |
| Alternative intron chr2: 20685658-20686837 | SEQ ID NO: 651 |

LIMS2

| | |
|---|---|
| Canonical exon chrcanonical_exon_chr2_127675014_127675102.txt | SEQ ID NO: 652 |
| Canonical exon chrcanonical_exon_chr2_127675014_127675190.txt | SEQ ID NO: 653 |
| Canonical exon chrcanonical_exon_chr2_127675014_127675286.txt | SEQ ID NO: 654 |
| Alternative exon chrnmd_exon_chr2_127674621_127675102.txt | SEQ ID NO: 655 |
| Alternative exon chrnmd_exon_chr2_127674621_127675190.txt | SEQ ID NO: 656 |
| Alternative exon chrnmd_exon_chr2_127674621_127675286.txt | SEQ ID NO: 657 |
| Canonical intron chrcanonical_intron_chr2_127673744_127675013.txt | SEQ ID NO: 658 |
| Alternative intron chrnmd_intron_chr2_127673744_127674620.txt | SEQ ID NO: 659 |

MALT1

| | |
|---|---|
| Canonical exon | SEQ ID NO: 660 |
| Canonical intron | SEQ ID NO: 661 |
| Alternative exon | SEQ ID NO: 662 |
| Alternative intron | SEQ ID NO: 663 |

MAP3K7

| | |
|---|---|
| Canonical exon chr6: 90560076-90560214 | SEQ ID NO: 664 |
| Alternative exon chr6: 90560076-90560234 | SEQ ID NO: 665 |
| Canonical intron chr6: 90560215-90561621 | SEQ ID NO: 666 |
| Alternative intron chr6: 90560235-90561621 | SEQ ID NO: 667 |

MAPK13

| | |
|---|---|
| Canonical exon chr6: 36130484-36130701 | SEQ ID NO: 668 |
| Canonical exon chr6: 36130513-36130701 | SEQ ID NO: 669 |
| Canonical exon chr6: 36130663-36130701 | SEQ ID NO: 670 |
| Alternative exon chr6: 36130484-36131157 | SEQ ID NO: 671 |
| Alternative exon chr6: 36130513-36131157 | SEQ ID NO: 672 |
| Alternative exon chr6: 36130663-36131157 | SEQ ID NO: 673 |
| Canonical intron chr6: 36130702-36131270 | SEQ ID NO: 674 |
| Alternative intron chr6: 36131158-36131270 | SEQ ID NO: 675 |

MCAT

| | |
|---|---|
| Canonical exon chr22: 43142926-43142964 | SEQ ID NO: 676 |
| Canonical exon chr22: 43142926-43143364 | SEQ ID NO: 677 |
| Canonical exon chr22: 43142926-43143398 | SEQ ID NO: 678 |
| Alternative exon chr22: 43142892-43142964 | SEQ ID NO: 679 |
| Alternative exon chr22: 43142892-43143364 | SEQ ID NO: 680 |
| Alternative exon chr22: 43142892-43143398 | SEQ ID NO: 681 |
| Canonical intron chr22: 43141250-43142925 | SEQ ID NO: 682 |
| Alternative intron chr22: 43141250-43142891 | SEQ ID NO: 683 |

MCEE

| | |
|---|---|
| Canonical exon chr2: 71130180-71130229 | SEQ ID NO: 684 |
| Canonical exon chr2: 71130180-71130239 | SEQ ID NO: 685 |
| Alternative exon chr2: 71129717-71130229 | SEQ ID NO: 686 |
| Alternative exon chr2: 71129717-71130239 | SEQ ID NO: 687 |
| Canonical intron chr2: 71124544-71130179 | SEQ ID NO: 688 |
| Alternative intron chr2: 71124544-71129716 | SEQ ID NO: 689 |

MPI

| | |
|---|---|
| Canonical exon chr15: 74890005-74890089 | SEQ ID NO: 690 |
| Canonical exon chr15: 74890039-74890089 | SEQ ID NO: 691 |
| Canonical exon chr15: 74890042-74890089 | SEQ ID NO: 692 |
| Canonical exon chr15: 74890052-74890089 | SEQ ID NO: 693 |
| Canonical exon chr15: 74890053-74890089 | SEQ ID NO: 694 |
| Canonical exon chr15: 74890062-74890089 | SEQ ID NO: 695 |
| Alternative exon chr15: 74890005-74890201 | SEQ ID NO: 696 |
| Alternative exon chr15: 74890039-74890201 | SEQ ID NO: 697 |
| Alternative exon chr15: 74890042-74890201 | SEQ ID NO: 698 |
| Alternative exon chr15: 74890052-74890201 | SEQ ID NO: 699 |
| Alternative exon chr15: 74890053-74890201 | SEQ ID NO: 700 |
| Alternative exon chr15: 74890062-74890201 | SEQ ID NO: 701 |
| Canonical intron chr15: 74890090-74890526 | SEQ ID NO: 702 |
| Alternative intron chr15: 74890202-74890526 | SEQ ID NO: 703 |

MSTO1

| | |
|---|---|
| Canonical exon chr1: 155611216-155611291 | SEQ ID NO: 704 |
| Alternative exon chr1: 155611216-155611355 | SEQ ID NO: 705 |
| Canonical intron chr1: 155611292-155611548 | SEQ ID NO: 706 |
| Alternative intron chr1: 155611356-155611548 | SEQ ID NO: 707 |

NBEAL2

| | |
|---|---|
| Canonical exon | SEQ ID NO: 708 |
| Canonical intron | SEQ ID NO: 709 |
| Alternative exon | SEQ ID NO: 710 |
| Alternative intron | SEQ ID NO: 711 |

NLE1

| | |
|---|---|
| Canonical exon | SEQ ID NO: 712 |
| Canonical intron | SEQ ID NO: 713 |
| Alternative exon | SEQ ID NO: 714 |
| Alternative intron | SEQ ID NO: 715 |

NLRC5

| | |
|---|---|
| Canonical exon | SEQ ID NO: 716 |
| Canonical intron | SEQ ID NO: 717 |
| Alternative exon | SEQ ID NO: 718 |
| Alternative intron | SEQ ID NO: 719 |

NOM1

| | |
|---|---|
| Canonical exon chr7: 156959851-156960174 | SEQ ID NO: 720 |
| Alternative exon chr7: 156959851-156960253 | SEQ ID NO: 721 |
| Canonical intron chr7: 156960175-156962150 | SEQ ID NO: 722 |
| Alternative intron chr7: 156960254-156962150 | SEQ ID NO: 723 |

NOP58

| | |
|---|---|
| Canonical exon chr2: 202291125-202291270 | SEQ ID NO: 724 |
| Alternative exon chr2: 202291021-202291270 | SEQ ID NO: 725 |
| Canonical intron chr2: 202290458-202291124 | SEQ ID NO: 726 |
| Alternative intron chr2: 202290458-202291020 | SEQ ID NO: 727 |

NPHP1

| | |
|---|---|
| Canonical exon chr2: 110178041-110178547 | SEQ ID NO: 728 |
| Canonical exon chr2: 110178423-110178547 | SEQ ID NO: 729 |
| Alternative exon chr2: 110178041-110178935 | SEQ ID NO: 730 |
| Alternative exon chr2: 110178423-110178935 | SEQ ID NO: 731 |
| Canonical intron chr2: 110178548-110179623 | SEQ ID NO: 732 |
| Alternative intron chr2: 110178936-110179623 | SEQ ID NO: 733 |

NPR1

| | |
|---|---|
| Canonical exon chr1: 153681704-153681839 | SEQ ID NO: 734 |
| Alternative exon chr1: 153681704-153682197 | SEQ ID NO: 735 |
| Canonical intron chr1: 153681840-153682497 | SEQ ID NO: 736 |
| Alternative intron chr1: 153682198-153682497 | SEQ ID NO: 737 |

NUP188

| | |
|---|---|
| Canonical exon chr9: 128988047-128988186 | SEQ ID NO: 738 |
| Alternative exon chr9: 128987916-128988186 | SEQ ID NO: 739 |
| Canonical intron chr9: 128987718-128988046 | SEQ ID NO: 740 |
| Alternative intron chr9: 128987718-128987915 | SEQ ID NO: 741 |

OSGEP

| | |
|---|---|
| Canonical exon | SEQ ID NO: 742 |
| Canonical intron | SEQ ID NO: 743 |
| Alternative exon | SEQ ID NO: 744 |
| Alternative intron | SEQ ID NO: 745 |

PABPC4

| | |
|---|---|
| Canonical exon chr1: 39571234-39571349 | SEQ ID NO: 746 |
| Alternative exon chr1: 39571097-39571349 | SEQ ID NO: 747 |
| Canonical intron chr1: 39570003-39571233 | SEQ ID NO: 748 |
| Alternative intron chr1: 39570003-39571096 | SEQ ID NO: 749 |

PCOLCE

| | |
|---|---|
| Canonical exon chr7: 100603959-100604217 | SEQ ID NO: 750 |
| Alternative exon chr7: 100603959-100604502 | SEQ ID NO: 751 |
| Canonical intron chr7: 100604218-100605090 | SEQ ID NO: 752 |
| Alternative intron chr7: 100604503-100605090 | SEQ ID NO: 753 |

PHKA2

| | |
|---|---|
| Canonical exon chrX: 18936055-18936150 | SEQ ID NO: 754 |
| Alternative exon chrX: 18936055-18936201 | SEQ ID NO: 755 |
| Canonical intron chrX: 18936151-18938626 | SEQ ID NO: 756 |
| Alternative intron chrX: 18936202-18938626 | SEQ ID NO: 757 |

PIDD1

| | |
|---|---|
| Canonical exon chr11: 802682-802891 | SEQ ID NO: 758 |
| Canonical exon chr11: 803174-803587 | SEQ ID NO: 759 |
| Alternative exon chr11: 802682-803085 | SEQ ID NO: 760 |
| Alternative exon chr11: 803174-803647 | SEQ ID NO: 761 |
| Canonical intron chr11: 802892-803173 | SEQ ID NO: 762 |
| Canonical intron chr11: 803588-804093 | SEQ ID NO: 763 |
| Alternative intron chr11: 803086-803173 | SEQ ID NO: 764 |
| Alternative intron chr11: 803648-804093 | SEQ ID NO: 765 |

PKD1

| | |
|---|---|
| Canonical exon chr16: 2105322-2105474 | SEQ ID NO: 766 |
| Alternative exon chr16: 2105322-2105662 | SEQ ID NO: 767 |
| Canonical intron chr16: 2105475-2105864 | SEQ ID NO: 768 |
| Alternative intron chr16: 2105663-2105864 | SEQ ID NO: 769 |

PLA2G6

| | |
|---|---|
| Canonical exon chr22: 38115527-38115681 | SEQ ID NO: 770 |
| Canonical exon chr22: 38115548-38115681 | SEQ ID NO: 771 |
| Alternative exon chr22: 38115527-38115849 | SEQ ID NO: 772 |
| Alternative exon chr22: 38115548-38115849 | SEQ ID NO: 773 |
| Canonical intron chr22: 38115682-38116074 | SEQ ID NO: 774 |
| Alternative intron chr22: 38115850-38116074 | SEQ ID NO: 775 |

PLD2

| | |
|---|---|
| Canonical exon chr17: 4814418-4814501 | SEQ ID NO: 776 |
| Canonical exon chr17: 4816620-4816746 | SEQ ID NO: 777 |
| Canonical exon chr17: 4818297-4818385 | SEQ ID NO: 778 |
| Alternative exon chr17: 4814367-4814501 | SEQ ID NO: 779 |
| Alternative exon chr17: 4816542-4816746 | SEQ ID NO: 780 |
| Alternative exon chr17: 4818297-4818406 | SEQ ID NO: 781 |
| Canonical intron chr17: 4810952-4814417 | SEQ ID NO: 782 |
| Canonical intron chr17: 4815935-4816619 | SEQ ID NO: 783 |
| Canonical intron chr17: 4818386-4818493 | SEQ ID NO: 784 |
| Alternative intron chr17: 4810952-4814366 | SEQ ID NO: 785 |
| Alternative intron chr17: 4815935-4816541 | SEQ ID NO: 786 |
| Alternative intron chr17: 4818407-4818493 | SEQ ID NO: 787 |

PLEKHG5

| | |
|---|---|
| Canonical exon chr1: 6470990-6471100 | SEQ ID NO: 788 |
| Alternative exon chr1: 6470990-6471240 | SEQ ID NO: 789 |
| Canonical intron chr1: 6471101-6471487 | SEQ ID NO: 790 |
| Alternative intron chr1: 6471241-6471487 | SEQ ID NO: 791 |

PNPO

| | |
|---|---|
| Canonical exon | SEQ ID NO: 792 |
| Canonical exon | SEQ ID NO: 793 |
| Canonical exon | SEQ ID NO: 794 |
| Canonical exon | SEQ ID NO: 795 |
| Canonical exon | SEQ ID NO: 796 |
| Canonical intron | SEQ ID NO: 797 |
| Alternative exon | SEQ ID NO: 798 |
| Alternative exon | SEQ ID NO: 799 |
| Alternative exon | SEQ ID NO: 800 |
| Alternative exon | SEQ ID NO: 801 |
| Alternative exon | SEQ ID NO: 802 |
| Alternative intron | SEQ ID NO: 803 |

POLE

| | |
|---|---|
| Canonical exon | SEQ ID NO: 804 |
| Canonical intron | SEQ ID NO: 805 |
| Alternative exon | SEQ ID NO: 806 |
| Alternative intron | SEQ ID NO: 807 |

PON2

| | |
|---|---|
| Canonical exon chr7: 95416242-95416297 | SEQ ID NO: 808 |
| Alternative exon chr7: 95416172-95416297 | SEQ ID NO: 809 |
| Canonical intron chr7: 95412478-95416241 | SEQ ID NO: 810 |
| Alternative intron chr7: 95412478-95416171 | SEQ ID NO: 811 |

PRMT7

| | |
|---|---|
| Canonical exon chr16: 68353492-68353566 | SEQ ID NO: 812 |
| Alternative exon chr16: 68353395-68353566 | SEQ ID NO: 813 |
| Canonical intron chr16: 68352410-68353491 | SEQ ID NO: 814 |
| Alternative intron chr16: 68352410-68353394 | SEQ ID NO: 815 |

PRODH

| | |
|---|---|
| Canonical exon | SEQ ID NO: 816 |
| Canonical intron | SEQ ID NO: 817 |
| Alternative exon | SEQ ID NO: 818 |
| Alternative intron | SEQ ID NO: 819 |

PRPF3

| | |
|---|---|
| Canonical exon | SEQ ID NO: 820 |
| Canonical intron | SEQ ID NO: 821 |
| Alternative exon | SEQ ID NO: 822 |
| Alternative intron | SEQ ID NO: 823 |

PRPF4

| | |
|---|---|
| Canonical exon | SEQ ID NO: 824 |
| Canonical intron | SEQ ID NO: 825 |
| Alternative exon | SEQ ID NO: 826 |
| Alternative intron | SEQ ID NO: 827 |

PYCR1

| | |
|---|---|
| Canonical exon chr17: 81937180-81937239 | SEQ ID NO: 828 |
| Alternative exon chr17: 81936970-81937239 | SEQ ID NO: 829 |
| Canonical intron chr17: 81936862-81937179 | SEQ ID NO: 830 |
| Alternative intron chr17: 81936862-81936969 | SEQ ID NO: 831 |

RAD52

| | |
|---|---|
| Canonical exon | SEQ ID NO: 832 |
| Canonical exon | SEQ ID NO: 833 |
| Canonical intron | SEQ ID NO: 834 |
| Canonical intron | SEQ ID NO: 835 |
| Alternative exon | SEQ ID NO: 836 |
| Alternative exon | SEQ ID NO: 837 |
| Alternative intron | SEQ ID NO: 838 |
| Alternative intron | SEQ ID NO: 839 |

REXO1

| | |
|---|---|
| Canonical exon chr19: 1817219-1817329 | SEQ ID NO: 840 |
| Canonical exon chr19: 1819934-1820057 | SEQ ID NO: 841 |
| Alternative exon chr19: 1817219-1817458 | SEQ ID NO: 842 |
| Alternative exon chr19: 1819934-1820180 | SEQ ID NO: 843 |
| Canonical intron chr19: 1817330-1817706 | SEQ ID NO: 844 |
| Canonical intron chr19: 1820058-1820263 | SEQ ID NO: 845 |
| Alternative intron chr19: 1817459-1817706 | SEQ ID NO: 846 |
| Alternative intron chr19: 1820181-1820263 | SEQ ID NO: 847 |

RFX5

| | |
|---|---|
| Canonical exon chr1: 151344417-151344536 | SEQ ID NO: 848 |
| Canonical exon chr1: 151344521-151344536 | SEQ ID NO: 849 |
| Alternative exon chr1: 151344417-151344604 | SEQ ID NO: 850 |
| Alternative exon chr1: 151344521-151344604 | SEQ ID NO: 851 |
| Canonical intron chr1: 151344537-151344727 | SEQ ID NO: 852 |
| Alternative intron chr1: 151344605-151344727 | SEQ ID NO: 853 |

RHBDF2

| | |
|---|---|
| Canonical exon chr17: 76474730-76474804 | SEQ ID NO: 854 |
| Alternative exon chr17: 76474660-76474804 | SEQ ID NO: 855 |
| Canonical intron chr17: 76474535-76474729 | SEQ ID NO: 856 |
| Alternative intron chr17: 76474535-76474659 | SEQ ID NO: 857 |

RMND1

| | |
|---|---|
| Canonical exon chr6: 151436446-151436554 | SEQ ID NO: 858 |
| Alternative exon chr6: 151436420-151436554 | SEQ ID NO: 859 |
| Canonical intron chr6: 151433231-151436445 | SEQ ID NO: 860 |
| Alternative intron chr6: 151433231-151436419 | SEQ ID NO: 861 |

ROBO3

| | |
|---|---|
| Canonical exon | SEQ ID NO: 862 |
| Canonical exon | SEQ ID NO: 863 |
| Canonical exon | SEQ ID NO: 864 |
| Canonical intron | SEQ ID NO: 865 |
| Canonical intron | SEQ ID NO: 866 |
| Alternative exon | SEQ ID NO: 867 |
| Alternative exon | SEQ ID NO: 868 |
| Alternative exon | SEQ ID NO: 869 |
| Alternative intron | SEQ ID NO: 870 |
| Alternative intron | SEQ ID NO: 871 |

RPGRIP1

| | |
|---|---|
| Canonical exon chr14: 21321259-21321402 | SEQ ID NO: 872 |
| Canonical exon chr14: 21321364-21321402 | SEQ ID NO: 873 |
| Canonical exon chr14: 21321373-21321402 | SEQ ID NO: 874 |
| Alternative exon chr14: 21321259-21321629 | SEQ ID NO: 875 |
| Alternative exon chr14: 21321364-21321629 | SEQ ID NO: 876 |
| Alternative exon chr14: 21321373-21321629 | SEQ ID NO: 877 |
| Canonical intron chr14: 21321403-21321853 | SEQ ID NO: 878 |
| Alternative intron chr14: 21321630-21321853 | SEQ ID NO: 879 |

RTTN

| | |
|---|---|
| Canonical exon | SEQ ID NO: 880 |
| Canonical intron | SEQ ID NO: 881 |
| Alternative exon | SEQ ID NO: 882 |
| Alternative intron | SEQ ID NO: 883 |

RUFY3

| | |
|---|---|
| Canonical exon chr4: 70793785-70793904 | SEQ ID NO: 884 |
| Alternative exon chr4: 70793765-70793904 | SEQ ID NO: 885 |
| Canonical intron chr4: 70789593-70793784 | SEQ ID NO: 886 |
| Alternative intron chr4: 70789593-70793764 | SEQ ID NO: 887 |

SEMA3B

| | |
|---|---|
| Canonical exon chr3: 50275302-50275459 | SEQ ID NO: 888 |
| Alternative exon chr3: 50275177-50275459 | SEQ ID NO: 889 |
| Canonical intron chr3: 50275054-50275301 | SEQ ID NO: 890 |
| Alternative intron chr3: 50275054-50275176 | SEQ ID NO: 891 |

SEMA3F

| | |
|---|---|
| Canonical exon chr3: 50185443-50185531 | SEQ ID NO: 892 |
| Alternative exon chr3: 50185403-50185531 | SEQ ID NO: 893 |
| Canonical intron chr3: 50184815-50185442 | SEQ ID NO: 894 |
| Alternative intron chr3: 50184815-50185402 | SEQ ID NO: 895 |

SH2D3A

| | |
|---|---|
| Canonical exon chr19: 6754052-6754425 | SEQ ID NO: 896 |
| Canonical exon chr19: 6754251-6754425 | SEQ ID NO: 897 |
| Alternative exon chr19: 6754052-6754448 | SEQ ID NO: 898 |
| Alternative exon chr19: 6754251-6754448 | SEQ ID NO: 899 |
| Canonical intron chr19: 6754426-6754615 | SEQ ID NO: 900 |
| Alternative intron chr19: 6754449-6754615 | SEQ ID NO: 901 |

SIK3

| | |
|---|---|
| Canonical exon | SEQ ID NO: 902 |
| Canonical intron | SEQ ID NO: 903 |
| Alternative exon | SEQ ID NO: 904 |
| Alternative intron | SEQ ID NO: 905 |

SIRT3

| | |
|---|---|
| Canonical exon chr11: 230452-230552 | SEQ ID NO: 906 |
| Alternative exon chr11: 230452-230706 | SEQ ID NO: 907 |
| Canonical intron chr11: 230553-232982 | SEQ ID NO: 908 |
| Alternative intron chr11: 230707-232982 | SEQ ID NO: 909 |

SKIV2L

| | |
|---|---|
| Canonical exon chr6: 31968686-31968796 | SEQ ID NO: 910 |
| Alternative exon chr6: 31968623-31968796 | SEQ ID NO: 911 |
| Canonical intron chr6: 31968539-31968685 | SEQ ID NO: 912 |
| Alternative intron chr6: 31968539-31968622 | SEQ ID NO: 913 |

SLC2A13

| | |
|---|---|
| Canonical exon chr12: 39830103-39830228 | SEQ ID NO: 914 |
| Alternative exon chr12: 39830103-39830480 | SEQ ID NO: 915 |
| Canonical intron chr12: 39830229-39864761 | SEQ ID NO: 916 |
| Alternative intron chr12: 39830481-39864761 | SEQ ID NO: 917 |

SLC12A7

| | |
|---|---|
| Canonical exon chr5: 1076138-1076236 | SEQ ID NO: 918 |
| Canonical intron chr5: 1075491-1076137 | SEQ ID NO: 919 |
| Alternative exon chr5: 1075891-1076236 | SEQ ID NO: 920 |
| Alternative intron chr5: 1075491-1075890 | SEQ ID NO: 921 |

SLC22A3

| | |
|---|---|
| Canonical exon chr6: 160348378-160348848 | SEQ ID NO: 922 |
| Alternative exon chr6: 160348378-160349058 | SEQ ID NO: 923 |
| Canonical intron chr6: 160348849-160397978 | SEQ ID NO: 924 |
| Alternative intron chr6: 160349059-160397978 | SEQ ID NO: 925 |

SLC25A13

| | |
|---|---|
| Canonical exon chr7: 96170045-96170125 | SEQ ID NO: 926 |
| Alternative exon chr7: 96170045-96170149 | SEQ ID NO: 927 |
| Canonical intron chr7: 96170126-96171471 | SEQ ID NO: 928 |
| Alternative intron chr7: 96170150-96171471 | SEQ ID NO: 929 |

SLC25A37

| | |
|---|---|
| Canonical exon chr8: 23566108-23566336 | SEQ ID NO: 930 |
| Alternative exon chr8: 23566108-23566813 | SEQ ID NO: 931 |
| Canonical intron chr8: 23566337-23568321 | SEQ ID NO: 932 |
| Alternative intron chr8: 23566814-s23568321 | SEQ ID NO: 933 |

SLC27A5

| | |
|---|---|
| Canonical intron | SEQ ID NO: 934 |
| Canonical exon | SEQ ID NO: 935 |
| Alternative intron | SEQ ID NO: 936 |
| Alternative exon | SEQ ID NO: 937 |

SLC30A9

| | |
|---|---|
| Canonical exon chr4: 42066550-42066621 | SEQ ID NO: 938 |
| Alternative exon chr4: 42066485-42066621 | SEQ ID NO: 939 |
| Canonical intron chr4: 42065350-42066549 | SEQ ID NO: 940 |
| Alternative intron chr4: 42065350-42066484 | SEQ ID NO: 941 |

SLC30A10

| | |
|---|---|
| Canonical exon chr1: 219927028-219927105 | SEQ ID NO: 942 |
| Alternative exon chr1: 219927028-219927143 | SEQ ID NO: 943 |
| Canonical intron chr1: 219927106-219927800 | SEQ ID NO: 944 |
| Alternative intron chr1: 219927144-219927800 | SEQ ID NO: 945 |

SMPD1

| | |
|---|---|
| Canonical exon chr11: 6391384-6392156 | SEQ ID NO: 946 |
| Canonical exon chr11: 6391387-6392156 | SEQ ID NO: 947 |
| Alternative exon chr11: 6391384-6392196 | SEQ ID NO: 948 |
| Alternative exon chr11: 6391387-6392196 | SEQ ID NO: 949 |
| Canonical intron chr11: 6392157-6393215 | SEQ ID NO: 950 |
| Alternative intron chr11: 6392197-6393215 | SEQ ID NO: 951 |

SMTN

| | |
|---|---|
| Canonical exon chr22: 31088513-31088574 | SEQ ID NO: 952 |
| Canonical exon chr22: 31088513-31088605 | SEQ ID NO: 953 |
| Canonical exon chr22: 31088513-31088606 | SEQ ID NO: 954 |
| Alternative exon chr22: 31088454-31088574 | SEQ ID NO: 955 |
| Alternative exon chr22: 31088454-31088605 | SEQ ID NO: 956 |
| Alternative exon chr22: 31088454-31088606 | SEQ ID NO: 957 |
| Canonical intron chr22: 31088114-31088512 | SEQ ID NO: 958 |
| Alternative intron chr22: 31088114-31088453 | SEQ ID NO: 959 |

SNRPB

| | |
|---|---|
| Canonical exon chr20: 2467607-2467758 | SEQ ID NO: 960 |
| Alternative exon chr20: 2467192-2467758 | SEQ ID NO: 961 |
| Canonical intron chr20: 2465820-2467606 | SEQ ID NO: 962 |
| Alternative intron chr20: 2465820-2467191 | SEQ ID NO: 963 |

SP140

| | |
|---|---|
| Canonical exon chr2: 230309924-230310039 | SEQ ID NO: 964 |
| Alternative exon chr2: 230309924-230310211 | SEQ ID NO: 965 |
| Canonical intron chr2: 230310040-230310742 | SEQ ID NO: 966 |
| Alternative intron chr2: 230310212-230310742 | SEQ ID NO: 967 |

STAMBP

| | |
|---|---|
| Canonical exon chr2: 73844813-73844888 | SEQ ID NO: 968 |
| Alternative exon chr2: 73844813-73845036 | SEQ ID NO: 969 |
| Canonical intron chr2: 73844889-73845166 | SEQ ID NO: 970 |
| Alternative intron chr2: 73845037-73845166 | SEQ ID NO: 971 |

STXBP2

| | |
|---|---|
| Canonical exon chr19: 7646249-7646344 | SEQ ID NO: 972 |
| Alternative exon chr19: 7645760-7646344 | SEQ ID NO: 973 |
| Canonical intron chr19: 7645307-7646248 | SEQ ID NO: 974 |
| Alternative intron chr19: 7645307-7645759 | SEQ ID NO: 975 |

SULF2

| | |
|---|---|
| Canonical exon chr20: 47666260-47666488 | SEQ ID NO: 976 |
| Alternative exon chr20: 47666088-47666488 | SEQ ID NO: 977 |
| Canonical intron chr20: 47665954-47666259 | SEQ ID NO: 978 |
| Alternative intron chr20: 47665954-47666087 | SEQ ID NO: 979 |

SYNGAP1

| | |
|---|---|
| Canonical exon | SEQ ID NO: 980 |
| Canonical intron | SEQ ID NO: 981 |
| Alternative exon | SEQ ID NO: 982 |
| Alternative intron | SEQ ID NO: 983 |

SYNJ2

| | |
|---|---|
| Canonical exon chr6: 158061992-158062164 | SEQ ID NO: 984 |
| Alternative exon chr6: 158061992-158062221 | SEQ ID NO: 985 |
| Canonical intron chr6: 158062165-158063790 | SEQ ID NO: 986 |
| Alternative intron chr6: 158062222-158063790 | SEQ ID NO: 987 |

TAZ

| | |
|---|---|
| Canonical exon | SEQ ID NO: 988 |
| Canonical intron | SEQ ID NO: 989 |
| Alternative exon | SEQ ID NO: 990 |
| Alternative intron | SEQ ID NO: 991 |

TBL2

| | |
|---|---|
| Canonical exon chr7: 73574383-73574513 | SEQ ID NO: 992 |
| Alternative exon chr7: 73574383-73574804 | SEQ ID NO: 993 |
| Canonical intron chr7: 73574514-73578419 | SEQ ID NO: 994 |
| Alternative intron chr7: 73574805-73578419 | SEQ ID NO: 995 |

TDRD7

| | |
|---|---|
| Canonical exon chr9: 97478439-97478573 | SEQ ID NO: 996 |
| Alternative exon chr9: 97478439-97478635 | SEQ ID NO: 997 |
| Canonical intron chr9: 97478574-97480827 | SEQ ID NO: 998 |
| Alternative intron chr9: 97478636-97480827 | SEQ ID NO: 999 |

TECPR2

| | |
|---|---|
| Canonical exon chr14: 102497570-102497719 | SEQ ID NO: 1000 |
| Alternative exon chr14: 102497469-102497719 | SEQ ID NO: 1001 |
| Canonical intron chr14: 102497121-102497569 | SEQ ID NO: 1002 |
| Alternative intron chr14: 102497121-102497468 | SEQ ID NO: 1003 |

TFB1M

| | |
|---|---|
| Canonical exon chr6: 155314296-155314484 | SEQ ID NO: 1004 |
| Alternative exon chr6: 155314117-155314484 | SEQ ID NO: 1005 |
| Canonical intron chr6: 155311340-155314295 | SEQ ID NO: 1006 |
| Alternative intron chr6: 155311340-155314116 | SEQ ID NO: 1007 |

TM6SF1

| | |
|---|---|
| Canonical exon chr15: 83119578-83119681 | SEQ ID NO: 1008 |
| Alternative exon chr15: 83119578-83119734 | SEQ ID NO: 1009 |
| Canonical intron chr15: 83119682-83121920 | SEQ ID NO: 1010 |
| Alternative intron chr15: 83119735-83121920 | SEQ ID NO: 1011 |

TNK2

| | |
|---|---|
| Canonical exon chr3: 195870114-195870205 | SEQ ID NO: 1012 |
| Alternative exon chr3: 195870114-195870378 | SEQ ID NO: 1013 |
| Canonical intron chr3: 195870206-195872275 | SEQ ID NO: 1014 |
| Alternative intron chr3: 195870379-195872275 | SEQ ID NO: 1015 |

TOE1

| | |
|---|---|
| Canonical exon chr1: 45342843-45343002 | SEQ ID NO: 1016 |
| Alternative exon chr1: 45342735-45343002 | SEQ ID NO: 1017 |
| Canonical intron chr1: 45342644-45342842 | SEQ ID NO: 1018 |
| Alternative intron chr1: 45342644-45342734 | SEQ ID NO: 1019 |

TOR1B

| | |
|---|---|
| Canonical exon | SEQ ID NO: 1020 |
| Canonical intron | SEQ ID NO: 1021 |
| Alternative exon | SEQ ID NO: 1022 |
| Alternative intron | SEQ ID NO: 1023 |

TRAPPC6B

| | |
|---|---|
| Canonical exon chr14: 39159483-39159550 | SEQ ID NO: 1024 |
| Alternative exon chr14: 39159450-39159550 | SEQ ID NO: 1025 |
| Canonical intron chr14: 39158403-39159482 | SEQ ID NO: 1026 |
| Alternative intron chr14: 39158403-39159449 | SEQ ID NO: 1027 |

TRIP4

| | |
|---|---|
| Canonical exon chr15: 64387836-64387964 | SEQ ID NO: 1028 |
| Alternative exon chr15: 64387836-64388048 | SEQ ID NO: 1029 |
| Canonical intron chr15: 64387965-64393945 | SEQ ID NO: 1030 |
| Alternative intron chr15: 64388049-64393945 | SEQ ID NO: 1031 |

TRMT2A

| | |
|---|---|
| Canonical exon | SEQ ID NO: 1032 |
| Canonical intron | SEQ ID NO: 1033 |
| Alternative exon | SEQ ID NO: 1034 |
| Alternative intron | SEQ ID NO: 1035 |

TRMU

| | |
|---|---|
| Canonical exon chr22: 46335714-46335846 | SEQ ID NO: 1036 |
| Canonical exon chr22: 46335725-46335846 | SEQ ID NO: 1037 |
| Canonical exon chr22: 46335745-46335846 | SEQ ID NO: 1038 |
| Alternative exon chr22: 46335714-46336106 | SEQ ID NO: 1039 |
| Alternative exon chr22: 46335725-46336106 | SEQ ID NO: 1040 |
| Alternative exon chr22: 46335745-46336106 | SEQ ID NO: 1041 |
| Canonical intron chr22: 46335847-46337778 | SEQ ID NO: 1042 |
| Alternative intron chr22: 46336107-46337778 | SEQ ID NO: 1043 |

TRPV4

| | |
|---|---|
| Canonical exon chr12: 109788400-109788716 | SEQ ID NO: 1044 |
| Alternative exon chr12: 109788400-109788742 | SEQ ID NO: 1045 |
| Canonical intron chr12: 109788717-109792362 | SEQ ID NO: 1046 |
| Alternative intron chr12: 109788743-109792362 | SEQ ID NO: 1047 |

TTC19

| | |
|---|---|
| Canonical exon chr17: 16000118-16000245 | SEQ ID NO: 1048 |
| Alternative exon chr17: 16000118-16000382 | SEQ ID NO: 1049 |
| Canonical intron chr17: 16000246-16001914 | SEQ ID NO: 1050 |
| Alternative intron chr17: 16000383-16001914 | SEQ ID NO: 1051 |

TYMP

| | |
|---|---|
| Canonical exon chr22: 50527165-50527283 | SEQ ID NO: 1052 |
| Canonical exon chr22: 50527165-50527328 | SEQ ID NO: 1053 |
| Alternative exon chr22: 50526898-50527283 | SEQ ID NO: 1054 |
| Alternative exon chr22: 50526898-50527328 | SEQ ID NO: 1055 |
| Canonical intron chr22: 50526739-50527164 | SEQ ID NO: 1056 |
| Alternative intron chr22: 50526739-50526897 | SEQ ID NO: 1057 |

UMPS

| | |
|---|---|
| Canonical exon chr3: 124737568-124738239 | SEQ ID NO: 1058 |
| Alternative exon chr3: 124737568-124738443 | SEQ ID NO: 1059 |
| Canonical intron chr3: 124738240-124740023 | SEQ ID NO: 1060 |
| Alternative intron chr3: 124738444-124740023 | SEQ ID NO: 1061 |

UROD

| | |
|---|---|
| Canonical exon chr1: 45012907-45013019 | SEQ ID NO: 1062 |
| Alternative exon chr1: 45012857-45013019 | SEQ ID NO: 1063 |
| Canonical intron chr1: 45012286-45012906 | SEQ ID NO: 1064 |
| Alternative intron chr1: 45012286-45012856 | SEQ ID NO: 1065 |

WDR11

| | |
|---|---|
| Canonical exon chr10: 120851362-120851506 | SEQ ID NO: 1066 |
| Alternative exon chr10: 120851362-120851527 | SEQ ID NO: 1067 |
| Canonical intron chr10: 120851507-120852523 | SEQ ID NO: 1068 |
| Alternative intron chr10: 120851528-120852523 | SEQ ID NO: 1069 |

WDR62

| | |
|---|---|
| Canonical exon | SEQ ID NO: 1070 |
| Canonical intron | SEQ ID NO: 1071 |
| Alternative exon | SEQ ID NO: 1072 |
| Alternative intron | SEQ ID NO: 1073 |

WIPI1

| | |
|---|---|
| Canonical exon chr17: 68434556-68434626 | SEQ ID NO: 1074 |
| Alternative exon chr17: 68434420-68434626 | SEQ ID NO: 1075 |
| Canonical intron chr17: 68433576-68434555 | SEQ ID NO: 1076 |
| Alternative intron chr17: 68433576-68434419 | SEQ ID NO: 1077 |

WRAP53

| | |
|---|---|
| Canonical exon chr17: 7701459-7701549 | SEQ ID NO: 1078 |
| Alternative exon chr17: 7701427-7701549 | SEQ ID NO: 1079 |
| Canonical intron chr17: 7700830-7701458 | SEQ ID NO: 1080 |
| Alternative intron chr17: 7700830-7701426 | SEQ ID NO: 1081 |

XPO1

| | |
|---|---|
| Canonical exon chr2: 61492035-61492198 | SEQ ID NO: 1082 |
| Alternative exon chr2: 61492035-61492250 | SEQ ID NO: 1083 |
| Canonical intron chr2: 61492199-61492324 | SEQ ID NO: 1084 |
| Alternative intron chr2: 61492251-61492324 | SEQ ID NO: 1085 |

YY1AP1

| | |
|---|---|
| Canonical exon chr1: 155688930-155689000 | SEQ ID NO: 1086 |
| Alternative exon chr1: 155688579-155689000 | SEQ ID NO: 1087 |
| Canonical intron chr1: 155688202-155688929 | SEQ ID NO: 1088 |
| Alternative intron chr1: 155688202-155688578 | SEQ ID NO: 1089 |

ZC3H14

| | |
|---|---|
| Canonical exon chr14: 88607243-88607363 | SEQ ID NO: 1090 |
| Canonical exon chr14: 88607284-88607363 | SEQ ID NO: 1091 |
| Canonical intron chr14: 88607364-88609266 | SEQ ID NO: 1092 |
| Alternative exon chr14: 88607243-88607394 | SEQ ID NO: 1093 |
| Alternative exon chr14: 88607243-88607425 | SEQ ID NO: 1094 |
| Alternative exon chr14: 88607284-88607394 | SEQ ID NO: 1095 |
| Alternative exon chr14: 88607284-88607425 | SEQ ID NO: 1096 |
| Alternative intron chr14: 88607395-88609266 | SEQ ID NO: 1097 |
| Alternative intron chr14: 88607426-88609266 | SEQ ID NO: 1098 |

TABLE 4
Target: ABCA5

| | |
|---|---|
| pre-mRNA | ENST00000392676.8 (SEQ ID NO: 15288); ENST00000586601.1 (SEQ ID NO: 10230); |
| transcript | ENST00000586811.1 (SEQ ID NO: 10232); ENST00000586995.5 (SEQ ID NO: 15289); |
| | ENST00000587607.5 (SEQ ID NO: 10235); ENST00000588106.1 (SEQ ID NO: 10237); |
| | ENST00000588665.5 (SEQ ID NO: 10239); ENST00000588877.5 (SEQ ID NO: 15290); |
| | ENST00000589609.1 (SEQ ID NO: 10242); ENST00000589975.5 (SEQ ID NO: 10244); |
| | ENST00000591234.5 (SEQ ID NO: 15291); ENST00000592568.1 (SEQ ID NO: 10247); |
| | ENST00000593153.5 (SEQ ID NO: 15292); ENST00000593253.5 (SEQ ID NO: 10250) |
| transcript | ENST00000392676.8 (SEQ ID NO: 10229); ENST00000586601.1 (SEQ ID NO: 10231); |
| | ENST00000586811.1 (SEQ ID NO: 10233); ENST00000586995.5 (SEQ ID NO: 10234); |
| | ENST00000587607.5 (SEQ ID NO: 10236); ENST00000588106.1 (SEQ ID NO: 10238); |
| | ENST00000588665.5 (SEQ ID NO: 10240); ENST00000588877.5 (SEQ ID NO: 10241); |
| | ENST00000589609.1 (SEQ ID NO: 10243); ENST00000589975.5 (SEQ ID NO: 10245); |
| | ENST00000591234.5 (SEQ ID NO: 10246); ENST00000592568.1 (SEQ ID NO: 10248); |
| | ENST00000593153.5 (SEQ ID NO: 10249); ENST00000593253.5 (SEQ ID NO: 10251) |

Target: ABCA7

| | |
|---|---|
| pre-mRNA | ENST00000263094.11 (SEQ ID NO: 10252); ENST00000433129.6 (SEQ ID NO: 10254); |
| transcript | ENST00000435683.7 (SEQ ID NO: 10256); ENST00000524383.1 (SEQ ID NO: 10258); |
| | ENST00000524850.5 (SEQ ID NO: 10260); ENST00000525073.6 (SEQ ID NO: 10262); |
| | ENST00000525238.2 (SEQ ID NO: 10264); ENST00000526885.5 (SEQ ID NO: 10266); |
| | ENST00000527496.1 (SEQ ID NO: 10268); ENST00000529442.7 (SEQ ID NO: 10270); |
| | ENST00000530092.2 (SEQ ID NO: 10272); ENST00000530703.1 (SEQ ID NO: 10274); |
| | ENST00000531467.5 (SEQ ID NO: 10276); ENST00000531478.5 (SEQ ID NO: 10278); |
| | ENST00000532194.3 (SEQ ID NO: 10280); ENST00000533574.1 (SEQ ID NO: 10282); |
| | ENST00000612569.1 (SEQ ID NO: 10284); ENST00000673773.1 (SEQ ID NO: 10286) |
| transcript | ENST00000263094.11 (SEQ ID NO: 10253); ENST00000433129.6 (SEQ ID NO: 10255); |
| | ENST00000435683.7 (SEQ ID NO: 10257); ENST00000524383.1 (SEQ ID NO: 10259); |
| | ENST00000524850.5 (SEQ ID NO: 10261); ENST00000525073.6 (SEQ ID NO: 10263); |
| | ENST00000525238.2 (SEQ ID NO: 10265); ENST00000526885.5 (SEQ ID NO: 10267); |
| | ENST00000527496.1 (SEQ ID NO: 10269); ENST00000529442.7 (SEQ ID NO: 10271); |
| | ENST00000530092.2 (SEQ ID NO: 10273); ENST00000530703.1 (SEQ ID NO: 10275); |
| | ENST00000531467.5 (SEQ ID NO: 10277); ENST00000531478.5 (SEQ ID NO: 10279); |
| | ENST00000532194.3 (SEQ ID NO: 10281); ENST00000533574.1 (SEQ ID NO: 10283); |
| | ENST00000612569.1 (SEQ ID NO: 10285); ENST00000673773.1 (SEQ ID NO: 10287) |

Target: ABCC3

| | |
|---|---|
| pre-mRNA | ENST00000285238.13 (SEQ ID NO: 15293); ENST00000427699.5 (SEQ ID NO: 15294); |
| transcript | ENST00000502426.5 (SEQ ID NO: 15295); ENST00000503304.1 (SEQ ID NO: 10291); |
| | ENST00000503337.1 (SEQ ID NO: 10293); ENST00000504586.1 (SEQ ID NO: 10295); |
| | ENST00000505699.5 (SEQ ID NO: 15296); ENST00000506464.5 (SEQ ID NO: 10298); |
| | ENST00000508929.1 (SEQ ID NO: 10300); ENST00000510633.5 (SEQ ID NO: 10302); |
| | ENST00000510891.1 (SEQ ID NO: 10304); ENST00000513511.5 (SEQ ID NO: 10306); |
| | ENST00000513589.1 (SEQ ID NO: 10308); ENST00000513745.1 (SEQ ID NO: 10310); |
| | ENST00000515070.1 (SEQ ID NO: 10312); ENST00000515585.1 (SEQ ID NO: 10314); |
| | ENST00000515707.1 (SEQ ID NO: 10316); ENST00000571855.1 (SEQ ID NO: 10318) |
| transcript | ENST00000285238.13 (SEQ ID NO: 10288); ENST00000427699.5 (SEQ ID NO: 10289); |
| | ENST00000502426.5 (SEQ ID NO: 10290); ENST00000503304.1 (SEQ ID NO: 10292); |
| | ENST00000503337.1 (SEQ ID NO: 10294); ENST00000504586.1 (SEQ ID NO: 10296); |
| | ENST00000505699.5 (SEQ ID NO: 10297); ENST00000506464.5 (SEQ ID NO: 10299); |
| | ENST00000508929.1 (SEQ ID NO: 10301); ENST00000510633.5 (SEQ ID NO: 10303); |
| | ENST00000510891.1 (SEQ ID NO: 10305); ENST00000513511.5 (SEQ ID NO: 10307); |
| | ENST00000513589.1 (SEQ ID NO: 10309); ENST00000513745.1 (SEQ ID NO: 10311); |
| | ENST00000515070.1 (SEQ ID NO: 10313); ENST00000515585.1 (SEQ ID NO: 10315); |
| | ENST00000515707.1 (SEQ ID NO: 10317); ENST00000571855.1 (SEQ ID NO: 10319) |

Target: ABCC5

| | |
|---|---|
| pre-mRNA | ENST00000265586.10 (SEQ ID NO: 15297); ENST00000334444.11 (SEQ ID NO: 15298); |
| transcript | ENST00000382494.6 (SEQ ID NO: 15299); ENST00000392579.6 (SEQ ID NO: 15300); |
| | ENST00000427120.6 (SEQ ID NO: 15301); ENST00000437205.5 (SEQ ID NO: 15302); |
| | ENST00000437341.5 (SEQ ID NO: 10326); ENST00000438979.6 (SEQ ID NO: 15303); |
| | ENST00000443376.5 (SEQ ID NO: 15304); ENST00000443497.1 (SEQ ID NO: 10330); |
| | ENST00000446941.2 (SEQ ID NO: 10332); ENST00000476402.1 (SEQ ID NO: 10334); |
| | ENST00000492216.1 (SEQ ID NO: 10336) |
| transcript | ENST00000265586.10 (SEQ ID NO: 10320); ENST00000334444.11 (SEQ ID NO: 10321); |
| | ENST00000382494.6 (SEQ ID NO: 10322); ENST00000392579.6 (SEQ ID NO: 10323); |
| | ENST00000427120.6 (SEQ ID NO: 10324); ENST00000437205.5 (SEQ ID NO: 10325); |
| | ENST00000437341.5 (SEQ ID NO: 10327); ENST00000438979.6 (SEQ ID NO: 10328); |
| | ENST00000443376.5 (SEQ ID NO: 10329); ENST00000443497.1 (SEQ ID NO: 10331); |
| | ENST00000446941.2 (SEQ ID NO: 10333); ENST00000476402.1 (SEQ ID NO: 10335); |
| | ENST00000492216.1 (SEQ ID NO: 10337) |

Target: ABCC8

| | |
|---|---|
| pre-mRNA | ENST00000302539.9 (SEQ ID NO: 15305); ENST00000389817.7 (SEQ ID NO: 15306); |
| transcript | ENST00000524561.1 (SEQ ID NO: 10340); ENST00000525022.1 (SEQ ID NO: 10342); |
| | ENST00000526002.1 (SEQ ID NO: 10344); ENST00000526037.5 (SEQ ID NO: 10346); |
| | ENST00000526168.5 (SEQ ID NO: 10348); ENST00000526921.5 (SEQ ID NO: 10350); |
| | ENST00000527905.5 (SEQ ID NO: 15307); ENST00000528202.5 (SEQ ID NO: 10353); |
| | ENST00000528374.1 (SEQ ID NO: 10355); ENST00000529967.5 (SEQ ID NO: 10357); |
| | ENST00000530147.5 (SEQ ID NO: 10359); ENST00000531137.1 (SEQ ID NO: 10361); |
| | ENST00000531642.5 (SEQ ID NO: 10363); ENST00000531891.1 (SEQ ID NO: 10365); |
| | ENST00000531911.1 (SEQ ID NO: 10367); ENST00000532220.1 (SEQ ID NO: 10369); |
| | ENST00000532728.6 (SEQ ID NO: 15308); ENST00000612903.1 (SEQ ID NO: 10372); |
| | ENST00000635881.1 (SEQ ID NO: 15309); ENST00000642271.1 (SEQ ID NO: 15310); |
| | ENST00000642579.1 (SEQ ID NO: 15311); ENST00000642611.1 (SEQ ID NO: 15312); |
| | ENST00000642902.1 (SEQ ID NO: 15313); ENST00000643260.1 (SEQ ID NO: 15314); |
| | ENST00000643562.1 (SEQ ID NO: 15315); ENST00000643925.1 (SEQ ID NO: 15316); |
| | ENST00000644057.1 (SEQ ID NO: 10382); ENST00000644447.1 (SEQ ID NO: 15317); |
| | ENST00000644472.1 (SEQ ID NO: 15318); ENST00000644484.1 (SEQ ID NO: 15319); |
| | ENST00000644542.1 (SEQ ID NO: 15320); ENST00000644649.1 (SEQ ID NO: 15321); |
| | ENST00000644675.1 (SEQ ID NO: 15322); ENST00000644757.1 (SEQ ID NO: 15323); |
| | ENST00000644772.1 (SEQ ID NO: 15324); ENST00000645004.1 (SEQ ID NO: 10392); |
| | ENST00000645076.1 (SEQ ID NO: 15325); ENST00000645417.1 (SEQ ID NO: 10395); |
| | ENST00000645744.1 (SEQ ID NO: 15326); ENST00000645760.1 (SEQ ID NO: 15327); |
| | ENST00000645884.1 (SEQ ID NO: 15328); ENST00000646003.1 (SEQ ID NO: 15329); |
| | ENST00000646207.1 (SEQ ID NO: 15330); ENST00000646276.1 (SEQ ID NO: 15331); |
| | ENST00000646592.1 (SEQ ID NO: 15332); ENST00000646737.1 (SEQ ID NO: 10404); |
| | ENST00000646902.1 (SEQ ID NO: 15333); ENST00000646993.1 (SEQ ID NO: 15334); |
| | ENST00000647013.1 (SEQ ID NO: 15335); ENST00000647015.1 (SEQ ID NO: 15336); |
| | ENST00000647086.1 (SEQ ID NO: 15337); ENST00000647158.1 (SEQ ID NO: 15338) |
| transcript | ENST00000302539.9 (SEQ ID NO: 10338); ENST00000389817.7 (SEQ ID NO: 10339); |
| | ENST00000524561.1 (SEQ ID NO: 10341); ENST00000525022.1 (SEQ ID NO: 10343); |
| | ENST00000526002.1 (SEQ ID NO: 10345); ENST00000526037.5 (SEQ ID NO: 10347); |
| | ENST00000526168.5 (SEQ ID NO: 10349); ENST00000526921.5 (SEQ ID NO: 10351); |
| | ENST00000527905.5 (SEQ ID NO: 10352); ENST00000528202.5 (SEQ ID NO: 10354); |
| | ENST00000528374.1 (SEQ ID NO: 10356); ENST00000529967.5 (SEQ ID NO: 10358); |
| | ENST00000530147.5 (SEQ ID NO: 10360); ENST00000531137.1 (SEQ ID NO: 10362); |
| | ENST00000531642.5 (SEQ ID NO: 10364); ENST00000531891.1 (SEQ ID NO: 10366); |
| | ENST00000531911.1 (SEQ ID NO: 10368); ENST00000532220.1 (SEQ ID NO: 10370); |
| | ENST00000532728.6 (SEQ ID NO: 10371); ENST00000612903.1 (SEQ ID NO: 10373); |
| | ENST00000635881.1 (SEQ ID NO: 10374); ENST00000642271.1 (SEQ ID NO: 10375); |
| | ENST00000642579.1 (SEQ ID NO: 10376); ENST00000642611.1 (SEQ ID NO: 10377); |
| | ENST00000642902.1 (SEQ ID NO: 10378); ENST00000643260.1 (SEQ ID NO: 10379); |
| | ENST00000643562.1 (SEQ ID NO: 10380); ENST00000643925.1 (SEQ ID NO: 10381); |
| | ENST00000644057.1 (SEQ ID NO: 10383); ENST00000644447.1 (SEQ ID NO: 10384); |
| | ENST00000644472.1 (SEQ ID NO: 10385); ENST00000644484.1 (SEQ ID NO: 10386); |
| | ENST00000644542.1 (SEQ ID NO: 10387); ENST00000644649.1 (SEQ ID NO: 10388); |
| | ENST00000644675.1 (SEQ ID NO: 10389); ENST00000644757.1 (SEQ ID NO: 10390); |
| | ENST00000644772.1 (SEQ ID NO: 10391); ENST00000645004.1 (SEQ ID NO: 10393); |
| | ENST00000645076.1 (SEQ ID NO: 10394); ENST00000645417.1 (SEQ ID NO: 10396); |
| | ENST00000645744.1 (SEQ ID NO: 10397); ENST00000645760.1 (SEQ ID NO: 10398); |
| | ENST00000645884.1 (SEQ ID NO: 10399); ENST00000646003.1 (SEQ ID NO: 10400); |
| | ENST00000646207.1 (SEQ ID NO: 10401); ENST00000646276.1 (SEQ ID NO: 10402); |
| | ENST00000646592.1 (SEQ ID NO: 10403); ENST00000646737.1 (SEQ ID NO: 10405); |
| | ENST00000646902.1 (SEQ ID NO: 10406); ENST00000646993.1 (SEQ ID NO; 10407); |
| | ENST00000647013.1 (SEQ ID NO: 10408); ENST00000647015.1 (SEQ ID NO: 10409); |
| | ENST00000647086.1 (SEQ ID NO: 10410); ENST00000647158.1 (SEQ ID NO: 10411) |

Target: ABCD1

| | |
|---|---|
| pre-mRNA | ENST00000218104.6 (SEQ ID NO: 10412); ENST00000370129.4 (SEQ ID NO: 10414); |
| transcript | ENST00000443684.2 (SEQ ID NO: 10416) |
| transcript | ENST00000218104.6 (SEQ ID NO: 10413); ENST00000370129.4 (SEQ ID NO: 10415); |
| | ENST00000443684.2 (SEQ ID NO: 10417) |

Target: ABR

| | |
|---|---|
| pre-mRNA | ENST00000291107.6 (SEQ ID NO: 15339); ENST00000302538.9 (SEQ ID NO: 15340); |
| transcript | ENST00000536794.6 (SEQ ID NO: 15341); ENST00000543210.6 (SEQ ID NO: 10421); |
| | ENST00000544583.6 (SEQ ID NO: 15342); ENST00000570441.5 (SEQ ID NO: 15343); |
| | ENST00000570525.5 (SEQ ID NO: 15344); ENST00000570688.1 (SEQ ID NO: 10426); |
| | ENST00000571022.5 (SEQ ID NO: 10428); ENST00000571120.5 (SEQ ID NO: 10430); |
| | ENST00000571306.1 (SEQ ID NO: 10432); ENST00000571383.5 (SEQ ID NO: 10434); |
| | ENST00000571543.1 (SEQ ID NO: 10436); ENST00000571797.5 (SEQ ID NO: 10438); |
| | ENST00000571945.5 (SEQ ID NO: 10440); ENST00000572152.5 (SEQ ID NO: 15345); |
| | ENST00000572441.5 (SEQ ID NO: 10443); ENST00000572585.5 (SEQ ID NO: 10445); |
| | ENST00000572650.1 (SEQ ID NO: 10447); ENST00000573325.1 (SEQ ID NO: 10449); |
| | ENST00000573559.3 (SEQ ID NO: 10451); ENST00000573667.1 (SEQ ID NO: 10453); |
| | ENST00000573895.1 (SEQ ID NO: 10455); ENST00000574048.2 (SEQ ID NO: 10457); |
| | ENST00000574139.6 (SEQ ID NO: 15346); ENST00000574257.5 (SEQ ID NO: 15347); |
| | ENST00000574266.1 (SEQ ID NO: 15348); ENST00000574437.5 (SEQ ID NO: 15349); |
| | ENST00000574544.1 (SEQ ID NO: 10463); ENST00000574632.5 (SEQ ID NO: 10465); |
| | ENST00000574875.1 (SEQ ID NO: 10467); ENST00000575770.5 (SEQ ID NO: 10469); |
| | ENST00000575934.5 (SEQ ID NO: 15350); ENST00000576668.1 (SEQ ID NO: 10472); |
| | ENST00000576964.5 (SEQ ID NO: 15351); ENST00000577052.5 (SEQ ID NO: 10475) |
| transcript | ENST00000291107.6 (SEQ ID NO: 10418); ENST00000302538.9 (SEQ ID NO: 10419); |
| | ENST00000536794.6 (SEQ ID NO: 10420); ENST00000543210.6 (SEQ ID NO: 10422); |
| | ENST00000544583.6 (SEQ ID NO: 10423); ENST00000570441.5 (SEQ ID NO: 10424); |
| | ENST00000570525.5 (SEQ ID NO: 10425); ENST00000570688.1 (SEQ ID NO: 10427); |
| | ENST00000571022.5 (SEQ ID NO: 10429); ENST00000571120.5 (SEQ ID NO: 10431); |
| | ENST00000571306.1 (SEQ ID NO: 10433); ENST00000571383.5 (SEQ ID NO: 10435); |
| | ENST00000571543.1 (SEQ ID NO: 10437); ENST00000571797.5 (SEQ ID NO: 10439); |
| | ENST00000571945.5 (SEQ ID NO: 10441); ENST00000572152.5 (SEQ ID NO: 10442); |
| | ENST00000572441.5 (SEQ ID NO: 10444); ENST00000572585.5 (SEQ ID NO: 10446); |
| | ENST00000572650.1 (SEQ ID NO: 10448); ENST00000573325.1 (SEQ ID NO: 10450); |
| | ENST00000573559.3 (SEQ ID NO: 10452); ENST00000573667.1 (SEQ ID NO: 10454); |
| | ENST00000573895.1 (SEQ ID NO: 10456); ENST00000574048.2 (SEQ ID NO: 10458); |
| | ENST00000574139.6 (SEQ ID NO: 10459); ENST00000574257.5 (SEQ ID NO: 10460); |
| | ENST00000574266.1 (SEQ ID NO: 10461); ENST00000574437.5 (SEQ ID NO: 10462); |
| | ENST00000574544.1 (SEQ ID NO: 10464); ENST00000574632.5 (SEQ ID NO: 10466); |
| | ENST00000574875.1 (SEQ ID NO: 10468); ENST00000575770.5 (SEQ ID NO: 10470); |
| | ENST00000575934.5 (SEQ ID NO: 10471); ENST00000576668.1 (SEQ ID NO: 10473); |
| | ENST00000576964.5 (SEQ ID NO: 10474); ENST00000577052.5 (SEQ ID NO: 10476) |

Target: ACAD9

| | |
|---|---|
| pre-mRNA | ENST00000308982.12 (SEQ ID NO: 15352); ENST00000505192.5 (SEQ ID NO: 10478); |
| transcript | ENST00000505602.1 (SEQ ID NO: 10480); ENST00000505867.5 (SEQ ID NO: 15353); |
| | ENST00000508971.1 (SEQ ID NO: 10483); ENST00000511227.5 (SEQ ID NO: 15354); |
| | ENST00000511325.1 (SEQ ID NO: 10486); ENST00000511526.5 (SEQ ID NO: 10488); |
| | ENST00000512801.5 (SEQ ID NO: 10490); ENST00000514336.1 (SEQ ID NO: 10492); |
| | ENST00000514643.5 (SEQ ID NO: 10494); ENST00000515429.1 (SEQ ID NO: 10496) |
| transcript | ENST00000308982.12 (SEQ ID NO: 10477); ENST00000505192.5 (SEQ ID NO: 10479); |
| | ENST00000505602.1 (SEQ ID NO: 10481); ENST00000505867.5 (SEQ ID NO: 10482); |
| | ENST00000508971.1 (SEQ ID NO: 10484); ENST00000511227.5 (SEQ ID NO: 10485); |
| | ENST00000511325.1 (SEQ ID NO: 10487); ENST00000511526.5 (SEQ ID NO: 10489); |
| | ENST00000512801.5 (SEQ ID NO: 10491); ENST00000514336.1 (SEQ ID NO: 10493); |
| | ENST00000514643.5 (SEQ ID NO: 10495); ENST00000515429.1 (SEQ ID NO: 10497) |

Target: ACAP1

| | |
|---|---|
| pre-mRNA | premrna_ENST00000158762.8; premrna_ENST00000570439.1; premrna_ENST00000570457.6; |
| transcript | premrna_ENST00000570504.5; premrna_ENST00000571220.1; premrna_ENST00000571471.5; |
| | premrna_ENST00000573893.5; premrna_ENST00000574499.1; premrna_ENST00000575415.1; |
| | premrna_ENST00000575425.1; premrna_ENST00000576594.1; premrna_ENST00000576628.1; |
| transcript | transcript_ENST00000158762.8; transcript_ENST00000570439.1; transcript_ENST00000570457.6; |
| | transcript_ENST00000570504.5; transcript_ENST00000571220.1; transcript_ENST00000571471.5; |
| | transcript_ENST00000573893.5; transcript_ENST00000574499.1; transcript_ENST00000575415.1; |
| | transcript_ENST00000575425.1; transcript_ENST00000576594.1; transcript_ENST00000576628.1 |

Target: ACOX2

| | |
|---|---|
| pre-mRNA | ENST00000302819.10 (SEQ ID NO: 15355); ENST00000459701.6 (SEQ ID NO: 15356); |
| transcript | ENST00000459888.1 (SEQ ID NO: 10500); ENST00000460921.1 (SEQ ID NO: 10502); |
| | ENST00000466689.1 (SEQ ID NO: 10504); ENST00000466810.5 (SEQ ID NO: 10506); |
| | ENST00000467738.1 (SEQ ID NO: 10508); ENST00000474098.1 (SEQ ID NO: 10510); |
| | ENST00000475143.5 (SEQ ID NO: 10512); ENST00000480791.1 (SEQ ID NO: 10514); |
| | ENST00000481527.5 (SEQ ID NO: 10516); ENST00000489472.1 (SEQ ID NO: 10518); |
| | ENST00000492530.1 (SEQ ID NO: 10520) |
| transcript | ENST00000302819.10 (SEQ ID NO: 10498); ENST00000459701.6 (SEQ ID NO: 10499); |
| | ENST00000459888.1 (SEQ ID NO: 10501); ENST00000460921.1 (SEQ ID NO: 10503); |
| | ENST00000466689.1 (SEQ ID NO: 10505); ENST00000466810.5 (SEQ ID NO: 10507); |
| | ENST00000467738.1 (SEQ ID NO: 10509); ENST00000474098.1 (SEQ ID NO: 10511); |
| | ENST00000475143.5 (SEQ ID NO: 10513); ENST00000480791.1 (SEQ ID NO: 10515); |
| | ENST00000481527.5 (SEQ ID NO: 10517); ENST00000489472.1 (SEQ ID NO: 10519); |
| | ENST00000492530.1 (SEQ ID NO: 10521) |

Target: ACSF3

| | |
|---|---|
| pre-mRNA | ENST00000317447.9 (SEQ ID NO: 15357); ENST00000378345.8 (SEQ ID NO: 15358); |
| transcript | ENST00000393145.5 (SEQ ID NO: 10524); ENST00000406948.7 (SEQ ID NO: 15359); |
| | ENST00000535176.1 (SEQ ID NO: 10527); ENST00000537116.5 (SEQ ID NO: 10529); |
| | ENST00000537155.1 (SEQ ID NO: 10531); ENST00000537290.5 (SEQ ID NO: 10533); |
| | ENST00000537895.5 (SEQ ID NO: 10535); ENST00000538340.5 (SEQ ID NO: 10537); |
| | ENST00000540697.5 (SEQ ID NO: 15360); ENST00000541755.2 (SEQ ID NO: 10540); |
| | ENST00000542688.5 (SEQ ID NO: 15361); ENST00000543676.1 (SEQ ID NO: 10543); |
| | ENST00000544543.5 (SEQ ID NO: 15362); ENST00000562204.1 (SEQ ID NO: 15363); |
| | ENST00000562750.1 (SEQ ID NO: 10547); ENST00000614302.5 (SEQ ID NO: 15364); |
| | ENST00000649953.1 (SEQ ID NO: 15365) |
| transcript | ENST00000317447.9 (SEQ ID NO: 10522); ENST00000378345.8 (SEQ ID NO: 10523); |
| | ENST00000393145.5 (SEQ ID NO: 10525); ENST00000406948.7 (SEQ ID NO: 10526); |
| | ENST00000535176.1 (SEQ ID NO: 10528); ENST00000537116.5 (SEQ ID NO: 10530); |
| | ENST00000537155.1 (SEQ ID NO: 10532); ENST00000537290.5 (SEQ ID NO: 10534); |
| | ENST00000537895.5 (SEQ ID NO: 10536); ENST00000538340.5 (SEQ ID NO: 10538); |
| | ENST00000540697.5 (SEQ ID NO: 10539); ENST00000541755.2 (SEQ ID NO: 10541); |
| | ENST00000542688.5 (SEQ ID NO: 10542); ENST00000543676.1 (SEQ ID NO: 10544); |
| | ENST00000544543.5 (SEQ ID NO: 10545); ENST00000562204.1 (SEQ ID NO: 10546); |
| | ENST00000562750.1 (SEQ ID NO: 10548); ENST00000614302.5 (SEQ ID NO: 10549); |
| | ENST00000649953.1 (SEQ ID NO: 10550) |

Target: ACTN4

| | |
|---|---|
| pre-mRNA | ENST00000252699.7 (SEQ ID NO: 15366); ENST00000390009.7 (SEQ ID NO: 15367); |
| transcript | ENST00000424234.6 (SEQ ID NO: 15368); ENST00000440400.1 (SEQ ID NO: 10554); |
| | ENST00000477174.1 (SEQ ID NO: 10556); ENST00000489451.1 (SEQ ID NO: 10558); |
| | ENST00000495553.1 (SEQ ID NO: 15369); ENST00000497637.5 (SEQ ID NO: 10561); |
| | ENST00000586538.1 (SEQ ID NO: 10563); ENST00000588618.5 (SEQ ID NO: 15370); |
| | ENST00000589528.1 (SEQ ID NO: 15371) |
| transcript | ENST00000252699.7 (SEQ ID NO: 10551); ENST00000390009.7 (SEQ ID NO: 10552); |
| | ENST00000424234.6 (SEQ ID NO: 10553); ENST00000440400.1 (SEQ ID NO: 10555); |
| | ENST00000477174.1 (SEQ ID NO: 10557); ENST00000489451.1 (SEQ ID NO: 10559); |
| | ENST00000495553.1 (SEQ ID NO: 10560); ENST00000497637.5 (SEQ ID NO: 10562); |
| | ENST00000586538.1 (SEQ ID NO: 10564); ENST00000588618.5 (SEQ ID NO: 10565); |
| | ENST00000589528.1 (SEQ ID NO: 10566) |

Target: ADAM17

| | |
|---|---|
| pre-mRNA | ENST00000310823.8 (SEQ ID NO: 15372); ENST00000478059.1 (SEQ ID NO: 10568); |
| transcript | ENST00000618923.2 (SEQ ID NO: 15373); ENST00000647610.1 (SEQ ID NO: 15374); |
| | ENST00000647622.1 (SEQ ID NO: 15375); ENST00000647979.1 (SEQ ID NO: 15376); |
| | ENST00000648002.1 (SEQ ID NO: 10574); ENST00000648548.1 (SEQ ID NO: 15377); |
| | ENST00000648857.1 (SEQ ID NO: 15378); ENST00000649068.1 (SEQ ID NO: 10578); |
| | ENST00000649227.1 (SEQ ID NO: 15379); ENST00000649686.1 (SEQ ID NO: 15380); |
| | ENST00000649798.1 (SEQ ID NO: 10582); ENST00000649972.1 (SEQ ID NO: 15381); |
| | ENST00000650116.1 (SEQ ID NO: 15382); ENST00000650241.1 (SEQ ID NO: 15383) |
| transcript | ENST00000310823.8 (SEQ ID NO: 10567); ENST00000478059.1 (SEQ ID NO: 10569); |
| | ENST00000618923.2 (SEQ ID NO: 10570); ENST00000647610.1 (SEQ ID NO: 10571); |
| | ENST00000647622.1 (SEQ ID NO: 10572); ENST00000647979.1 (SEQ ID NO: 10573); |
| | ENST00000648002.1 (SEQ ID NO: 10575); ENST00000648548.1 (SEQ ID NO: 10576); |
| | ENST00000648857.1 (SEQ ID NO: 10577); ENST00000649068.1 (SEQ ID NO: 10579); |
| | ENST00000649227.1 (SEQ ID NO: 10580); ENST00000649686.1 (SEQ ID NO: 10581); |
| | ENST00000649798.1 (SEQ ID NO: 10583); ENST00000649972.1 (SEQ ID NO: 10584); |
| | ENST00000650116.1 (SEQ ID NO: 10585); ENST00000650241.1 (SEQ ID NO: 10586) |

Target: ADAMTS13

| | |
|---|---|
| pre-mRNA | ENST00000355699.6 (SEQ ID NO: 15384); ENST00000356589.6 (SEQ ID NO: 15385); |
| transcript | ENST00000371910.1 (SEQ ID NO: 10589); ENST00000371911.7 (SEQ ID NO: 10591); |
| | ENST00000371916.5 (SEQ ID NO: 15386); ENST00000371929.7 (SEQ ID NO: 15387); |
| | ENST00000474918.1 (SEQ ID NO: 10595); ENST00000485925.5 (SEQ ID NO: 15388); |
| | ENST00000495234.5 (SEQ ID NO: 10598) |
| transcript | ENST00000355699.6 (SEQ ID NO: 10587); ENST00000356589.6 (SEQ ID NO: 10588); |
| | ENST00000371910.1 (SEQ ID NO: 10590); ENST00000371911.7 (SEQ ID NO: 10592); |
| | ENST00000371916.5 (SEQ ID NO: 10593); ENST00000371929.7 (SEQ ID NO: 10594); |
| | ENST00000474918.1 (SEQ ID NO: 10596); ENST00000485925.5 (SEQ ID NO: 10597); |
| | ENST00000495234.5 (SEQ ID NO: 10599) |

Target: AKR1E2

| | |
|---|---|
| pre-mRNA | ENST00000298375.12 (SEQ ID NO: 10600); ENST00000334019.4 (SEQ ID NO: 10602); |
| transcript | ENST00000345253.9 (SEQ ID NO: 10604); ENST00000441590.5 (SEQ ID NO: 10606); |
| | ENST00000462718.7 (SEQ ID NO: 10608); ENST00000463345.5 (SEQ ID NO: 10610); |
| | ENST00000474119.5 (SEQ ID NO: 10612); ENST00000487985.1 (SEQ ID NO: 10614); |
| | ENST00000525281.5 (SEQ ID NO: 10616); ENST00000525572.1 (SEQ ID NO: 10618); |
| | ENST00000525627.1 (SEQ ID NO: 10620); ENST00000532248.5 (SEQ ID NO: 10622); |
| | ENST00000533295.5 (SEQ ID NO: 10624) |
| transcript | ENST00000298375.12 (SEQ ID NO: 10601); ENST00000334019.4 (SEQ ID NO: 10603); |
| | ENST00000345253.9 (SEQ ID NO: 10605); ENST00000441590.5 (SEQ ID NO: 10607); |
| | ENST00000462718.7 (SEQ ID NO: 10609); ENST00000463345.5 (SEQ ID NO: 10611); |
| | ENST00000474119.5 (SEQ ID NO: 10613); ENST00000487985.1 (SEQ ID NO: 10615); |
| | ENST00000525281.5 (SEQ ID NO: 10617); ENST00000525572.1 (SEQ ID NO: 10619); |
| | ENST00000525627.1 (SEQ ID NO: 10621); ENST00000532248.5 (SEQ ID NO: 10623); |
| | ENST00000533295.5 (SEQ ID NO: 10625) |

Target: ALAD

| | |
|---|---|
| pre-mRNA | ENST00000409155.8 (SEQ ID NO: 10626); ENST00000445750.1 (SEQ ID NO: 10628); |
| transcript | ENST00000448137.5 (SEQ ID NO: 10630); ENST00000452726.1 (SEQ ID NO: 10632); |
| | ENST00000464749.5 (SEQ ID NO: 10634); ENST00000468504.5 (SEQ ID NO: 10636); |
| | ENST00000482001.1 (SEQ ID NO: 10638); ENST00000482847.5 (SEQ ID NO: 10640); |
| | ENST00000494848.1 (SEQ ID NO: 10642) |
| transcript | ENST00000409155.8 (SEQ ID NO: 10627); ENST00000445750.1 (SEQ ID NO: 10629); |
| | ENST00000448137.5 (SEQ ID NO: 10631); ENST00000452726.1 (SEQ ID NO: 10633); |
| | ENST00000464749.5 (SEQ ID NO: 10635); ENST00000468504.5 (SEQ ID NO: 10637); |
| | ENST00000482001.1 (SEQ ID NO: 10639); ENST00000482847.5 (SEQ ID NO: 10641); |
| | ENST00000494848.1 (SEQ ID NO: 10643) |

Target: ALG3

| | |
|---|---|
| pre-mRNA | ENST00000397676.8 (SEQ ID NO: 10644); ENST00000411922.5 (SEQ ID NO: 10646); |
| transcript | ENST00000414845.5 (SEQ ID NO: 10648); ENST00000423996.5 (SEQ ID NO: 10650); |
| | ENST00000445626.6 (SEQ ID NO: 10652); ENST00000446569.1 (SEQ ID NO: 10654); |
| | ENST00000455059.5 (SEQ ID NO: 10656); ENST00000461415.5 (SEQ ID NO: 10658); |
| | ENST00000462735.6 (SEQ ID NO: 10660); ENST00000463495.5 (SEQ ID NO: 10662); |
| | ENST00000477959.1 (SEQ ID NO: 10664); ENST00000482048.1 (SEQ ID NO: 10666); |
| | ENST00000485912.1 (SEQ ID NO: 10668); ENST00000488976.5 (SEQ ID NO: 10670) |
| transcript | ENST00000397676.8 (SEQ ID NO: 10645); ENST00000411922.5 (SEQ ID NO: 10647); |
| | ENST00000414845.5 (SEQ ID NO: 10649); ENST00000423996.5 (SEQ ID NO: 10651); |
| | ENST00000445626.6 (SEQ ID NO: 10653); ENST00000446569.1 (SEQ ID NO: 10655); |
| | ENST00000455059.5 (SEQ ID NO: 10657); ENST00000461415.5 (SEQ ID NO: 10659); |
| | ENST00000462735.6 (SEQ ID NO: 10661); ENST00000463495.5 (SEQ ID NO: 10663); |
| | ENST00000477959.1 (SEQ ID NO: 10665); ENST00000482048.1 (SEQ ID NO: 10667); |
| | ENST00000485912.1 (SEQ ID NO: 10669); ENST00000488976.5 (SEQ ID NO: 10671) |

Target: ANKRD29

| | |
|---|---|
| pre-mRNA | ENST00000322980.13 (SEQ ID NO: 15389); ENST00000585908.2 (SEQ ID NO: 10673); |
| transcript | ENST00000586087.1 (SEQ ID NO: 15390); ENST00000586511.1 (SEQ ID NO: 10676); |
| | ENST00000587763.1 (SEQ ID NO: 10678); ENST00000591280.5 (SEQ ID NO: 15391); |
| | ENST00000591617.1 (SEQ ID NO: 10681); ENST00000592179.6 (SEQ ID NO: 15392) |
| transcript | ENST00000322980.13 (SEQ ID NO: 10672); ENST00000585908.2 (SEQ ID NO: 10674); |
| | ENST00000586087.1 (SEQ ID NO: 10675); ENST00000586511.1 (SEQ ID NO: 10677); |
| | ENST00000587763.1 (SEQ ID NO: 10679); ENST00000591280.5 (SEQ ID NO: 10680); |
| | ENST00000591617.1 (SEQ ID NO: 10682); ENST00000592179.6 (SEQ ID NO: 10683) |

Target: ANKS3

| | |
|---|---|
| pre-mRNA | ENST00000304283.9 (SEQ ID NO: 15393); ENST00000446014.6 (SEQ ID NO: 15394); |
| transcript | ENST00000450067.6 (SEQ ID NO: 15395); ENST00000585773.5 (SEQ ID NO: 15396); |
| | ENST00000586159.5 (SEQ ID NO: 10688); ENST00000586166.5 (SEQ ID NO: 15397); |
| | ENST00000586605.5 (SEQ ID NO: 15398); ENST00000586632.1 (SEQ ID NO: 10692); |
| | ENST00000587005.5 (SEQ ID NO: 10694); ENST00000588398.1 (SEQ ID NO: 10696); |
| | ENST00000588513.1 (SEQ ID NO: 10698); ENST00000589035.5 (SEQ ID NO: 10700); |
| | ENST00000589065.5 (SEQ ID NO: 10702); ENST00000590147.5 (SEQ ID NO: 10704); |
| | ENST00000590193.5 (SEQ ID NO: 15399); ENST00000590689.1 (SEQ ID NO: 10707); |
| | ENST00000590730.5 (SEQ ID NO: 15400); ENST00000590803.5 (SEQ ID NO: 15401); |
| | ENST00000591185.5 (SEQ ID NO: 10711); ENST00000591281.5 (SEQ ID NO: 10713); |
| | ENST00000591653.5 (SEQ ID NO: 15402); ENST00000592068.5 (SEQ ID NO: 15403); |
| | ENST00000592077.5 (SEQ ID NO: 15404); ENST00000592190.1 (SEQ ID NO: 10718); |
| | ENST00000592421.5 (SEQ ID NO: 15405); ENST00000592698.5 (SEQ ID NO: 15406); |
| | ENST00000592711.5 (SEQ ID NO: 10722); ENST00000592840.1 (SEQ ID NO: 10724); |
| | ENST00000593120.5 (SEQ ID NO: 10726); ENST00000614075.4 (SEQ ID NO: 15407) |
| transcript | ENST00000304283.9 (SEQ ID NO: 10684); ENST00000446014.6 (SEQ ID NO: 10685); |
| | ENST00000450067.6 (SEQ ID NO: 10686); ENST00000585773.5 (SEQ ID NO: 10687); |
| | ENST00000586159.5 (SEQ ID NO: 10689); ENST00000586166.5 (SEQ ID NO: 10690); |
| | ENST00000586605.5 (SEQ ID NO: 10691); ENST00000586632.1 (SEQ ID NO: 10693); |
| | ENST00000587005.5 (SEQ ID NO: 10695); ENST00000588398.1 (SEQ ID NO: 10697); |
| | ENST00000588513.1 (SEQ ID NO: 10699); ENST00000589035.5 (SEQ ID NO: 10701); |
| | ENST00000589065.5 (SEQ ID NO: 10703); ENST00000590147.5 (SEQ ID NO: 10705); |
| | ENST00000590193.5 (SEQ ID NO: 10706); ENST00000590689.1 (SEQ ID NO: 10708); |
| | ENST00000590730.5 (SEQ ID NO: 10709); ENST00000590803.5 (SEQ ID NO: 10710); |
| | ENST00000591185.5 (SEQ ID NO: 10712); ENST00000591281.5 (SEQ ID NO: 10714); |
| | ENST00000591653.5 (SEQ ID NO: 10715); ENST00000592068.5 (SEQ ID NO: 10716); |
| | ENST00000592077.5 (SEQ ID NO: 10717); ENST00000592190.1 (SEQ ID NO: 10719); |
| | ENST00000592421.5 (SEQ ID NO: 10720); ENST00000592698.5 (SEQ ID NO: 10721); |
| | ENST00000592711.5 (SEQ ID NO: 10723); ENST00000592840.1 (SEQ ID NO: 10725); |
| | ENST00000593120.5 (SEQ ID NO: 10727); ENST00000614075.4 (SEQ ID NO: 10728) |

Target: ANO4

| | |
|---|---|
| pre-mRNA | ENST00000392977.8 (SEQ ID NO: 15408); ENST00000392979.7 (SEQ ID NO: 15409); |
| transcript | ENST00000546991.1 (SEQ ID NO: 15410); ENST00000548940.1 (SEQ ID NO: 15411); |
| | ENST00000549155.6 (SEQ ID NO: 15412); ENST00000549234.1 (SEQ ID NO: 15413); |
| | ENST00000550015.1 (SEQ ID NO: 15414); ENST00000551148.1 (SEQ ID NO: 15415); |
| | ENST00000644049.1 (SEQ ID NO: 15416) |
| transcript | ENST00000392977.8 (SEQ ID NO: 10729); ENST00000392979.7 (SEQ ID NO: 10730); |
| | ENST00000546991.1 (SEQ ID NO: 10731); ENST00000548940.1 (SEQ ID NO: 10732); |
| | ENST00000549155.6 (SEQ ID NO: 10733); ENST00000549234.1 (SEQ ID NO: 10734); |
| | ENST00000550015.1 (SEQ ID NO: 10735); ENST00000551148.1 (SEQ ID NO: 10736); |
| | ENST00000644049.1 (SEQ ID NO: 10737) |

Target: AP3B2

| | |
|---|---|
| pre-mRNA | ENST00000261722.8 (SEQ ID NO: 15417); ENST00000535348.5 (SEQ ID NO: 15418); |
| transcript | ENST00000535359.6 (SEQ ID NO: 15419); ENST00000535385.6 (SEQ ID NO: 15420); |
| | ENST00000535513.2 (SEQ ID NO: 10742); ENST00000537735.2 (SEQ ID NO: 15421); |
| | ENST00000541693.5 (SEQ ID NO: 10745); ENST00000542200.2 (SEQ ID NO: 10747); |
| | ENST00000543938.6 (SEQ ID NO: 15422); ENST00000559888.1 (SEQ ID NO: 10750); |
| | ENST00000560529.1 (SEQ ID NO: 10752); ENST00000561455.5 (SEQ ID NO: 10754); |
| | ENST00000620652.4 (SEQ ID NO: 15423); ENST00000642989.2 (SEQ ID NO: 15424); |
| | ENST00000652847.1 (SEQ ID NO: 15425); ENST00000657321.1 (SEQ ID NO: 15426); |
| | ENST00000659252.1 (SEQ ID NO: 10760); ENST00000660624.1 (SEQ ID NO: 10762); |
| | ENST00000661532.1 (SEQ ID NO: 10764); ENST00000663651.1 (SEQ ID NO: 15427); |
| | ENST00000664460.1 (SEQ ID NO: 15428); ENST00000665513.1 (SEQ ID NO: 10768); |
| | ENST00000666055.1 (SEQ ID NO: 15429); ENST00000666672.1 (SEQ ID NO: 10771); |
| | ENST00000666894.1 (SEQ ID NO: 10773); ENST00000666973.1 (SEQ ID NO: 15430); |
| | ENST00000667758.1 (SEQ ID NO: 15431); ENST00000668385.1 (SEQ ID NO: 15432); |
| | ENST00000668458.1 (SEQ ID NO: 10778); ENST00000668990.2 (SEQ ID NO: 15433); |
| | ENST00000669880.1 (SEQ ID NO: 10781); ENST00000669930.1 (SEQ ID NO: 15434) |
| transcript | ENST00000261722.8 (SEQ ID NO: 10738); ENST00000535348.5 (SEQ ID NO: 10739); |
| | ENST00000535359.6 (SEQ ID NO: 10740); ENST00000535385.6 (SEQ ID NO: 10741); |
| | ENST00000535513.2 (SEQ ID NO: 10743); ENST00000537735.2 (SEQ ID NO: 10744); |
| | ENST00000541693.5 (SEQ ID NO: 10746); ENST00000542200.2 (SEQ ID NO: 10748); |
| | ENST00000543938.6 (SEQ ID NO: 10749); ENST00000559888.1 (SEQ ID NO: 10751); |
| | ENST00000560529.1 (SEQ ID NO: 10753); ENST00000561455.5 (SEQ ID NO: 10755); |
| | ENST00000620652.4 (SEQ ID NO: 10756); ENST00000642989.2 (SEQ ID NO: 10757); |
| | ENST00000652847.1 (SEQ ID NO: 10758); ENST00000657321.1 (SEQ ID NO: 10759); |
| | ENST00000659252.1 (SEQ ID NO: 10761); ENST00000660624.1 (SEQ ID NO: 10763); |
| | ENST00000661532.1 (SEQ ID NO: 10765); ENST00000663651.1 (SEQ ID NO: 10766); |
| | ENST00000664460.1 (SEQ ID NO: 10767); ENST00000665513.1 (SEQ ID NO: 10769); |
| | ENST00000666055.1 (SEQ ID NO: 10770); ENST00000666672.1 (SEQ ID NO: 10772); |
| | ENST00000666894.1 (SEQ ID NO: 10774); ENST00000666973.1 (SEQ ID NO: 10775); |
| | ENST00000667758.1 (SEQ ID NO: 10776); ENST00000668385.1 (SEQ ID NO: 10777); |
| | ENST00000668458.1 (SEQ ID NO: 10779); ENST00000668990.2 (SEQ ID NO: 10780); |
| | ENST00000669880.1 (SEQ ID NO: 10782); ENST00000669930.1 (SEQ ID NO: 10783) |

Target: AP3M1

| | |
|---|---|
| pre-mRNA | ENST00000355264.8 (SEQ ID NO: 15435); ENST00000372745.1 (SEQ ID NO: 10785); |
| transcript | ENST00000480373.1 (SEQ ID NO: 10787); ENST00000487653.1 (SEQ ID NO: 10789) |
| transcript | ENST00000355264.8 (SEQ ID NO: 10784); ENST00000372745.1 (SEQ ID NO: 10786); |
| | ENST00000480373.1 (SEQ ID NO: 10788); ENST00000487653.1 (SEQ ID NO: 10790) |

Target: AP5Z1

| | |
|---|---|
| pre-mRNA | ENST00000469614.1 (SEQ ID NO: 10791); ENST00000477454.1 (SEQ ID NO: 10793); |
| transcript | ENST00000477680.6 (SEQ ID NO: 10795); ENST00000490487.1 (SEQ ID NO: 10797); |
| | ENST00000491375.1 (SEQ ID NO: 10799); ENST00000496303.6 (SEQ ID NO: 10801); |
| | ENST00000647628.1 (SEQ ID NO: 10803); ENST00000647984.1 (SEQ ID NO: 10805); |
| | ENST00000648237.1 (SEQ ID NO: 10807); ENST00000648360.1 (SEQ ID NO: 10809); |
| | ENST00000648765.1 (SEQ ID NO: 10811); ENST00000648925.1 (SEQ ID NO: 10813); |
| | ENST00000649063.2 (SEQ ID NO: 10815); ENST00000649315.1 (SEQ ID NO: 10817); |
| | ENST00000649419.1 (SEQ ID NO: 10819); ENST00000649736.1 (SEQ ID NO: 10821); |
| | ENST00000650310.1 (SEQ ID NO: 10823); ENST00000650451.1 (SEQ ID NO: 10825); |
| | ENST00000650581.1 (SEQ ID NO: 10827) |
| transcript | ENST00000469614.1 (SEQ ID NO: 10792); ENST00000477454.1 (SEQ ID NO: 10794); |
| | ENST00000477680.6 (SEQ ID NO: 10796); ENST00000490487.1 (SEQ ID NO: 10798); |
| | ENST00000491375.1 (SEQ ID NO: 10800); ENST00000496303.6 (SEQ ID NO: 10802); |
| | ENST00000647628.1 (SEQ ID NO: 10804); ENST00000647984.1 (SEQ ID NO: 10806); |
| | ENST00000648237.1 (SEQ ID NO: 10808); ENST00000648360.1 (SEQ ID NO: 10810); |
| | ENST00000648765.1 (SEQ ID NO: 10812); ENST00000648925.1 (SEQ ID NO: 10814); |
| | ENST00000649063.2 (SEQ ID NO: 10816); ENST00000649315.1 (SEQ ID NO: 10818); |
| | ENST00000649419.1 (SEQ ID NO: 10820); ENST00000649736.1 (SEQ ID NO: 10822); |
| | ENST00000650310.1 (SEQ ID NO: 10824); ENST00000650451.1 (SEQ ID NO: 10826); |
| | ENST00000650581.1 (SEQ ID NO: 10828) |

Target: ARNTL

| | |
|---|---|
| pre-mRNA | ENST00000389707.8 (SEQ ID NO: 15436); ENST00000401424.6 (SEQ ID NO: 15437); |
| transcript | ENST00000403290.5 (SEQ ID NO: 15438); ENST00000403482.7 (SEQ ID NO: 15439); |
| | ENST00000403510.8 (SEQ ID NO: 15440); ENST00000472842.1 (SEQ ID NO: 10834); |
| | ENST00000480685.5 (SEQ ID NO: 15441); ENST00000482049.6 (SEQ ID NO: 15442); |
| | ENST00000485918.2 (SEQ ID NO: 10838); ENST00000497429.5 (SEQ ID NO: 10840); |
| | ENST00000524392.5 (SEQ ID NO: 10842); ENST00000527998.5 (SEQ ID NO: 15443); |
| | ENST00000529050.5 (SEQ ID NO: 15444); ENST00000529388.6 (SEQ ID NO: 15445); |
| | ENST00000529390.1 (SEQ ID NO: 10847); ENST00000529825.6 (SEQ ID NO: 15446); |
| | ENST00000530357.6 (SEQ ID NO: 15447); ENST00000531665.5 (SEQ ID NO: 15448); |
| | ENST00000533520.5 (SEQ ID NO: 15449); ENST00000534102.1 (SEQ ID NO: 10853); |
| | ENST00000534544.5 (SEQ ID NO: 15450); ENST00000673626.1 (SEQ ID NO: 15451); |
| | ENST00000673817.1 (SEQ ID NO: 15452); ENST00000673834.1 (SEQ ID NO: 15453); |
| | ENST00000673837.1 (SEQ ID NO: 15454); ENST00000673868.1 (SEQ ID NO: 10860); |
| | ENST00000673888.1 (SEQ ID NO: 15455); ENST00000673892.1 (SEQ ID NO: 15456); |
| | ENST00000674108.1; (SEQ ID NO: 15457) |
| transcript | ENST00000389707.8 (SEQ ID NO: 10829); ENST00000401424.6 (SEQ ID NO: 10830); |
| | ENST00000403290.5 (SEQ ID NO: 10831); ENST00000403482.7 (SEQ ID NO: 10832); |
| | ENST00000403510.8 (SEQ ID NO: 10833); ENST00000472842.1 (SEQ ID NO: 10835); |
| | ENST00000480685.5 (SEQ ID NO: 10836); ENST00000482049.6 (SEQ ID NO: 10837); |
| | ENST00000485918.2 (SEQ ID NO: 10839); ENST00000497429.5 (SEQ ID NO: 10841); |
| | ENST00000524392.5 (SEQ ID NO: 10843); ENST00000527998.5 (SEQ ID NO: 10844); |
| | ENST00000529050.5 (SEQ ID NO: 10845); ENST00000529388.6 (SEQ ID NO: 10846); |
| | ENST00000529390.1 (SEQ ID NO: 10848); ENST00000529825.6 (SEQ ID NO: 10849); |
| | ENST00000530357.6 (SEQ ID NO: 10850); ENST00000531665.5 (SEQ ID NO: 10851); |
| | ENST00000533520.5 (SEQ ID NO: 10852); ENST00000534102.1 (SEQ ID NO: 10854); |
| | ENST00000534544.5 (SEQ ID NO: 10855); ENST00000673626.1 (SEQ ID NO: 10856); |
| | ENST00000673817.1 (SEQ ID NO: 10857); ENST00000673834.1 (SEQ ID NO: 10858); |
| | ENST00000673837.1 (SEQ ID NO: 10859); ENST00000673868.1 (SEQ ID NO: 10861); |
| | ENST00000673888.1 (SEQ ID NO: 10862); ENST00000673892.1 (SEQ ID NO: 10863); |
| | ENST00000674108.1 (SEQ ID NO: 10864) |

Target: ASAP3

| | |
|---|---|
| pre-mRNA | ENST00000336689.8 (SEQ ID NO: 15458); ENST00000437606.6 (SEQ ID NO: 15459); |
| transcript | ENST00000449467.2 (SEQ ID NO: 10867); ENST00000465372.5 (SEQ ID NO: 10869); |
| | ENST00000475814.5 (SEQ ID NO: 10871); ENST00000478858.5 (SEQ ID NO: 15460); |
| | ENST00000484418.1 (SEQ ID NO: 10874); ENST00000492982.6 (SEQ ID NO: 15461); |
| | ENST00000495646.5 (SEQ ID NO: 10877); ENST00000530874.1 (SEQ ID NO: 10879); |
| | ENST00000608765.1 (SEQ ID NO: 15462); ENST00000618240.4 (SEQ ID NO: 15463) |
| transcript | ENST00000336689.8 (SEQ ID NO: 10865); ENST00000437606.6 (SEQ ID NO: 10866); |
| | ENST00000449467.2 (SEQ ID NO: 10868); ENST00000465372.5 (SEQ ID NO: 10870); |
| | ENST00000475814.5 (SEQ ID NO: 10872); ENST00000478858.5 (SEQ ID NO: 10873); |
| | ENST00000484418.1 (SEQ ID NO: 10875); ENST00000492982.6 (SEQ ID NO: 10876); |
| | ENST00000495646.5 (SEQ ID NO: 10878); ENST00000530874.1 (SEQ ID NO: 10880); |
| | ENST00000608765.1 (SEQ ID NO: 10881); ENST00000618240.4 (SEQ ID NO: 10882) |

Target: ATRX

| | |
|---|---|
| pre-mRNA | ENST00000373344.10 (SEQ ID NO: 15464); ENST00000395603.7 (SEQ ID NO: 15465); |
| transcript | ENST00000400866.4 (SEQ ID NO: 10885); ENST00000460639.2 (SEQ ID NO: 10887); |
| | ENST00000479487.1 (SEQ ID NO: 10889); ENST00000480283.5 (SEQ ID NO: 15466); |
| | ENST00000493470.2 (SEQ ID NO: 10892); ENST00000622960.1 (SEQ ID NO: 15467); |
| | ENST00000623242.3 (SEQ ID NO: 10895); ENST00000623316.1 (SEQ ID NO: 10897); |
| | ENST00000623321.3 (SEQ ID NO: 15468); ENST00000623706.3 (SEQ ID NO: 15469); |
| | ENST00000624032.3 (SEQ ID NO: 15470); ENST00000624166.3 (SEQ ID NO: 15471); |
| | ENST00000624193.1 (SEQ ID NO: 15472); ENST00000624403.1 (SEQ ID NO: 10904); |
| | ENST00000624668.3 (SEQ ID NO: 15473); ENST00000624766.1 (SEQ ID NO: 10907); |
| | ENST00000625063.3 (SEQ ID NO: 10909); ENST00000635865.1 (SEQ ID NO: 10911); |
| | ENST00000636152.1 (SEQ ID NO: 10913); ENST00000636868.1 (SEQ ID NO: 10915); |
| | ENST00000637175.1 (SEQ ID NO: 10917); ENST00000637959.1 (SEQ ID NO: 10919) |
| transcript | ENST00000373344.10 (SEQ ID NO: 10883); ENST00000395603.7 (SEQ ID NO: 10884); |
| | ENST00000400866.4 (SEQ ID NO: 10886); ENST00000460639.2 (SEQ ID NO: 10888); |
| | ENST00000479487.1 (SEQ ID NO: 10890); ENST00000480283.5 (SEQ ID NO: 10891); |
| | ENST00000493470.2 (SEQ ID NO: 10893); ENST00000622960.1 (SEQ ID NO: 10894); |
| | ENST00000623242.3 (SEQ ID NO: 10896); ENST00000623316.1 (SEQ ID NO: 10898); |
| | ENST00000623321.3 (SEQ ID NO: 10899); ENST00000623706.3 (SEQ ID NO: 10900); |
| | ENST00000624032.3 (SEQ ID NO: 10901); ENST00000624166.3 (SEQ ID NO: 10902); |
| | ENST00000624193.1 (SEQ ID NO: 10903); ENST00000624403.1 (SEQ ID NO: 10905); |
| | ENST00000624668.3 (SEQ ID NO: 10906); ENST00000624766.1 (SEQ ID NO: 10908); |
| | ENST00000625063.3 (SEQ ID NO: 10910); ENST00000635865.1 (SEQ ID NO: 10912); |
| | ENST00000636152.1 (SEQ ID NO: 10914); ENST00000636868.1 (SEQ ID NO: 10916); |
| | ENST00000637175.1 (SEQ ID NO: 10918); ENST00000637959.1 (SEQ ID NO: 10920) |

Target: BBS2

| | |
|---|---|
| pre-mRNA | ENST00000245157.10 (SEQ ID NO: 15474); ENST00000561853.1 (SEQ ID NO: 10922); |
| transcript | ENST00000561877.1 (SEQ ID NO: 10924); ENST00000561951.5 (SEQ ID NO: 10926); |
| | ENST00000562012.1 (SEQ ID NO: 10928); ENST00000562059.1 (SEQ ID NO: 10930); |
| | ENST00000562813.1 (SEQ ID NO: 10932); ENST00000564123.6 (SEQ ID NO: 10934); |
| | ENST00000564459.5 (SEQ ID NO: 10936); ENST00000565378.1 (SEQ ID NO: 10938); |
| | ENST00000565781.5 (SEQ ID NO: 15475); ENST00000565859.1 (SEQ ID NO: 10941); |
| | ENST00000566210.1 (SEQ ID NO: 10943); ENST00000566410.1 (SEQ ID NO: 10945); |
| | ENST00000566452.1 (SEQ ID NO: 10947); ENST00000566495.1 (SEQ ID NO: 10949); |
| | ENST00000566689.5 (SEQ ID NO: 10951); ENST00000568104.5 (SEQ ID NO: 15476); |
| | ENST00000569192.5 (SEQ ID NO: 10954); ENST00000569342.5 (SEQ ID NO: 10956); |
| | ENST00000569941.5 (SEQ ID NO: 10958) |
| transcript | ENST00000245157.10 (SEQ ID NO: 10921); ENST00000561853.1 (SEQ ID NO: 10923); |
| | ENST00000561877.1 (SEQ ID NO: 10925); ENST00000561951.5 (SEQ ID NO: 10927); |
| | ENST00000562012.1 (SEQ ID NO: 10929); ENST00000562059.1 (SEQ ID NO: 10931); |
| | ENST00000562813.1 (SEQ ID NO: 10933); ENST00000564123.6 (SEQ ID NO: 10935); |
| | ENST00000564459.5 (SEQ ID NO: 10937); ENST00000565378.1 (SEQ ID NO: 10939); |
| | ENST00000565781.5 (SEQ ID NO: 10940); ENST00000565859.1 (SEQ ID NO: 10942); |
| | ENST00000566210.1 (SEQ ID NO: 10944); ENST00000566410.1 (SEQ ID NO: 10946); |
| | ENST00000566452.1 (SEQ ID NO: 10948); ENST00000566495.1 (SEQ ID NO: 10950); |
| | ENST00000566689.5 (SEQ ID NO: 10952); ENST00000568104.5 (SEQ ID NO: 10953); |
| | ENST00000569192.5 (SEQ ID NO: 10955); ENST00000569342.5 (SEQ ID NO: 10957); |
| | ENST00000569941.5 (SEQ ID NO: 10959) |

Target: BBS4

| | |
|---|---|
| pre-mRNA | ENST00000268057.9 (SEQ ID NO: 15477); ENST00000395205.6 (SEQ ID NO: 15478); |
| transcript | ENST00000561914.5 (SEQ ID NO: 15479); ENST00000562084.5 (SEQ ID NO: 15480); |
| | ENST00000562219.1 (SEQ ID NO: 10964); ENST00000563600.5 (SEQ ID NO: 15481); |
| | ENST00000564239.1 (SEQ ID NO: 15482); ENST00000565160.5 (SEQ ID NO: 15483); |
| | ENST00000566197.1 (SEQ ID NO: 10969); ENST00000566400.5 (SEQ ID NO: 15484); |
| | ENST00000566829.1 (SEQ ID NO: 15485); ENST00000566938.5 (SEQ ID NO: 15486); |
| | ENST00000567279.5 (SEQ ID NO: 15487); ENST00000568535.1 (SEQ ID NO: 10975); |
| | ENST00000569001.1 (SEQ ID NO: 10977); ENST00000569151.1 (SEQ ID NO: 10979); |
| | ENST00000569338.5 (SEQ ID NO: 15488); ENST00000569440.5 (SEQ ID NO: 15489) |
| transcript | ENST00000268057.9 (SEQ ID NO: 10960); ENST00000395205.6 (SEQ ID NO: 10961); |
| | ENST00000561914.5 (SEQ ID NO: 10962); ENST00000562084.5 (SEQ ID NO: 10963); |
| | ENST00000562219.1 (SEQ ID NO: 10965); ENST00000563600.5 (SEQ ID NO: 10966); |
| | ENST00000564239.1 (SEQ ID NO: 10967); ENST00000565160.5 (SEQ ID NO: 10968); |
| | ENST00000566197.1 (SEQ ID NO: 10970); ENST00000566400.5 (SEQ ID NO: 10971); |
| | ENST00000566829.1 (SEQ ID NO: 10972); ENST00000566938.5 (SEQ ID NO: 10973); |
| | ENST00000567279.5 (SEQ ID NO: 10974); ENST00000568535.1 (SEQ ID NO: 10976); |
| | ENST00000569001.1 (SEQ ID NO: 10978); ENST00000569151.1 (SEQ ID NO: 10980); |
| | ENST00000569338.5 (SEQ ID NO: 10981); ENST00000569440.5 (SEQ ID NO: 10982) |

Target: BRD9

| | |
|---|---|
| pre-mRNA | ENST00000466684.5 (SEQ ID NO: 10983); ENST00000467963.6 (SEQ ID NO: 10985); |
| transcript | ENST00000475706.5 (SEQ ID NO: 10987); ENST00000483173.5 (SEQ ID NO: 10989); |
| | ENST00000483234.5 (SEQ ID NO: 10991); ENST00000487688.1 (SEQ ID NO: 10993); |
| | ENST00000489093.1 (SEQ ID NO: 10995); ENST00000489816.5 (SEQ ID NO: 10997); |
| | ENST00000490814.6 (SEQ ID NO: 10999); ENST00000493082.5 (SEQ ID NO: 11001); |
| | ENST00000494422.1 (SEQ ID NO: 11003); ENST00000495265.5 (SEQ ID NO: 11005); |
| | ENST00000495794.5 (SEQ ID NO: 11007); ENST00000497410.5 (SEQ ID NO: 11009); |
| | ENST00000518250.5 (SEQ ID NO: 11011); ENST00000518251.1 (SEQ ID NO: 11013); |
| | ENST00000519112.5 (SEQ ID NO: 11015); ENST00000519838.5 (SEQ ID NO: 11017); |
| | ENST00000523139.5 (SEQ ID NO: 11019) |
| transcript | ENST00000466684.5 (SEQ ID NO: 10984); ENST00000467963.6 (SEQ ID NO: 10986); |
| | ENST00000475706.5 (SEQ ID NO: 10988); ENST00000483173.5 (SEQ ID NO: 10990); |
| | ENST00000483234.5 (SEQ ID NO: 10992); ENST00000487688.1 (SEQ ID NO: 10994); |
| | ENST00000489093.1 (SEQ ID NO: 10996); ENST00000489816.5 (SEQ ID NO: 10998); |
| | ENST00000490814.6 (SEQ ID NO: 11000); ENST00000493082.5 (SEQ ID NO: 11002); |
| | ENST00000494422.1 (SEQ ID NO: 11004); ENST00000495265.5 (SEQ ID NO: 11006); |
| | ENST00000495794.5 (SEQ ID NO: 11008); ENST00000497410.5 (SEQ ID NO: 11010); |
| | ENST00000518250.5 (SEQ ID NO: 11012); ENST00000518251.1 (SEQ ID NO: 11014); |
| | ENST00000519112.5 (SEQ ID NO: 11016); ENST00000519838.5 (SEQ ID NO: 11018); |
| | ENST00000523139.5 (SEQ ID NO: 11020) |

Target: CALM3

| | |
|---|---|
| pre-mRNA | ENST00000291295.14 (SEQ ID NO: 11021); ENST00000391918.6 (SEQ ID NO: 11023); |
| transcript | ENST00000477244.5 (SEQ ID NO: 11025); ENST00000482455.5 (SEQ ID NO: 11027); |
| | ENST00000486500.1 (SEQ ID NO: 11029); ENST00000594523.5 (SEQ ID NO: 11031); |
| | ENST00000595072.2 (SEQ ID NO: 11033); ENST00000596362.1 (SEQ ID NO: 11035); |
| | ENST00000597743.5 (SEQ ID NO: 11037); ENST00000597868.5 (SEQ ID NO: 11039); |
| | ENST00000598871.5 (SEQ ID NO: 11041); ENST00000599839.5 (SEQ ID NO: 11043); |
| | ENST00000602169.2 (SEQ ID NO: 11045) |
| transcript | ENST00000291295.14 (SEQ ID NO: 11022); ENST00000391918.6 (SEQ ID NO: 11024); |
| | ENST00000477244.5 (SEQ ID NO: 11026); ENST00000482455.5 (SEQ ID NO: 11028); |
| | ENST00000486500.1 (SEQ ID NO: 11030); ENST00000594523.5 (SEQ ID NO: 11032); |
| | ENST00000595072.2 (SEQ ID NO: 11034); ENST00000596362.1 (SEQ ID NO: 11036); |
| | ENST00000597743.5 (SEQ ID NO: 11038); ENST00000597868.5 (SEQ ID NO: 11040); |
| | ENST00000598871.5 (SEQ ID NO: 11042); ENST00000599839.5 (SEQ ID NO: 11044); |
| | ENST00000602169.2 (SEQ ID NO: 11046) |

Target: CARS1

| | |
|---|---|
| pre-mRNA | ENST00000278224.13 (SEQ ID NO: 15490); ENST00000380525.8 (SEQ ID NO: 15491); |
| transcript | ENST00000397111.9 (SEQ ID NO: 15492); ENST00000439280.6 (SEQ ID NO: 11050); |
| | ENST00000465207.5 (SEQ ID NO: 11052); ENST00000465240.1 (SEQ ID NO: 11054); |
| | ENST00000465331.1 (SEQ ID NO: 11056); ENST00000466442.6 (SEQ ID NO: 11058); |
| | ENST00000470221.6 (SEQ ID NO: 11060); ENST00000484484.5 (SEQ ID NO: 11062); |
| | ENST00000524825.5 (SEQ ID NO: 11064); ENST00000526890.5 (SEQ ID NO: 15493); |
| | ENST00000527330.2 (SEQ ID NO: 11067); ENST00000529772.5 (SEQ ID NO: 15494); |
| | ENST00000531387.5 (SEQ ID NO: 15495); ENST00000639317.1 (SEQ ID NO: 11071) |
| transcript | ENST00000278224.13 (SEQ ID NO: 11047); ENST00000380525.8 (SEQ ID NO: 11048); |
| | ENST00000397111.9 (SEQ ID NO: 11049); ENST00000439280.6 (SEQ ID NO: 11051); |
| | ENST00000465207.5 (SEQ ID NO: 11053); ENST00000465240.1 (SEQ ID NO: 11055); |
| | ENST00000465331.1 (SEQ ID NO: 11057); ENST00000466442.6 (SEQ ID NO: 11059); |
| | ENST00000470221.6 (SEQ ID NO: 11061); ENST00000484484.5 (SEQ ID NO: 11063); |
| | ENST00000524825.5 (SEQ ID NO: 11065); ENST00000526890.5 (SEQ ID NO: 11066); |
| | ENST00000527330.2 (SEQ ID NO: 11068); ENST00000529772.5 (SEQ ID NO: 11069); |
| | ENST00000531387.5 (SEQ ID NO: 11070); ENST00000639317.1 (SEQ ID NO: 11072) |

Target: CASP9

| | |
|---|---|
| pre-mRNA | ENST00000333868.10 (SEQ ID NO: 15496); ENST00000348549.9 (SEQ ID NO: 15497); |
| transcript | ENST00000375890.8 (SEQ ID NO: 15498); ENST00000400777.7 (SEQ ID NO: 15499); |
| | ENST00000424908.5 (SEQ ID NO: 11077); ENST00000440484.1 (SEQ ID NO: 11079); |
| | ENST00000447522.5 (SEQ ID NO: 11081); ENST00000469637.1 (SEQ ID NO: 11083); |
| | ENST00000474305.2 (SEQ ID NO: 15500); ENST00000546424.5 (SEQ ID NO: 15501); |
| | ENST00000546969.1 (SEQ ID NO: 11087) |
| transcript | ENST00000333868.10 (SEQ ID NO: 11073); ENST00000348549.9 (SEQ ID NO: 11074); |
| | ENST00000375890.8 (SEQ ID NO: 11075); ENST00000400777.7 (SEQ ID NO: 11076); |
| | ENST00000424908.5 (SEQ ID NO: 11078); ENST00000440484.1 (SEQ ID NO: 11080); |
| | ENST00000447522.5 (SEQ ID NO: 11082); ENST00000469637.1 (SEQ ID NO: 11084); |
| | ENST00000474305.2 (SEQ ID NO: 11085); ENST00000546424.5 (SEQ ID NO: 11086); |
| | ENST00000546969.1 (SEQ ID NO: 11088) |

Target: CATSPER1

| | |
|---|---|
| pre-mRNA | ENST00000312106.6 (SEQ ID NO: 11089); ENST00000529244.1 (SEQ ID NO: 11091) |
| transcript | |
| transcript | ENST00000312106.6 (SEQ ID NO: 11090); ENST00000529244.1 (SEQ ID NO: 11092) |

Target: CCDC40

| | |
|---|---|
| pre-mRNA | ENST00000269318.9 (SEQ ID NO: 15502); ENST00000374876.4 (SEQ ID NO: 15503); |
| transcript | ENST00000374877.7 (SEQ ID NO: 15504); ENST00000397545.9 (SEQ ID NO: 15505); |
| | ENST00000571028.1 (SEQ ID NO: 11097); ENST00000572083.5 (SEQ ID NO: 11099); |
| | ENST00000572253.5 (SEQ ID NO: 11101); ENST00000572270.1 (SEQ ID NO: 11103); |
| | ENST00000573474.5 (SEQ ID NO: 11105); ENST00000573903.1 (SEQ ID NO: 11107); |
| | ENST00000574099.1 (SEQ ID NO: 11109); ENST00000574799.5 (SEQ ID NO: 15506); |
| | ENST00000574933.1 (SEQ ID NO: 11112); ENST00000575431.1 (SEQ ID NO: 11114); |
| | ENST00000576033.5 (SEQ ID NO: 11116); ENST00000576241.1; (SEQ ID NO: 11118) |
| transcript | ENST00000269318.9 (SEQ ID NO: 11093); ENST00000374876.4 (SEQ ID NO: 11094); |
| | ENST00000374877.7 (SEQ ID NO: 11095); ENST00000397545.9 (SEQ ID NO: 11096); |
| | ENST00000571028.1 (SEQ ID NO: 11098); ENST00000572083.5 (SEQ ID NO: 11100); |
| | ENST00000572253.5 (SEQ ID NO: 11102); ENST00000572270.1 (SEQ ID NO: 11104); |
| | ENST00000573474.5 (SEQ ID NO: 11106); ENST00000573903.1 (SEQ ID NO: 11108); |
| | ENST00000574099.1 (SEQ ID NO: 11110); ENST00000574799.5 (SEQ ID NO: 11111); |
| | ENST00000574933.1 (SEQ ID NO: 11113); ENST00000575431.1 (SEQ ID NO: 11115); |
| | ENST00000576033.5 (SEQ ID NO: 11117); ENST00000576241.1 (SEQ ID NO: 11119) |

Target: CCDC88B

| | |
|---|---|
| pre-mRNA | ENST00000301897.5 (SEQ ID NO: 11120); ENST00000356786.10 (SEQ ID NO: 11122); |
| transcript | ENST00000359902.2 (SEQ ID NO: 11124); ENST00000463837.5 (SEQ ID NO: 11126); |
| | ENST00000472524.1 (SEQ ID NO: 11128); ENST00000473405.1 (SEQ ID NO: 11130); |
| | ENST00000479965.5 (SEQ ID NO: 11132); ENST00000492980.1 (SEQ ID NO: 11134); |
| | ENST00000494080.5 (SEQ ID NO: 11136); ENST00000494566.5 (SEQ ID NO: 11138) |
| transcript | ENST00000301897.5 (SEQ ID NO: 11121); ENST00000356786.10 (SEQ ID NO: 11123); |
| | ENST00000359902.2 (SEQ ID NO: 11125); ENST00000463837.5 (SEQ ID NO: 11127); |
| | ENST00000472524.1 (SEQ ID NO: 11129); ENST00000473405.1 (SEQ ID NO: 11131); |
| | ENST00000479965.5 (SEQ ID NO: 11133); ENST00000492980.1 (SEQ ID NO: 11135); |
| | ENST00000494080.5 (SEQ ID NO: 11137); ENST00000494566.5 (SEQ ID NO: 11139) |

Target: CD4

| | |
|---|---|
| pre-mRNA | ENST00000011653.9 (SEQ ID NO: 15507); ENST00000437800.6 (SEQ ID NO: 15508); |
| transcript | ENST00000535466.5 (SEQ ID NO: 11142); ENST00000535707.5 (SEQ ID NO: 11144); |
| | ENST00000536563.1 (SEQ ID NO: 11146); ENST00000536590.1 (SEQ ID NO: 11148); |
| | ENST00000536610.5 (SEQ ID NO: 11150); ENST00000538827.5 (SEQ ID NO: 11152); |
| | ENST00000539492.1 (SEQ ID NO: 11154); ENST00000541982.5 (SEQ ID NO: 11156); |
| | ENST00000543755.1 (SEQ ID NO: 11158); ENST00000544344.5 (SEQ ID NO: 11160) |
| transcript | ENST00000011653.9 (SEQ ID NO: 11140); ENST00000437800.6 (SEQ ID NO: 11141); |
| | ENST00000535466.5 (SEQ ID NO: 11143); ENST00000535707.5 (SEQ ID NO: 11145); |
| | ENST00000536563.1 (SEQ ID NO: 11147); ENST00000536590.1 (SEQ ID NO: 11149); |
| | ENST00000536610.5 (SEQ ID NO: 11151); ENST00000538827.5 (SEQ ID NO: 11153); |
| | ENST00000539492.1 (SEQ ID NO: 11155); ENST00000541982.5 (SEQ ID NO: 11157); |
| | ENST00000543755.1 (SEQ ID NO: 11159); ENST00000544344.5 (SEQ ID NO: 11161) |

Target: CD58

| | |
|---|---|
| pre-mRNA | ENST00000369487.3 (SEQ ID NO: 15509); ENST00000369489.10 (SEQ ID NO: 15510); |
| transcript | ENST00000457047.6 (SEQ ID NO: 15511); ENST00000464088.5 (SEQ ID NO: 15512); |
| | ENST00000526981.1 (SEQ ID NO: 11166) |
| transcript | ENST00000369487.3 (SEQ ID NO: 11162); ENST00000369489.10 (SEQ ID NO: 11163); |
| | ENST00000457047.6 (SEQ ID NO: 11164); ENST00000464088.5 (SEQ ID NO: 11165); |
| | ENST00000526981.1 (SEQ ID NO: 11167) |

Target: CES2

| | |
|---|---|
| pre-mRNA | ENST00000317091.10 (SEQ ID NO: 11168); ENST00000417689.6 (SEQ ID NO: 11170); |
| transcript | ENST00000561697.5 (SEQ ID NO: 11172); ENST00000561843.1 (SEQ ID NO: 11174); |
| | ENST00000563988.1 (SEQ ID NO: 11176); ENST00000564420.1 (SEQ ID NO: 11178); |
| | ENST00000566182.1 (SEQ ID NO: 11180); ENST00000566359.1 (SEQ ID NO: 11182); |
| | ENST00000567128.1 (SEQ ID NO: 11184); ENST00000568347.1 (SEQ ID NO: 11186); |
| | ENST00000568470.6 (SEQ ID NO: 11188); ENST00000570032.2 (SEQ ID NO: 11190); |
| | ENST00000652196.1 (SEQ ID NO: 11192); ENST00000652667.1; (SEQ ID NO: 11194) |
| transcript | ENST00000317091.10 (SEQ ID NO: 11169); ENST00000417689.6 (SEQ ID NO: 11171); |
| | ENST00000561697.5 (SEQ ID NO: 11173); ENST00000561843.1 (SEQ ID NO: 11175); |
| | ENST00000563988.1 (SEQ ID NO: 11177); ENST00000564420.1 (SEQ ID NO: 11179); |
| | ENST00000566182.1 (SEQ ID NO: 11181); ENST00000566359.1 (SEQ ID NO: 11183); |
| | ENST00000567128.1 (SEQ ID NO: 11185); ENST00000568347.1 (SEQ ID NO: 11187); |
| | ENST00000568470.6 (SEQ ID NO: 11189); ENST00000570032.2 (SEQ ID NO: 11191); |
| | ENST00000652196.1 (SEQ ID NO: 11193); ENST00000652667.1 (SEQ ID NO: 11195) |

Target: CHFR

| | |
|---|---|
| pre-mRNA | ENST00000266880.11 (SEQ ID NO: 15513); ENST00000315585.11 (SEQ ID NO: 15514); |
| transcript | ENST00000432561.6 (SEQ ID NO: 15515); ENST00000443047.6 (SEQ ID NO: 15516); |
| | ENST00000450056.6 (SEQ ID NO: 15517); ENST00000499045.2 (SEQ ID NO: 15518); |
| | ENST00000502279.2 (SEQ ID NO: 11202); ENST00000511001.2 (SEQ ID NO: 11204); |
| | ENST00000535181.5 (SEQ ID NO: 11206); ENST00000535527.5 (SEQ ID NO: 11208); |
| | ENST00000535897.1 (SEQ ID NO: 11210); ENST00000536196.1 (SEQ ID NO: 11212); |
| | ENST00000536843.5 (SEQ ID NO: 11214); ENST00000536932.5 (SEQ ID NO: 15519); |
| | ENST00000537551.5 (SEQ ID NO: 11217); ENST00000538235.2 (SEQ ID NO: 11219); |
| | ENST00000540537.5 (SEQ ID NO: 15520); ENST00000540963.1 (SEQ ID NO: 11222); |
| | ENST00000541341.5 (SEQ ID NO: 11224); ENST00000541817.5 (SEQ ID NO: 15521); |
| | ENST00000542714.5 (SEQ ID NO: 15522); ENST00000544093.5 (SEQ ID NO: 11228); |
| | ENST00000544268.5 (SEQ ID NO: 11230); ENST00000545046.5 (SEQ ID NO: 11232) |
| transcript | ENST00000266880.11 (SEQ ID NO: 11196); ENST00000315585.11 (SEQ ID NO: 11197); |
| | ENST00000432561.6 (SEQ ID NO: 11198); ENST00000443047.6 (SEQ ID NO: 11199); |
| | ENST00000450056.6 (SEQ ID NO: 11200); ENST00000499045.2 (SEQ ID NO: 11201); |
| | ENST00000502279.2 (SEQ ID NO: 11203); ENST00000511001.2 (SEQ ID NO: 11205); |
| | ENST00000535181.5 (SEQ ID NO: 11207); ENST00000535527.5 (SEQ ID NO: 11209); |
| | ENST00000535897.1 (SEQ ID NO: 11211); ENST00000536196.1 (SEQ ID NO: 11213); |
| | ENST00000536843.5 (SEQ ID NO: 11215); ENST00000536932.5 (SEQ ID NO: 11216); |
| | ENST00000537551.5 (SEQ ID NO: 11218); ENST00000538235.2 (SEQ ID NO: 11220); |
| | ENST00000540537.5 (SEQ ID NO: 11221); ENST00000540963.1 (SEQ ID NO: 11223); |
| | ENST00000541341.5 (SEQ ID NO: 11225); ENST00000541817.5 (SEQ ID NO: 11226); |
| | ENST00000542714.5 (SEQ ID NO: 11227); ENST00000544093.5 (SEQ ID NO: 11229); |
| | ENST00000544268.5 (SEQ ID NO: 11231); ENST00000545046.5 (SEQ ID NO: 11233) |

Target: CLCN2

| | |
|---|---|
| pre-mRNA | ENST00000265593.9 (SEQ ID NO: 11234); ENST00000344937.11 (SEQ ID NO: 11236); |
| transcript | ENST00000430397.5 (SEQ ID NO: 11238); ENST00000434054.6 (SEQ ID NO: 11240); |
| | ENST00000457512.1 (SEQ ID NO: 11242); ENST00000465231.1 (SEQ ID NO: 11244); |
| | ENST00000475279.2 (SEQ ID NO: 11246); ENST00000485667.1 (SEQ ID NO: 11248); |
| | ENST00000491162.1 (SEQ ID NO: 11250); ENST00000636180.1 (SEQ ID NO: 11252); |
| | ENST00000636241.1 (SEQ ID NO: 11254); ENST00000636419.1 (SEQ ID NO: 11256); |
| | ENST00000636492.1 (SEQ ID NO: 11258); ENST00000636658.1 (SEQ ID NO: 11260); |
| | ENST00000636661.1 (SEQ ID NO: 11262); ENST00000636830.1 (SEQ ID NO: 11264); |
| | ENST00000636860.1 (SEQ ID NO: 11266); ENST00000637258.1 (SEQ ID NO: 11268); |
| | ENST00000637392.1 (SEQ ID NO: 11270); ENST00000637538.1 (SEQ ID NO: 11272); |
| | ENST00000637909.1 (SEQ ID NO: 11274); ENST00000638134.1 (SEQ ID NO: 11276) |
| transcript | ENST00000265593.9 (SEQ ID NO: 11235); ENST00000344937.11 (SEQ ID NO: 11237); |
| | ENST00000430397.5 (SEQ ID NO: 11239); ENST00000434054.6 (SEQ ID NO: 11241); |
| | ENST00000457512.1 (SEQ ID NO: 11243); ENST00000465231.1 (SEQ ID NO: 11245); |
| | ENST00000475279.2 (SEQ ID NO: 11247); ENST00000485667.1 (SEQ ID NO: 11249); |
| | ENST00000491162.1 (SEQ ID NO: 11251); ENST00000636180.1 (SEQ ID NO: 11253); |
| | ENST00000636241.1 (SEQ ID NO: 11255); ENST00000636419.1 (SEQ ID NO: 11257); |
| | ENST00000636492.1 (SEQ ID NO: 11259); ENST00000636658.1 (SEQ ID NO: 11261); |
| | ENST00000636661.1 (SEQ ID NO: 11263); ENST00000636830.1 (SEQ ID NO: 11265); |
| | ENST00000636860.1 (SEQ ID NO: 11267); ENST00000637258.1 (SEQ ID NO: 11269); |
| | ENST00000637392.1 (SEQ ID NO: 11271); ENST00000637538.1 (SEQ ID NO: 11273); |
| | ENST00000637909.1 (SEQ ID NO: 11275); ENST00000638134.1 (SEQ ID NO: 11277) |

Target: CNOT3

| | |
|---|---|
| pre-mRNA | ENST00000221232.11 (SEQ ID NO: 11278); ENST00000358389.7 (SEQ ID NO: 11280); |
| transcript | ENST00000440571.6 (SEQ ID NO: 11282); ENST00000447684.5 (SEQ ID NO: 11284); |
| | ENST00000457463.1 (SEQ ID NO: 11286); ENST00000471126.1 (SEQ ID NO: 11288); |
| | ENST00000496327.2 (SEQ ID NO: 11290); ENST00000613073.4 (SEQ ID NO: 11292); |
| | ENST00000617930.2 (SEQ ID NO: 11294); ENST00000618939.5 (SEQ ID NO: 11296); |
| | ENST00000642159.1 (SEQ ID NO: 11298); ENST00000644245.1 (SEQ ID NO: 11300); |
| | ENST00000644707.1 (SEQ ID NO: 11302); ENST00000646002.1 (SEQ ID NO: 11304); |
| | ENST00000647082.1 (SEQ ID NO: 11306) |
| transcript | ENST00000221232.11 (SEQ ID NO: 11279); ENST00000358389.7 (SEQ ID NO: 11281); |
| | ENST00000440571.6 (SEQ ID NO: 11283); ENST00000447684.5 (SEQ ID NO: 11285); |
| | ENST00000457463.1 (SEQ ID NO: 11287); ENST00000471126.1 (SEQ ID NO: 11289); |
| | ENST00000496327.2 (SEQ ID NO: 11291); ENST00000613073.4 (SEQ ID NO: 11293); |
| | ENST00000617930.2 (SEQ ID NO: 11295); ENST00000618939.5 (SEQ ID NO: 11297); |
| | ENST00000642159.1 (SEQ ID NO: 11299); ENST00000644245.1 (SEQ ID NO: 11301); |
| | ENST00000644707.1 (SEQ ID NO: 11303); ENST00000646002.1 (SEQ ID NO: 11305); |
| | ENST00000647082.1 (SEQ ID NO: 11307) |

Target: CNTROB

| | |
|---|---|
| pre-mRNA | ENST00000380262.7 (SEQ ID NO: 11308); ENST00000563694.6 (SEQ ID NO: 11310); |
| transcript | ENST00000565740.5 (SEQ ID NO: 11312); ENST00000570782.1 (SEQ ID NO: 11314); |
| | ENST00000570784.1 (SEQ ID NO: 11316); ENST00000571540.5 (SEQ ID NO: 11318); |
| | ENST00000571632.5 (SEQ ID NO: 11320); ENST00000573862.1 (SEQ ID NO: 11322); |
| | ENST00000574430.5 (SEQ ID NO: 11324); ENST00000575408.5 (SEQ ID NO: 11326); |
| | ENST00000576536.1 (SEQ ID NO: 11328); ENST00000576538.5 (SEQ ID NO: 11330); |
| | ENST00000576587.1 (SEQ ID NO: 11332); ENST00000576723.5 (SEQ ID NO: 11334); |
| | ENST00000576922.5 (SEQ ID NO: 11336) |
| transcript | ENST00000380262.7 (SEQ ID NO: 11309); ENST00000563694.6 (SEQ ID NO: 11311); |
| | ENST00000565740.5 (SEQ ID NO: 11313); ENST00000570782.1 (SEQ ID NO: 11315); |
| | ENST00000570784.1 (SEQ ID NO: 11317); ENST00000571540.5 (SEQ ID NO: 11319); |
| | ENST00000571632.5 (SEQ ID NO: 11321); ENST00000573862.1 (SEQ ID NO: 11323); |
| | ENST00000574430.5 (SEQ ID NO: 11325); ENST00000575408.5 (SEQ ID NO: 11327); |
| | ENST00000576536.1 (SEQ ID NO: 11329); ENST00000576538.5 (SEQ ID NO: 11331); |
| | ENST00000576587.1 (SEQ ID NO: 11333); ENST00000576723.5 (SEQ ID NO: 11335); |
| | ENST00000576922.5 (SEQ ID NO: 11337) |

Target: COL5A3

| | |
|---|---|
| pre-mRNA | ENST00000264828.4 (SEQ ID NO: 15523); ENST00000461214.1; (SEQ ID NO: 11339) |
| transcript | |
| transcript | ENST00000264828.4 (SEQ ID NO: 11338); ENST00000461214.1 (SEQ ID NO: 11340) |

Target: CPSF1

| | |
|---|---|
| pre-mRNA | ENST00000526271.2 (SEQ ID NO: 11341); ENST00000527827.1 (SEQ ID NO: 11343); |
| transcript | ENST00000527916.1 (SEQ ID NO: 11345); ENST00000529288.1 (SEQ ID NO: 11347); |
| | ENST00000531042.5 (SEQ ID NO: 11349); ENST00000531480.2 (SEQ ID NO: 11351); |
| | ENST00000531727.5 (SEQ ID NO: 11353); ENST00000532560.5 (SEQ ID NO: 11355); |
| | ENST00000532725.1 (SEQ ID NO: 11357); ENST00000532935.5 (SEQ ID NO: 11359); |
| | ENST00000533492.1 (SEQ ID NO: 11361); ENST00000616140.2 (SEQ ID NO: 11363); |
| | ENST00000620219.4 (SEQ ID NO: 11365); ENST00000622776.1; (SEQ ID NO: 11367) |
| transcript | ENST00000526271.2 (SEQ ID NO: 11342); ENST00000527827.1 (SEQ ID NO: 11344); |
| | ENST00000527916.1 (SEQ ID NO: 11346); ENST00000529288.1 (SEQ ID NO: 11348); |
| | ENST00000531042.5 (SEQ ID NO: 11350); ENST00000531480.2 (SEQ ID NO: 11352); |
| | ENST00000531727.5 (SEQ ID NO: 11354); ENST00000532560.5 (SEQ ID NO: 11356); |
| | ENST00000532725.1 (SEQ ID NO: 11358); ENST00000532935.5 (SEQ ID NO: 11360); |
| | ENST00000533492.1 (SEQ ID NO: 11362); ENST00000616140.2 (SEQ ID NO: 11364); |
| | ENST00000620219.4 (SEQ ID NO: 11366); ENST00000622776.1 (SEQ ID NO: 11368) |

Target: CSPP1

| | |
|---|---|
| pre-mRNA | ENST00000262210.9 (SEQ ID NO: 15524); ENST00000519163.6 (SEQ ID NO: 15525); |
| transcript | ENST00000519668.1 (SEQ ID NO: 15526); ENST00000519701.5 (SEQ ID NO: 11372); |
| | ENST00000521168.5 (SEQ ID NO: 15527); ENST00000521324.1 (SEQ ID NO: 11375); |
| | ENST00000521919.5; (SEQ ID NO: 15528) |
| transcript | ENST00000262210.9 (SEQ ID NO: 11369); ENST00000519163.6 (SEQ ID NO: 11370); |
| | ENST00000519668.1 (SEQ ID NO: 11371); ENST00000519701.5 (SEQ ID NO: 11373); |
| | ENST00000521168.5 (SEQ ID NO: 11374); ENST00000521324.1 (SEQ ID NO: 11376); |
| | ENST00000521919.5 (SEQ ID NO: 11377) |

Target: CTF1

| | |
|---|---|
| pre-mRNA | ENST00000279804.2 (SEQ ID NO: 11378); ENST00000395019.3 (SEQ ID NO: 11380) |
| transcript | |
| transcript | ENST00000279804.2 (SEQ ID NO: 11379); ENST00000395019.3 (SEQ ID NO: 11381) |

Target: CTH

| | |
|---|---|
| pre-mRNA | ENST00000346806.2 (SEQ ID NO: 11382); ENST00000370938.8 (SEQ ID NO: 11384); |
| transcript | ENST00000411986.6 (SEQ ID NO: 11386); ENST00000464926.1 (SEQ ID NO: 11388); |
| | ENST00000482383.1 (SEQ ID NO: 11390) |
| transcript | ENST00000346806.2 (SEQ ID NO: 11383); ENST00000370938.8 (SEQ ID NO: 11385); |
| | ENST00000411986.6 (SEQ ID NO: 11387); ENST00000464926.1 (SEQ ID NO: 11389); |
| | ENST00000482383.1 (SEQ ID NO: 11391) |

Target: CYP3A5

| | |
|---|---|
| pre-mRNA | ENST00000222982.8 (SEQ ID NO: 15529); ENST00000339843.6 (SEQ ID NO: 15530); |
| transcript | ENST00000439761.3 (SEQ ID NO: 11394); ENST00000456417.5 (SEQ ID NO: 11396); |
| | ENST00000461920.5 (SEQ ID NO: 15531); ENST00000463364.5 (SEQ ID NO: 11399); |
| | ENST00000463907.5 (SEQ ID NO: 11401); ENST00000466061.5 (SEQ ID NO: 11403); |
| | ENST00000469622.5 (SEQ ID NO: 11405); ENST00000469887.5 (SEQ ID NO: 11407); |
| | ENST00000473347.1 (SEQ ID NO: 11409); ENST00000480723.5 (SEQ ID NO: 11411); |
| | ENST00000481825.5 (SEQ ID NO: 11413); ENST00000488187.1 (SEQ ID NO: 11415); |
| | ENST00000489231.1 (SEQ ID NO: 11417); ENST00000646887.1 (SEQ ID NO: 15532) |
| transcript | ENST00000222982.8 (SEQ ID NO: 11392); ENST00000339843.6 (SEQ ID NO: 11393); |
| | ENST00000439761.3 (SEQ ID NO: 11395); ENST00000456417.5 (SEQ ID NO: 11397); |
| | ENST00000461920.5 (SEQ ID NO: 11398); ENST00000463364.5 (SEQ ID NO: 11400); |
| | ENST00000463907.5 (SEQ ID NO: 11402); ENST00000466061.5 (SEQ ID NO: 11404); |
| | ENST00000469622.5 (SEQ ID NO: 11406); ENST00000469887.5 (SEQ ID NO: 11408); |
| | ENST00000473347.1 (SEQ ID NO: 11410); ENST00000480723.5 (SEQ ID NO: 11412); |
| | ENST00000481825.5 (SEQ ID NO: 11414); ENST00000488187.1 (SEQ ID NO: 11416); |
| | ENST00000489231.1 (SEQ ID NO: 11418); ENST00000646887.1 (SEQ ID NO: 11419) |

Target: DAB2IP

| | |
|---|---|
| pre-mRNA | ENST00000259371.6 (SEQ ID NO: 15533); ENST00000309989.1 (SEQ ID NO: 15534); |
| transcript | ENST00000373782.7 (SEQ ID NO: 15535); ENST00000394340.7 (SEQ ID NO: 15536); |
| | ENST00000408936.7 (SEQ ID NO: 15537); ENST00000436835.5 (SEQ ID NO: 15538); |
| | ENST00000459906.1 (SEQ ID NO: 11426); ENST00000465078.1 (SEQ ID NO: 11428); |
| | ENST00000487716.1 (SEQ ID NO: 11430); ENST00000489314.1 (SEQ ID NO: 15539); |
| | ENST00000648444.1 (SEQ ID NO: 15540); ENST00000648693.1 (SEQ ID NO: 11434) |
| transcript | ENST00000259371.6 (SEQ ID NO: 11420); ENST00000309989.1 (SEQ ID NO: 11421); |
| | ENST00000373782.7 (SEQ ID NO: 11422); ENST00000394340.7 (SEQ ID NO: 11423); |
| | ENST00000408936.7 (SEQ ID NO: 11424); ENST00000436835.5 (SEQ ID NO: 11425); |
| | ENST00000459906.1 (SEQ ID NO: 11427); ENST00000465078.1 (SEQ ID NO: 11429); |
| | ENST00000487716.1 (SEQ ID NO: 11431); ENST00000489314.1 (SEQ ID NO: 11432); |
| | ENST00000648444.1 (SEQ ID NO: 11433); ENST00000648693.1 (SEQ ID NO: 11435) |

Target: DBN1

| | |
|---|---|
| pre-mRNA | ENST00000292385.9 (SEQ ID NO: 11436); ENST00000309007.9 (SEQ ID NO: 11438); |
| transcript | ENST00000393565.5 (SEQ ID NO: 11440); ENST00000467054.2 (SEQ ID NO: 11442); |
| | ENST00000471767.1 (SEQ ID NO: 11444); ENST00000472831.5 (SEQ ID NO: 11446); |
| | ENST00000477391.6 (SEQ ID NO: 11448); ENST00000505550.1 (SEQ ID NO: 11450); |
| | ENST00000506117.5 (SEQ ID NO: 11452); ENST00000512501.1 (SEQ ID NO: 11454); |
| | ENST00000514833.1 (SEQ ID NO: 11456) |
| transcript | ENST00000292385.9 (SEQ ID NO: 11437); ENST00000309007.9 (SEQ ID NO: 11439); |
| | ENST00000393565.5 (SEQ ID NO: 11441); ENST00000467054.2 (SEQ ID NO: 11443); |
| | ENST00000471767.1 (SEQ ID NO: 11445); ENST00000472831.5 (SEQ ID NO: 11447); |
| | ENST00000477391.6 (SEQ ID NO: 11449); ENST00000505550.1 (SEQ ID NO: 11451); |
| | ENST00000506117.5 (SEQ ID NO: 11453); ENST00000512501.1 (SEQ ID NO: 11455); |
| | ENST00000514833.1 (SEQ ID NO: 11457) |

Target: DDX51

| | |
|---|---|
| pre-mRNA | ENST00000329073.8 (SEQ ID NO: 11458); ENST00000397333.4 (SEQ ID NO: 11460); |
| transcript | ENST00000462829.2 (SEQ ID NO: 11462); ENST00000541489.5 (SEQ ID NO: 11464); |
| | ENST00000545991.1 (SEQ ID NO: 11466); ENST00000546058.1 (SEQ ID NO: 11468) |
| transcript | ENST00000329073.8 (SEQ ID NO: 11459); ENST00000397333.4 (SEQ ID NO: 11461); |
| | ENST00000462829.2 (SEQ ID NO: 11463); ENST00000541489.5 (SEQ ID NO: 11465); |
| | ENST00000545991.1 (SEQ ID NO: 11467); ENST00000546058.1 (SEQ ID NO: 11469) |

Target: DEAF1

| | |
|---|---|
| pre-mRNA | ENST00000382409.3 (SEQ ID NO: 15541); ENST00000524786.1 (SEQ ID NO: 11471); |
| transcript | ENST00000525626.5 (SEQ ID NO: 11473); ENST00000525904.5 (SEQ ID NO: 11475); |
| | ENST00000526790.1 (SEQ ID NO: 11477); ENST00000526857.2 (SEQ ID NO: 11479); |
| | ENST00000527170.5 (SEQ ID NO: 15542); ENST00000527658.1 (SEQ ID NO: 11482); |
| | ENST00000528864.5 (SEQ ID NO: 11484); ENST00000529717.5 (SEQ ID NO: 11486); |
| | ENST00000529727.1 (SEQ ID NO: 11488); ENST00000530813.1 (SEQ ID NO: 15543) |
| transcript | ENST00000382409.3 (SEQ ID NO: 11470); ENST00000524786.1 (SEQ ID NO: 11472); |
| | ENST00000525626.5 (SEQ ID NO: 11474); ENST00000525904.5 (SEQ ID NO: 11476); |
| | ENST00000526790.1 (SEQ ID NO: 11478); ENST00000526857.2 (SEQ ID NO: 11480); |
| | ENST00000527170.5 (SEQ ID NO: 11481); ENST00000527658.1 (SEQ ID NO: 11483); |
| | ENST00000528864.5 (SEQ ID NO: 11485); ENST00000529717.5 (SEQ ID NO: 11487); |
| | ENST00000529727.1 (SEQ ID NO: 11489); ENST00000530813.1 (SEQ ID NO: 11490) |

Target: DGKE

| | |
|---|---|
| pre-mRNA | ENST00000284061.8 (SEQ ID NO: 15544); ENST00000570738.1 (SEQ ID NO: 11492); |
| transcript | ENST00000571084.1 (SEQ ID NO: 11494); ENST00000572810.1 (SEQ ID NO: 11496); |
| | ENST00000572944.1 (SEQ ID NO: 15545); ENST00000576869.5 (SEQ ID NO: 11499) |
| transcript | ENST00000284061.8 (SEQ ID NO: 11491); ENST00000570738.1 (SEQ ID NO: 11493); |
| | ENST00000571084.1 (SEQ ID NO: 11495); ENST00000572810.1 (SEQ ID NO: 11497); |
| | ENST00000572944.1 (SEQ ID NO: 11498); ENST00000576869.5 (SEQ ID NO: 11500) |

Target: DHDDS

| | |
|---|---|
| pre-mRNA | ENST00000236342.12 (SEQ ID NO: 15546); ENST00000360009.6 (SEQ ID NO: 15547); |
| transcript | ENST00000374185.7 (SEQ ID NO: 11503); ENST00000374186.7 (SEQ ID NO: 11505); |
| | ENST00000416052.1 (SEQ ID NO: 11507); ENST00000427245.6 (SEQ ID NO: 11509); |
| | ENST00000430232.5 (SEQ ID NO: 11511); ENST00000431933.5 (SEQ ID NO: 11513); |
| | ENST00000434391.6 (SEQ ID NO: 15548); ENST00000436153.6 (SEQ ID NO: 11516); |
| | ENST00000487944.5 (SEQ ID NO: 11518); ENST00000525165.5 (SEQ ID NO: 11520); |
| | ENST00000525326.5 (SEQ ID NO: 11522); ENST00000525410.1 (SEQ ID NO: 11524); |
| | ENST00000525546.5 (SEQ ID NO: 11526); ENST00000525682.6 (SEQ ID NO: 15549); |
| | ENST00000526219.5 (SEQ ID NO: 15550); ENST00000526278.5 (SEQ ID NO: 11530); |
| | ENST00000527611.1 (SEQ ID NO: 11532); ENST00000528557.5 (SEQ ID NO: 11534); |
| | ENST00000529688.5 (SEQ ID NO: 11536); ENST00000530781.5 (SEQ ID NO: 11538); |
| | ENST00000531312.5 (SEQ ID NO: 11540); ENST00000531955.5 (SEQ ID NO: 11542); |
| | ENST00000533087.5; (SEQ ID NO: 11544) |
| transcript | ENST00000236342.12 (SEQ ID NO: 11501); ENST00000360009.6 (SEQ ID NO: 11502); |
| | ENST00000374185.7 (SEQ ID NO: 11504); ENST00000374186.7 (SEQ ID NO: 11506); |
| | ENST00000416052.1 (SEQ ID NO: 11508); ENST00000427245.6 (SEQ ID NO: 11510); |
| | ENST00000430232.5 (SEQ ID NO: 11512); ENST00000431933.5 (SEQ ID NO: 11514); |
| | ENST00000434391.6 (SEQ ID NO: 11515); ENST00000436153.6 (SEQ ID NO: 11517); |
| | ENST00000487944.5 (SEQ ID NO: 11519); ENST00000525165.5 (SEQ ID NO: 11521); |
| | ENST00000525326.5 (SEQ ID NO: 11523); ENST00000525410.1 (SEQ ID NO: 11525); |
| | ENST00000525546.5 (SEQ ID NO: 11527); ENST00000525682.6 (SEQ ID NO: 11528); |
| | ENST00000526219.5 (SEQ ID NO: 11529); ENST00000526278.5 (SEQ ID NO: 11531); |
| | ENST00000527611.1 (SEQ ID NO: 11533); ENST00000528557.5 (SEQ ID NO: 11535); |
| | ENST00000529688.5 (SEQ ID NO: 11537); ENST00000530781.5 (SEQ ID NO: 11539); |
| | ENST00000531312.5 (SEQ ID NO: 11541); ENST00000531955.5 (SEQ ID NO: 11543); |
| | ENST00000533087.5 (SEQ ID NO: 11545) |

Target: DMKN

| | |
|---|---|
| pre-mRNA | ENST00000339686.8 (SEQ ID NO: 11546); ENST00000392206.6 (SEQ ID NO: 11548); |
| transcript | ENST00000402589.6 (SEQ ID NO: 11550); ENST00000408915.6 (SEQ ID NO: 11552); |
| | ENST00000414866.6 (SEQ ID NO: 11554); ENST00000418261.5 (SEQ ID NO: 11556); |
| | ENST00000419602.5 (SEQ ID NO: 11558); ENST00000424570.6 (SEQ ID NO: 11560); |
| | ENST00000429837.5 (SEQ ID NO: 11562); ENST00000434389.5 (SEQ ID NO: 11564); |
| | ENST00000436012.5 (SEQ ID NO: 11566); ENST00000443640.5 (SEQ ID NO: 11568); |
| | ENST00000447113.6 (SEQ ID NO: 11570); ENST00000450261.1 (SEQ ID NO: 11572); |
| | ENST00000451297.6 (SEQ ID NO: 11574); ENST00000458071.5 (SEQ ID NO: 11576); |
| | ENST00000460051.5 (SEQ ID NO: 11578); ENST00000460327.5 (SEQ ID NO: 11580); |
| | ENST00000461300.5 (SEQ ID NO: 11582); ENST00000462126.5 (SEQ ID NO: 11584); |
| | ENST00000462538.5 (SEQ ID NO: 11586); ENST00000462721.5 (SEQ ID NO: 11588); |
| | ENST00000463292.5 (SEQ ID NO: 11590); ENST00000464709.6 (SEQ ID NO: 11592); |
| | ENST00000464894.5 (SEQ ID NO: 11594); ENST00000465927.5 (SEQ ID NO: 11596); |
| | ENST00000466587.6 (SEQ ID NO: 11598); ENST00000467532.5 (SEQ ID NO: 11600); |
| | ENST00000467637.5 (SEQ ID NO: 11602); ENST00000469960.5 (SEQ ID NO: 11604); |
| | ENST00000470746.6 (SEQ ID NO: 11606); ENST00000470857.1 (SEQ ID NO: 11608); |
| | ENST00000470964.1 (SEQ ID NO: 11610); ENST00000471017.5 (SEQ ID NO: 11612); |
| | ENST00000471786.6 (SEQ ID NO: 11614); ENST00000472065.1 (SEQ ID NO: 11616); |
| | ENST00000472252.6 (SEQ ID NO: 11618); ENST00000472365.6 (SEQ ID NO: 11620); |
| | ENST00000474928.5 (SEQ ID NO: 11622); ENST00000474992.5 (SEQ ID NO: 11624); |
| | ENST00000476051.5 (SEQ ID NO: 11626); ENST00000476246.5 (SEQ ID NO: 11628); |
| | ENST00000478648.6 (SEQ ID NO: 11630); ENST00000480502.5 (SEQ ID NO: 11632); |
| | ENST00000480507.1 (SEQ ID NO: 11634); ENST00000482321.5 (SEQ ID NO: 11636); |
| | ENST00000483855.5 (SEQ ID NO: 11638); ENST00000484064.5 (SEQ ID NO: 11640); |
| | ENST00000486450.5 (SEQ ID NO: 11642); ENST00000486756.6 (SEQ ID NO: 11644); |
| | ENST00000488542.6 (SEQ ID NO: 11646); ENST00000488762.5 (SEQ ID NO: 11648); |
| | ENST00000488892.5 (SEQ ID NO: 11650); ENST00000489395.6 (SEQ ID NO: 11652); |
| | ENST00000490622.5 (SEQ ID NO: 11654); ENST00000492341.6 (SEQ ID NO: 11656); |
| | ENST00000493517.5 (SEQ ID NO: 11658); ENST00000493979.5 (SEQ ID NO: 11660); |
| | ENST00000498211.5 (SEQ ID NO: 11662); ENST00000498269.5 (SEQ ID NO: 11664); |
| | ENST00000498593.5 (SEQ ID NO: 11666); ENST00000593342.5 (SEQ ID NO: 11668); |
| | ENST00000595571.5 (SEQ ID NO: 11670); ENST00000597212.5 (SEQ ID NO: 11672); |
| | ENST00000601368.5 (SEQ ID NO: 11674); ENST00000601650.1 (SEQ ID NO: 11676); |
| | ENST00000602679.5 (SEQ ID NO: 11678); ENST00000602781.5 (SEQ ID NO: 11680) |
| transcript | ENST00000339686.8 (SEQ ID NO: 11547); ENST00000392206.6 (SEQ ID NO: 11549); |
| | ENST00000402589.6 (SEQ ID NO: 11551); ENST00000408915.6 (SEQ ID NO: 11553); |
| | ENST00000414866.6 (SEQ ID NO: 11555); ENST00000418261.5 (SEQ ID NO: 11557); |
| | ENST00000419602.5 (SEQ ID NO: 11559); ENST00000424570.6 (SEQ ID NO: 11561); |
| | ENST00000429837.5 (SEQ ID NO: 11563); ENST00000434389.5 (SEQ ID NO: 11565); |
| | ENST00000436012.5 (SEQ ID NO: 11567); ENST00000443640.5 (SEQ ID NO: 11569); |
| | ENST00000447113.6 (SEQ ID NO: 11571); ENST00000450261.1 (SEQ ID NO: 11573); |
| | ENST00000451297.6 (SEQ ID NO: 11575); ENST00000458071.5 (SEQ ID NO: 11577); |
| | ENST00000460051.5 (SEQ ID NO: 11579); ENST00000460327.5 (SEQ ID NO: 11581); |
| | ENST00000461300.5 (SEQ ID NO: 11583); ENST00000462126.5 (SEQ ID NO: 11585); |
| | ENST00000462538.5 (SEQ ID NO: 11587); ENST00000462721.5 (SEQ ID NO: 11589); |
| | ENST00000463292.5 (SEQ ID NO: 11591); ENST00000464709.6 (SEQ ID NO: 11593); |
| | ENST00000464894.5 (SEQ ID NO: 11595); ENST00000465927.5 (SEQ ID NO: 11597); |
| | ENST00000466587.6 (SEQ ID NO: 11599); ENST00000467532.5 (SEQ ID NO: 11601); |
| | ENST00000467637.5 (SEQ ID NO: 11603); ENST00000469960.5 (SEQ ID NO: 11605); |
| | ENST00000470746.6 (SEQ ID NO: 11607); ENST00000470857.1 (SEQ ID NO: 11609); |
| | ENST00000470964.1 (SEQ ID NO: 11611); ENST00000471017.5 (SEQ ID NO: 11613); |
| | ENST00000471786.6 (SEQ ID NO: 11615); ENST00000472065.1 (SEQ ID NO: 11617); |
| | ENST00000472252.6 (SEQ ID NO: 11619); ENST00000472365.6 (SEQ ID NO: 11621); |
| | ENST00000474928.5 (SEQ ID NO: 11623); ENST00000474992.5 (SEQ ID NO: 11625); |
| | ENST00000476051.5 (SEQ ID NO: 11627); ENST00000476246.5 (SEQ ID NO: 11629); |
| | ENST00000478648.6 (SEQ ID NO: 11631); ENST00000480502.5 (SEQ ID NO: 11633); |
| | ENST00000480507.1 (SEQ ID NO: 11635); ENST00000482321.5 (SEQ ID NO: 11637); |
| | ENST00000483855.5 (SEQ ID NO: 11639); ENST00000484064.5 (SEQ ID NO: 11641); |
| | ENST00000486450.5 (SEQ ID NO: 11643); ENST00000486756.6 (SEQ ID NO: 11645); |
| | ENST00000488542.6 (SEQ ID NO: 11647); ENST00000488762.5 (SEQ ID NO: 11649); |
| | ENST00000488892.5 (SEQ ID NO: 11651); ENST00000489395.6 (SEQ ID NO: 11653); |
| | ENST00000490622.5 (SEQ ID NO: 11655); ENST00000492341.6 (SEQ ID NO: 11657); |
| | ENST00000493517.5 (SEQ ID NO: 11659); ENST00000493979.5 (SEQ ID NO: 11661); |
| | ENST00000498211.5 (SEQ ID NO: 11663); ENST00000498269.5 (SEQ ID NO: 11665); |
| | ENST00000498593.5 (SEQ ID NO: 11667); ENST00000593342.5 (SEQ ID NO: 11669); |
| | ENST00000595571.5 (SEQ ID NO: 11671); ENST00000597212.5 (SEQ ID NO: 11673); |
| | ENST00000601368.5 (SEQ ID NO: 11675); ENST00000601650.1 (SEQ ID NO: 11677); |
| | ENST00000602679.5 (SEQ ID NO: 11679); ENST00000602781.5 (SEQ ID NO: 11681) |

Target: DNHD1

| | |
|---|---|
| pre-mRNA | ENST00000254579.11 (SEQ ID NO: 15551); ENST00000354685.7 (SEQ ID NO: 11683); |
| transcript | ENST00000472080.1 (SEQ ID NO: 11685); ENST00000473019.5 (SEQ ID NO: 11687); |
| | ENST00000477562.1 (SEQ ID NO: 11689); ENST00000524401.2 (SEQ ID NO: 11691); |
| | ENST00000525080.1 (SEQ ID NO: 11693); ENST00000525883.5 (SEQ ID NO: 11695); |
| | ENST00000526027.1 (SEQ ID NO: 11697); ENST00000527143.1 (SEQ ID NO: 11699); |
| | ENST00000529821.5 (SEQ ID NO: 11701); ENST00000530197.5 (SEQ ID NO: 11703); |
| | ENST00000531903.5 (SEQ ID NO: 11705); ENST00000532027.5 (SEQ ID NO: 11707); |
| | ENST00000532467.1 (SEQ ID NO: 11709); ENST00000533635.5 (SEQ ID NO: 11711); |
| | ENST00000533649.1 (SEQ ID NO: 11713); ENST00000534210.6 (SEQ ID NO: 15552) |
| transcript | ENST00000254579.11 (SEQ ID NO: 11682); ENST00000354685.7 (SEQ ID NO: 11684); |
| | ENST00000472080.1 (SEQ ID NO: 11686); ENST00000473019.5 (SEQ ID NO: 11688); |
| | ENST00000477562.1 (SEQ ID NO: 11690); ENST00000524401.2 (SEQ ID NO: 11692); |
| | ENST00000525080.1 (SEQ ID NO: 11694); ENST00000525883.5 (SEQ ID NO: 11696); |
| | ENST00000526027.1 (SEQ ID NO: 11698); ENST00000527143.1 (SEQ ID NO: 11700); |
| | ENST00000529821.5 (SEQ ID NO: 11702); ENST00000530197.5 (SEQ ID NO: 11704); |
| | ENST00000531903.5 (SEQ ID NO: 11706); ENST00000532027.5 (SEQ ID NO: 11708); |
| | ENST00000532467.1 (SEQ ID NO: 11710); ENST00000533635.5 (SEQ ID NO: 11712); |
| | ENST00000533649.1 (SEQ ID NO: 11714); ENST00000534210.6 (SEQ ID NO: 11715) |

Target: DOCK8

| | |
|---|---|
| pre-mRNA | ENST00000382329.1 (SEQ ID NO: 15553); ENST00000382331.5 (SEQ ID NO: 15554); |
| transcript | ENST00000382341.5 (SEQ ID NO: 15555); ENST00000432829.6 (SEQ ID NO: 15556); |
| | ENST00000453981.5 (SEQ ID NO: 15557); ENST00000454469.6 (SEQ ID NO: 15558); |
| | ENST00000462618.1 (SEQ ID NO: 11722); ENST00000469197.5 (SEQ ID NO: 15559); |
| | ENST00000469391.5 (SEQ ID NO: 15560); ENST00000474772.1 (SEQ ID NO: 11726); |
| | ENST00000478380.5 (SEQ ID NO: 15561); ENST00000479404.5 (SEQ ID NO: 15562); |
| | ENST00000483757.5 (SEQ ID NO: 15563); ENST00000487230.5 (SEQ ID NO: 15564); |
| | ENST00000493666.2 (SEQ ID NO: 11732); ENST00000495184.5 (SEQ ID NO: 15565); |
| | ENST00000524396.5 (SEQ ID NO: 15566) |
| transcript | ENST00000382329.1 (SEQ ID NO: 11716); ENST00000382331.5 (SEQ ID NO: 11717); |
| | ENST00000382341.5 (SEQ ID NO: 11718); ENST00000432829.6 (SEQ ID NO: 11719); |
| | ENST00000453981.5 (SEQ ID NO: 11720); ENST00000454469.6 (SEQ ID NO: 11721); |
| | ENST00000462618.1 (SEQ ID NO: 11723); ENST00000469197.5 (SEQ ID NO: 11724); |
| | ENST00000469391.5 (SEQ ID NO: 11725); ENST00000474772.1 (SEQ ID NO: 11727); |
| | ENST00000478380.5 (SEQ ID NO: 11728); ENST00000479404.5 (SEQ ID NO: 11729); |
| | ENST00000483757.5 (SEQ ID NO: 11730); ENST00000487230.5 (SEQ ID NO: 11731); |
| | ENST00000493666.2 (SEQ ID NO: 11733); ENST00000495184.5 (SEQ ID NO: 11734); |
| | ENST00000524396.5 (SEQ ID NO: 11735) |

Target: DOK5

| | |
|---|---|
| pre-mRNA | ENST00000262593.10 (SEQ ID NO: 15567); ENST00000395939.5 (SEQ ID NO: 15568); |
| transcript | ENST00000484860.1 (SEQ ID NO: 11738); ENST00000491469.1 (SEQ ID NO: 11740) |
| transcript | ENST00000262593.10 (SEQ ID NO: 11736); ENST00000395939.5 (SEQ ID NO: 11737); |
| | ENST00000484860.1 (SEQ ID NO: 11739); ENST00000491469.1 (SEQ ID NO: 11741) |

Target: EIF2B5

| | |
|---|---|
| pre-mRNA | ENST00000432569.2 (SEQ ID NO: 11742); ENST00000432982.5 (SEQ ID NO: 11744); |
| transcript | ENST00000465218.3 (SEQ ID NO: 11746); ENST00000468748.7 (SEQ ID NO: 11748); |
| | ENST00000471832.2 (SEQ ID NO: 11750); ENST00000479250.1 (SEQ ID NO: 11752); |
| | ENST00000481054.5 (SEQ ID NO: 11754); ENST00000484154.2 (SEQ ID NO: 11756); |
| | ENST00000491008.6 (SEQ ID NO: 11758); ENST00000491144.5 (SEQ ID NO: 11760); |
| | ENST00000492226.2 (SEQ ID NO: 11762); ENST00000492773.6 (SEQ ID NO: 11764); |
| | ENST00000493740.1 (SEQ ID NO: 11766); ENST00000498831.1 (SEQ ID NO: 11768); |
| | ENST00000647636.1 (SEQ ID NO: 11770); ENST00000647909.1 (SEQ ID NO: 11772); |
| | ENST00000648145.1 (SEQ ID NO: 11774); ENST00000648189.1 (SEQ ID NO: 11776); |
| | ENST00000648256.1 (SEQ ID NO: 11778); ENST00000648314.1 (SEQ ID NO: 11780); |
| | ENST00000648599.1 (SEQ ID NO: 11782); ENST00000648630.1 (SEQ ID NO: 11784); |
| | ENST00000648682.1 (SEQ ID NO: 11786); ENST00000648882.1 (SEQ ID NO: 11788); |
| | ENST00000648890.1 (SEQ ID NO: 11790); ENST00000648915.2 (SEQ ID NO: 11792); |
| | ENST00000649545.1 (SEQ ID NO: 11794); ENST00000649688.1 (SEQ ID NO: 11796); |
| | ENST00000649814.1 (SEQ ID NO: 11798); ENST00000650244.1 (SEQ ID NO: 11800); |
| | ENST00000650270.1 (SEQ ID NO: 11802) |
| transcript | ENST00000432569.2 (SEQ ID NO: 11743); ENST00000432982.5 (SEQ ID NO: 11745); |
| | ENST00000465218.3 (SEQ ID NO: 11747); ENST00000468748.7 (SEQ ID NO: 11749); |
| | ENST00000471832.2 (SEQ ID NO: 11751); ENST00000479250.1 (SEQ ID NO: 11753); |
| | ENST00000481054.5 (SEQ ID NO: 11755); ENST00000484154.2 (SEQ ID NO: 11757); |
| | ENST00000491008.6 (SEQ ID NO: 11759); ENST00000491144.5 (SEQ ID NO: 11761); |
| | ENST00000492226.2 (SEQ ID NO: 11763); ENST00000492773.6 (SEQ ID NO: 11765); |
| | ENST00000493740.1 (SEQ ID NO: 11767); ENST00000498831.1 (SEQ ID NO: 11769); |
| | ENST00000647636.1 (SEQ ID NO: 11771); ENST00000647909.1 (SEQ ID NO: 11773); |
| | ENST00000648145.1 (SEQ ID NO: 11775); ENST00000648189.1 (SEQ ID NO: 11777); |
| | ENST00000648256.1 (SEQ ID NO: 11779); ENST00000648314.1 (SEQ ID NO: 11781); |
| | ENST00000648599.1 (SEQ ID NO: 11783); ENST00000648630.1 (SEQ ID NO: 11785); |
| | ENST00000648682.1 (SEQ ID NO: 11787); ENST00000648882.1 (SEQ ID NO: 11789); |
| | ENST00000648890.1 (SEQ ID NO: 11791); ENST00000648915.2 (SEQ ID NO: 11793); |
| | ENST00000649545.1 (SEQ ID NO: 11795); ENST00000649688.1 (SEQ ID NO: 11797); |
| | ENST00000649814.1 (SEQ ID NO: 11799); ENST00000650244.1 (SEQ ID NO: 11801); |
| | ENST00000650270.1 (SEQ ID NO: 11803) |

Target: ELAC2

| | |
|---|---|
| pre-mRNA | ENST00000338034.9 (SEQ ID NO: 11804); ENST00000395962.6 (SEQ ID NO: 11806); |
| transcript | ENST00000426905.7 (SEQ ID NO: 11808); ENST00000446899.5 (SEQ ID NO: 11810); |
| | ENST00000465825.5 (SEQ ID NO: 11812); ENST00000476042.1 (SEQ ID NO: 11814); |
| | ENST00000480891.5 (SEQ ID NO: 11816); ENST00000484122.5 (SEQ ID NO: 11818); |
| | ENST00000487229.6 (SEQ ID NO: 11820); ENST00000491478.5 (SEQ ID NO: 11822); |
| | ENST00000492559.5 (SEQ ID NO: 11824); ENST00000578071.1 (SEQ ID NO: 11826); |
| | ENST00000578104.1 (SEQ ID NO: 11828); ENST00000578991.5 (SEQ ID NO: 11830); |
| | ENST00000580504.5 (SEQ ID NO: 11832); ENST00000581499.6 (SEQ ID NO: 11834); |
| | ENST00000583371.5 (SEQ ID NO: 11836); ENST00000584650.5 (SEQ ID NO: 11838); |
| | ENST00000609101.5 (SEQ ID NO: 11840); ENST00000609345.1 (SEQ ID NO: 11842); |
| | ENST00000609757.5 (SEQ ID NO: 11844) |
| transcript | ENST00000338034.9 (SEQ ID NO: 11805); ENST00000395962.6 (SEQ ID NO: 11807); |
| | ENST00000426905.7 (SEQ ID NO: 11809); ENST00000446899.5 (SEQ ID NO: 11811); |
| | ENST00000465825.5 (SEQ ID NO: 11813); ENST00000476042.1 (SEQ ID NO: 11815); |
| | ENST00000480891.5 (SEQ ID NO: 11817); ENST00000484122.5 (SEQ ID NO: 11819); |
| | ENST00000487229.6 (SEQ ID NO: 11821); ENST00000491478.5 (SEQ ID NO: 11823); |
| | ENST00000492559.5 (SEQ ID NO: 11825); ENST00000578071.1 (SEQ ID NO: 11827); |
| | ENST00000578104.1 (SEQ ID NO: 11829); ENST00000578991.5 (SEQ ID NO: 11831); |
| | ENST00000580504.5 (SEQ ID NO: 11833); ENST00000581499.6 (SEQ ID NO: 11835); |
| | ENST00000583371.5 (SEQ ID NO: 11837); ENST00000584650.5 (SEQ ID NO: 11839); |
| | ENST00000609101.5 (SEQ ID NO: 11841); ENST00000609345.1 (SEQ ID NO: 11843); |
| | ENST00000609757.5 (SEQ ID NO: 11845) |

Target: ELP1

| | |
|---|---|
| pre-mRNA | ENST00000374647.10 (SEQ ID NO: 15569); ENST00000467959.1 (SEQ ID NO: 11847); |
| transcript | ENST00000495759.5 (SEQ ID NO: 11849); ENST00000537196.1 (SEQ ID NO: 15570) |
| transcript | ENST00000374647.10 (SEQ ID NO: 11846); ENST00000467959.1 (SEQ ID NO: 11848); |
| | ENST00000495759.5 (SEQ ID NO: 11850); ENST00000537196.1 (SEQ ID NO: 11851) |

Target: ENTPD4

| | |
|---|---|
| pre-mRNA | ENST00000356206.10 (SEQ ID NO: 15571); ENST00000358689.9 (SEQ ID NO: 11853); |
| transcript | ENST00000417069.6 (SEQ ID NO: 11855); ENST00000518471.5 (SEQ ID NO: 15572); |
| | ENST00000518718.1 (SEQ ID NO: 11858); ENST00000519839.1 (SEQ ID NO: 11860); |
| | ENST00000520936.1 (SEQ ID NO: 11862); ENST00000521321.5 (SEQ ID NO: 15573); |
| | ENST00000522255.1 (SEQ ID NO: 11865); ENST00000522913.1 (SEQ ID NO: 11867); |
| | ENST00000523958.5 (SEQ ID NO: 11869) |
| transcript | ENST00000356206.10 (SEQ ID NO: 11852); ENST00000358689.9 (SEQ ID NO: 11854); |
| | ENST00000417069.6 (SEQ ID NO: 11856); ENST00000518471.5 (SEQ ID NO: 11857); |
| | ENST00000518718.1 (SEQ ID NO: 11859); ENST00000519839.1 (SEQ ID NO: 11861); |
| | ENST00000520936.1 (SEQ ID NO: 11863); ENST00000521321.5 (SEQ ID NO: 11864); |
| | ENST00000522255.1 (SEQ ID NO: 11866); ENST00000522913.1 (SEQ ID NO: 11868); |
| | ENST00000523958.5 (SEQ ID NO: 11870) |

Target: ESRRA

| | |
|---|---|
| pre-mRNA | ENST00000000442.11 (SEQ ID NO: 11871); ENST00000405666.5 (SEQ ID NO: 11873); |
| transcript | ENST00000406310.6 (SEQ ID NO: 11875); ENST00000467987.1 (SEQ ID NO: 11877); |
| | ENST00000468670.1 (SEQ ID NO: 11879); ENST00000539594.5 (SEQ ID NO: 11881); |
| | ENST00000545035.1 (SEQ ID NO: 11883); ENST00000673656.1 (SEQ ID NO: 11885) |
| transcript | ENST00000000442.11 (SEQ ID NO: 11872); ENST00000405666.5 (SEQ ID NO: 11874); |
| | ENST00000406310.6 (SEQ ID NO: 11876); ENST00000467987.1 (SEQ ID NO: 11878); |
| | ENST00000468670.1 (SEQ ID NO: 11880); ENST00000539594.5 (SEQ ID NO: 11882); |
| | ENST00000545035.1 (SEQ ID NO: 11884); ENST00000673656.1 (SEQ ID NO: 11886) |

Target: ESS2

| | |
|---|---|
| pre-mRNA | ENST00000252137.11 (SEQ ID NO: 11887); ENST00000434568.5 (SEQ ID NO: 11889); |
| transcript | ENST00000469466.1 (SEQ ID NO: 11891); ENST00000472073.1 (SEQ ID NO: 11893) |
| transcript | ENST00000252137.11 (SEQ ID NO: 11888); ENST00000434568.5 (SEQ ID NO: 11890); |
| | ENST00000469466.1 (SEQ ID NO: 11892); ENST00000472073.1 (SEQ ID NO: 11894) |

Target: ETAA1

| | |
|---|---|
| pre-mRNA | ENST00000272342.6 (SEQ ID NO: 11895); ENST00000462772.2 (SEQ ID NO: 11897); |
| transcript | ENST00000644028.1 (SEQ ID NO: 11899); ENST00000645739.1 (SEQ ID NO: 11901) |
| transcript | ENST00000272342.6 (SEQ ID NO: 11896); ENST00000462772.2 (SEQ ID NO: 11898); |
| | ENST00000644028.1 (SEQ ID NO: 11900); ENST00000645739.1 (SEQ ID NO: 11902) |

Target: ETHE1

| | |
|---|---|
| pre-mRNA | ENST00000292147.7 (SEQ ID NO: 11903); ENST00000594342.5 (SEQ ID NO: 11905); |
| transcript | ENST00000595115.1 (SEQ ID NO: 11907); ENST00000598330.1 (SEQ ID NO: 11909); |
| | ENST00000600651.5 (SEQ ID NO: 11911); ENST00000602138.1 (SEQ ID NO: 11913) |
| transcript | ENST00000292147.7 (SEQ ID NO: 11904); ENST00000594342.5 (SEQ ID NO: 11906); |
| | ENST00000595115.1 (SEQ ID NO: 11908); ENST00000598330.1 (SEQ ID NO: 11910); |
| | ENST00000600651.5 (SEQ ID NO: 11912); ENST00000602138.1 (SEQ ID NO: 11914) |

Target: FANCA

| | |
|---|---|
| pre-mRNA | ENST00000305699.15 (SEQ ID NO: 11915); ENST00000389301.8 (SEQ ID NO: 15574); |
| transcript | ENST00000389302.7 (SEQ ID NO: 11918); ENST00000534992.5 (SEQ ID NO: 11920); |
| | ENST00000543736.5 (SEQ ID NO: 11922); ENST00000561660.1 (SEQ ID NO: 11924); |
| | ENST00000561667.1 (SEQ ID NO: 11926); ENST00000561722.5 (SEQ ID NO: 11928); |
| | ENST00000562424.1 (SEQ ID NO: 11930); ENST00000563318.1 (SEQ ID NO: 11932); |
| | ENST00000563510.5 (SEQ ID NO: 11934); ENST00000563513.1 (SEQ ID NO: 11936); |
| | ENST00000563673.5 (SEQ ID NO: 11938); ENST00000563767.1 (SEQ ID NO: 11940); |
| | ENST00000564475.5 (SEQ ID NO: 11942); ENST00000564870.1 (SEQ ID NO: 11944); |
| | ENST00000564969.5 (SEQ ID NO: 11946); ENST00000565582.5 (SEQ ID NO: 11948); |
| | ENST00000566133.1 (SEQ ID NO: 11950); ENST00000566409.1 (SEQ ID NO: 11952); |
| | ENST00000566889.5 (SEQ ID NO: 11954); ENST00000567205.1 (SEQ ID NO: 11956); |
| | ENST00000567284.6 (SEQ ID NO: 11958); ENST00000567510.1 (SEQ ID NO: 11960); |
| | ENST00000567621.5 (SEQ ID NO: 11962); ENST00000567879.5 (SEQ ID NO: 11964); |
| | ENST00000567883.5 (SEQ ID NO: 11966); ENST00000567943.1 (SEQ ID NO: 11968); |
| | ENST00000567988.5 (SEQ ID NO: 11970); ENST00000568369.5 (SEQ ID NO: 15575); |
| | ENST00000568626.1 (SEQ ID NO: 11973); ENST00000568983.5 (SEQ ID NO: 11975) |
| transcript | ENST00000305699.15 (SEQ ID NO: 11916); ENST00000389301.8 (SEQ ID NO: 11917); |
| | ENST00000389302.7 (SEQ ID NO: 11919); ENST00000534992.5 (SEQ ID NO: 11921); |
| | ENST00000543736.5 (SEQ ID NO: 11923); ENST00000561660.1 (SEQ ID NO: 11925); |
| | ENST00000561667.1 (SEQ ID NO: 11927); ENST00000561722.5 (SEQ ID NO: 11929); |
| | ENST00000562424.1 (SEQ ID NO: 11931); ENST00000563318.1 (SEQ ID NO: 11933); |
| | ENST00000563510.5 (SEQ ID NO: 11935); ENST00000563513.1 (SEQ ID NO: 11937); |
| | ENST00000563673.5 (SEQ ID NO: 11939); ENST00000563767.1 (SEQ ID NO: 11941); |
| | ENST00000564475.5 (SEQ ID NO: 11943); ENST00000564870.1 (SEQ ID NO: 11945); |
| | ENST00000564969.5 (SEQ ID NO: 11947); ENST00000565582.5 (SEQ ID NO: 11949); |
| | ENST00000566133.1 (SEQ ID NO: 11951); ENST00000566409.1 (SEQ ID NO: 11953); |
| | ENST00000566889.5 (SEQ ID NO: 11955); ENST00000567205.1 (SEQ ID NO: 11957); |
| | ENST00000567284.6 (SEQ ID NO: 11959); ENST00000567510.1 (SEQ ID NO: 11961); |
| | ENST00000567621.5 (SEQ ID NO: 11963); ENST00000567879.5 (SEQ ID NO: 11965); |
| | ENST00000567883.5 (SEQ ID NO: 11967); ENST00000567943.1 (SEQ ID NO: 11969); |
| | ENST00000567988.5 (SEQ ID NO: 11971); ENST00000568369.5 (SEQ ID NO: 11972); |
| | ENST00000568626.1 (SEQ ID NO: 11974); ENST00000568983.5 (SEQ ID NO: 11976) |

Target: FASTK

| | |
|---|---|
| pre-mRNA | ENST00000297532.11 (SEQ ID NO: 11977); ENST00000353841.6 (SEQ ID NO: 11979); |
| transcript | ENST00000459800.1 (SEQ ID NO: 11981); ENST00000460980.5 (SEQ ID NO: 11983); |
| | ENST00000461979.1 (SEQ ID NO: 11985); ENST00000465272.1 (SEQ ID NO: 11987); |
| | ENST00000466855.1 (SEQ ID NO: 11989); ENST00000467237.5 (SEQ ID NO: 11991); |
| | ENST00000469237.5 (SEQ ID NO: 11993); ENST00000478477.1 (SEQ ID NO: 11995); |
| | ENST00000478883.1 (SEQ ID NO: 11997); ENST00000482571.2 (SEQ ID NO: 11999); |
| | ENST00000482806.5 (SEQ ID NO: 12001); ENST00000483953.5 (SEQ ID NO: 12003); |
| | ENST00000489884.5 (SEQ ID NO: 12005); ENST00000496663.1 (SEQ ID NO: 12007); |
| | ENST00000540185.5; (SEQ ID NO: 12009) |
| transcript | ENST00000297532.11 (SEQ ID NO: 11978); ENST00000353841.6 (SEQ ID NO: 11980); |
| | ENST00000459800.1 (SEQ ID NO: 11982); ENST00000460980.5 (SEQ ID NO: 11984); |
| | ENST00000461979.1 (SEQ ID NO: 11986); ENST00000465272.1 (SEQ ID NO: 11988); |
| | ENST00000466855.1 (SEQ ID NO: 11990); ENST00000467237.5 (SEQ ID NO: 11992); |
| | ENST00000469237.5 (SEQ ID NO: 11994); ENST00000478477.1 (SEQ ID NO: 11996); |
| | ENST00000478883.1 (SEQ ID NO: 11998); ENST00000482571.2 (SEQ ID NO: 12000); |
| | ENST00000482806.5 (SEQ ID NO: 12002); ENST00000483953.5 (SEQ ID NO: 12004); |
| | ENST00000489884.5 (SEQ ID NO: 12006); ENST00000496663.1 (SEQ ID NO: 12008); |
| | ENST00000540185.5 (SEQ ID NO: 12010) |

Target: FASTKD3

| | |
|---|---|
| pre-mRNA | ENST00000264669.10 (SEQ ID NO: 12011); ENST00000282110.8 (SEQ ID NO: 12013); |
| transcript | ENST00000504695.1 (SEQ ID NO: 12015); ENST00000507036.1 (SEQ ID NO: 12017); |
| | ENST00000507572.1 (SEQ ID NO: 12019); ENST00000511261.5 (SEQ ID NO: 12021); |
| | ENST00000513577.1 (SEQ ID NO: 12023); ENST00000513658.5 (SEQ ID NO: 12025) |
| transcript | ENST00000264669.10 (SEQ ID NO: 12012); ENST00000282110.8 (SEQ ID NO: 12014); |
| | ENST00000504695.1 (SEQ ID NO: 12016); ENST00000507036.1 (SEQ ID NO: 12018); |
| | ENST00000507572.1 (SEQ ID NO: 12020); ENST00000511261.5 (SEQ ID NO: 12022); |
| | ENST00000513577.1 (SEQ ID NO: 12024); ENST00000513658.5 (SEQ ID NO: 12026) |

Target: FPGS

| | |
|---|---|
| pre-mRNA | ENST00000373225.7 (SEQ ID NO: 12027); ENST00000373228.5 (SEQ ID NO: 12029); |
| transcript | ENST00000373247.7 (SEQ ID NO: 12031); ENST00000393706.6 (SEQ ID NO: 12033); |
| | ENST00000423577.1 (SEQ ID NO: 12035); ENST00000431857.5 (SEQ ID NO: 12037); |
| | ENST00000460181.5 (SEQ ID NO: 12039); ENST00000467826.5 (SEQ ID NO: 12041); |
| | ENST00000469310.1 (SEQ ID NO: 12043); ENST00000473536.1 (SEQ ID NO: 12045); |
| | ENST00000475270.1 (SEQ ID NO: 12047); ENST00000475765.5 (SEQ ID NO: 12049); |
| | ENST00000479147.6 (SEQ ID NO: 12051); ENST00000479375.6 (SEQ ID NO: 12053); |
| | ENST00000481552.6 (SEQ ID NO: 12055); ENST00000488307.5 (SEQ ID NO: 12057); |
| | ENST00000488506.5 (SEQ ID NO: 12059); ENST00000489522.5 (SEQ ID NO: 12061); |
| | ENST00000496586.5 (SEQ ID NO: 12063); ENST00000497386.5 (SEQ ID NO: 12065); |
| | ENST00000630236.2 (SEQ ID NO: 12067) |
| transcript | ENST00000373225.7 (SEQ ID NO: 12028); ENST00000373228.5 (SEQ ID NO: 12030); |
| | ENST00000373247.7 (SEQ ID NO: 12032); ENST00000393706.6 (SEQ ID NO: 12034); |
| | ENST00000423577.1 (SEQ ID NO: 12036); ENST00000431857.5 (SEQ ID NO: 12038); |
| | ENST00000460181.5 (SEQ ID NO: 12040); ENST00000467826.5 (SEQ ID NO: 12042); |
| | ENST00000469310.1 (SEQ ID NO: 12044); ENST00000473536.1 (SEQ ID NO: 12046); |
| | ENST00000475270.1 (SEQ ID NO: 12048); ENST00000475765.5 (SEQ ID NO: 12050); |
| | ENST00000479147.6 (SEQ ID NO: 12052); ENST00000479375.6 (SEQ ID NO: 12054); |
| | ENST00000481552.6 (SEQ ID NO: 12056); ENST00000488307.5 (SEQ ID NO: 12058); |
| | ENST00000488506.5 (SEQ ID NO: 12060); ENST00000489522.5 (SEQ ID NO: 12062); |
| | ENST00000496586.5 (SEQ ID NO: 12064); ENST00000497386.5 (SEQ ID NO: 12066); |
| | ENST00000630236.2 (SEQ ID NO: 12068) |

Target: FREM1

| | |
|---|---|
| pre-mRNA | ENST00000380875.7 (SEQ ID NO: 15576); ENST00000380880.3 (SEQ ID NO: 15577); |
| transcript | ENST00000380894.5 (SEQ ID NO: 15578); ENST00000422223.6 (SEQ ID NO: 15579); |
| | ENST00000427623.5 (SEQ ID NO: 15580); ENST00000466679.1 (SEQ ID NO: 12074); |
| | ENST00000485068.5 (SEQ ID NO: 12076); ENST00000486223.1 (SEQ ID NO: 12078); |
| | ENST00000497634.2; (SEQ ID NO: 12080) |
| transcript | ENST00000380875.7 (SEQ ID NO: 12069); ENST00000380880.3 (SEQ ID NO: 12070); |
| | ENST00000380894.5 (SEQ ID NO: 12071); ENST00000422223.6 (SEQ ID NO: 12072); |
| | ENST00000427623.5 (SEQ ID NO: 12073); ENST00000466679.1 (SEQ ID NO: 12075); |
| | ENST00000485068.5 (SEQ ID NO: 12077); ENST00000486223.1 (SEQ ID NO: 12079); |
| | ENST00000497634.2 (SEQ ID NO: 12081) |

Target: GAS8

| | |
|---|---|
| pre-mRNA | ENST00000268699.9 (SEQ ID NO: 12082); ENST00000536122.7 (SEQ ID NO: 12084); |
| transcript | ENST00000537797.5 (SEQ ID NO: 12086); ENST00000540721.5 (SEQ ID NO: 12088); |
| | ENST00000561675.1 (SEQ ID NO: 12090); ENST00000563980.5 (SEQ ID NO: 12092); |
| | ENST00000564392.5 (SEQ ID NO: 12094); ENST00000564789.5 (SEQ ID NO: 12096); |
| | ENST00000564802.1 (SEQ ID NO: 12098); ENST00000564853.1 (SEQ ID NO: 12100); |
| | ENST00000565000.1 (SEQ ID NO: 12102); ENST00000565062.5 (SEQ ID NO: 12104); |
| | ENST00000565957.5 (SEQ ID NO: 12106); ENST00000566266.5 (SEQ ID NO: 12108); |
| | ENST00000568284.1 (SEQ ID NO: 12110); ENST00000568664.5 (SEQ ID NO: 12112); |
| | ENST00000568705.5 (SEQ ID NO: 12114); ENST00000569399.1 (SEQ ID NO: 12116); |
| | ENST00000569558.5 (SEQ ID NO: 12118); ENST00000620723.4 (SEQ ID NO: 12120) |
| transcript | ENST00000268699.9 (SEQ ID NO: 12083); ENST00000536122.7 (SEQ ID NO: 12085); |
| | ENST00000537797.5 (SEQ ID NO: 12087); ENST00000540721.5 (SEQ ID NO: 12089); |
| | ENST00000561675.1 (SEQ ID NO: 12091); ENST00000563980.5 (SEQ ID NO: 12093); |
| | ENST00000564392.5 (SEQ ID NO: 12095); ENST00000564789.5 (SEQ ID NO: 12097); |
| | ENST00000564802.1 (SEQ ID NO: 12099); ENST00000564853.1 (SEQ ID NO: 12101); |
| | ENST00000565000.1 (SEQ ID NO: 12103); ENST00000565062.5 (SEQ ID NO: 12105); |
| | ENST00000565957.5 (SEQ ID NO: 12107); ENST00000566266.5 (SEQ ID NO: 12109); |
| | ENST00000568284.1 (SEQ ID NO: 12111); ENST00000568664.5 (SEQ ID NO: 12113); |
| | ENST00000568705.5 (SEQ ID NO: 12115); ENST00000569399.1 (SEQ ID NO: 12117); |
| | ENST00000569558.5 (SEQ ID NO: 12119); ENST00000620723.4 (SEQ ID NO: 12121) |

Target: GCK

| | |
|---|---|
| pre-mRNA | ENST00000336642.9 (SEQ ID NO: 12122); ENST00000345378.7 (SEQ ID NO: 12124); |
| transcript | ENST00000395796.7 (SEQ ID NO: 12126); ENST00000403799.8 (SEQ ID NO: 15581); |
| | ENST00000437084.1 (SEQ ID NO: 15582); ENST00000459642.1 (SEQ ID NO: 12130); |
| | ENST00000473353.1 (SEQ ID NO: 12132); ENST00000476008.1 (SEQ ID NO: 15583); |
| | ENST00000616242.4 (SEQ ID NO: 12135); ENST00000671824.1 (SEQ ID NO: 15584); |
| | ENST00000672743.1 (SEQ ID NO: 12138); ENST00000673284.1 (SEQ ID NO: 15585) |
| transcript | ENST00000336642.9 (SEQ ID NO: 12123); ENST00000345378.7 (SEQ ID NO: 12125); |
| | ENST00000395796.7 (SEQ ID NO: 12127); ENST00000403799.8 (SEQ ID NO: 12128); |
| | ENST00000437084.1 (SEQ ID NO: 12129); ENST00000459642.1 (SEQ ID NO: 12131); |
| | ENST00000473353.1 (SEQ ID NO: 12133); ENST00000476008.1 (SEQ ID NO: 12134); |
| | ENST00000616242.4 (SEQ ID NO: 12136); ENST00000671824.1 (SEQ ID NO: 12137); |
| | ENST00000672743.1 (SEQ ID NO: 12139); ENST00000673284.1 (SEQ ID NO: 12140) |

Target: GGA1

| | |
|---|---|
| pre-mRNA | ENST00000325180.12 (SEQ ID NO: 12141); ENST00000326597.6 (SEQ ID NO: 12143); |
| transcript | ENST00000343632.9 (SEQ ID NO: 12145); ENST00000381756.9 (SEQ ID NO: 12147); |
| | ENST00000405147.7 (SEQ ID NO: 12149); ENST00000406772.5 (SEQ ID NO: 12151); |
| | ENST00000411501.5 (SEQ ID NO: 12153); ENST00000413251.5 (SEQ ID NO: 12155); |
| | ENST00000423024.1 (SEQ ID NO: 12157); ENST00000429218.5 (SEQ ID NO: 12159); |
| | ENST00000431745.5 (SEQ ID NO: 12161); ENST00000439161.5 (SEQ ID NO: 12163); |
| | ENST00000447515.5 (SEQ ID NO: 12165); ENST00000449944.5 (SEQ ID NO: 12167); |
| | ENST00000453208.5 (SEQ ID NO: 12169); ENST00000460957.1 (SEQ ID NO: 12171); |
| | ENST00000463672.1 (SEQ ID NO: 12173); ENST00000475445.1 (SEQ ID NO: 12175); |
| | ENST00000481613.1 (SEQ ID NO: 12177); ENST00000484804.5 (SEQ ID NO: 12179); |
| | ENST00000488672.1 (SEQ ID NO: 12181); ENST00000489772.5 (SEQ ID NO: 12183); |
| | ENST00000491295.1; (SEQ ID NO: 12185) |
| transcript | ENST00000325180.12 (SEQ ID NO: 12142); ENST00000326597.6 (SEQ ID NO: 12144); |
| | ENST00000343632.9 (SEQ ID NO: 12146); ENST00000381756.9 (SEQ ID NO: 12148); |
| | ENST00000405147.7 (SEQ ID NO: 12150); ENST00000406772.5 (SEQ ID NO: 12152); |
| | ENST00000411501.5 (SEQ ID NO: 12154); ENST00000413251.5 (SEQ ID NO: 12156); |
| | ENST00000423024.1 (SEQ ID NO: 12158); ENST00000429218.5 (SEQ ID NO: 12160); |
| | ENST00000431745.5 (SEQ ID NO: 12162); ENST00000439161.5 (SEQ ID NO: 12164); |
| | ENST00000447515.5 (SEQ ID NO: 12166); ENST00000449944.5 (SEQ ID NO: 12168); |
| | ENST00000453208.5 (SEQ ID NO: 12170); ENST00000460957.1 (SEQ ID NO: 12172); |
| | ENST00000463672.1 (SEQ ID NO: 12174); ENST00000475445.1 (SEQ ID NO: 12176); |
| | ENST00000481613.1 (SEQ ID NO: 12178); ENST00000484804.5 (SEQ ID NO: 12180); |
| | ENST00000488672.1 (SEQ ID NO: 12182); ENST00000489772.5 (SEQ ID NO: 12184); |
| | ENST00000491295.1 (SEQ ID NO: 12186) |

Target: GGA3

| | |
|---|---|
| pre-mRNA | ENST00000537686.5 (SEQ ID NO: 12187); ENST00000538886.5 (SEQ ID NO: 12189); |
| transcript | ENST00000577435.5 (SEQ ID NO: 12191); ENST00000578208.1 (SEQ ID NO: 12193); |
| | ENST00000578348.5 (SEQ ID NO: 12195); ENST00000578773.1 (SEQ ID NO: 12197); |
| | ENST00000578896.1 (SEQ ID NO: 12199); ENST00000579743.2 (SEQ ID NO: 12201); |
| | ENST00000580646.5 (SEQ ID NO: 12203); ENST00000580799.2 (SEQ ID NO: 12205); |
| | ENST00000582232.1 (SEQ ID NO: 12207); ENST00000582376.1 (SEQ ID NO: 12209); |
| | ENST00000582486.5 (SEQ ID NO: 12211); ENST00000582717.5 (SEQ ID NO: 12213); |
| | ENST00000582821.5 (SEQ ID NO: 12215); ENST00000583282.5 (SEQ ID NO: 12217); |
| | ENST00000583667.1 (SEQ ID NO: 12219); ENST00000584243.5 (SEQ ID NO: 12221); |
| | ENST00000584550.1 (SEQ ID NO: 12223); ENST00000613421.4 (SEQ ID NO: 12225); |
| | ENST00000614198.4 (SEQ ID NO: 12227); ENST00000621217.4 (SEQ ID NO: 12229); |
| | ENST00000621870.4 (SEQ ID NO: 12231); ENST00000649398.1 (SEQ ID NO: 12233) |
| transcript | ENST00000537686.5 (SEQ ID NO: 12188); ENST00000538886.5 (SEQ ID NO: 12190); |
| | ENST00000577435.5 (SEQ ID NO: 12192); ENST00000578208.1 (SEQ ID NO: 12194); |
| | ENST00000578348.5 (SEQ ID NO: 12196); ENST00000578773.1 (SEQ ID NO: 12198); |
| | ENST00000578896.1 (SEQ ID NO: 12200); ENST00000579743.2 (SEQ ID NO: 12202); |
| | ENST00000580646.5 (SEQ ID NO: 12204); ENST00000580799.2 (SEQ ID NO: 12206); |
| | ENST00000582232.1 (SEQ ID NO: 12208); ENST00000582376.1 (SEQ ID NO: 12210); |
| | ENST00000582486.5 (SEQ ID NO: 12212); ENST00000582717.5 (SEQ ID NO: 12214); |
| | ENST00000582821.5 (SEQ ID NO: 12216); ENST00000583282.5 (SEQ ID NO: 12218); |
| | ENST00000583667.1 (SEQ ID NO: 12220); ENST00000584243.5 (SEQ ID NO: 12222); |
| | ENST00000584550.1 (SEQ ID NO: 12224); ENST00000613421.4 (SEQ ID NO: 12226); |
| | ENST00000614198.4 (SEQ ID NO: 12228); ENST00000621217.4 (SEQ ID NO: 12230); |
| | ENST00000621870.4 (SEQ ID NO: 12232); ENST00000649398.1 (SEQ ID NO: 12234) |

Target: GGT1

| | |
|---|---|
| pre-mRNA | ENST00000248923.9 (SEQ ID NO: 15586); ENST00000400380.5 (SEQ ID NO: 12236); |
| transcript | ENST00000400382.6 (SEQ ID NO: 12238); ENST00000401885.5 (SEQ ID NO: 12240); |
| | ENST00000403838.5 (SEQ ID NO: 12242); ENST00000404223.5 (SEQ ID NO: 12244); |
| | ENST00000404532.5 (SEQ ID NO: 12246); ENST00000404603.5 (SEQ ID NO: 15587); |
| | ENST00000404920.1 (SEQ ID NO: 12249); ENST00000411974.5 (SEQ ID NO: 12251); |
| | ENST00000412658.5 (SEQ ID NO: 12253); ENST00000412898.5 (SEQ ID NO: 12255); |
| | ENST00000419133.5 (SEQ ID NO: 12257); ENST00000425895.5 (SEQ ID NO: 12259); |
| | ENST00000428855.5 (SEQ ID NO: 12261); ENST00000430289.5 (SEQ ID NO: 12263); |
| | ENST00000432867.5 (SEQ ID NO: 12265); ENST00000438643.6 (SEQ ID NO: 12267); |
| | ENST00000439775.1 (SEQ ID NO: 15588); ENST00000445029.5 (SEQ ID NO: 12270); |
| | ENST00000447416.5 (SEQ ID NO: 12272); ENST00000451366.5 (SEQ ID NO: 12274); |
| | ENST00000452551.5 (SEQ ID NO: 12276); ENST00000455483.5 (SEQ ID NO: 12278); |
| | ENST00000456869.5 (SEQ ID NO: 12280); ENST00000466310.5 (SEQ ID NO: 12282); |
| | ENST00000474191.6 (SEQ ID NO: 12284); ENST00000487766.1 (SEQ ID NO: 12286); |
| | ENST00000490087.1 (SEQ ID NO: 12288); ENST00000651180.1 (SEQ ID NO: 15589); |
| | ENST00000652248.1 (SEQ ID NO: 15590) |
| transcript | ENST00000248923.9 (SEQ ID NO: 12235); ENST00000400380.5 (SEQ ID NO: 12237); |
| | ENST00000400382.6 (SEQ ID NO: 12239); ENST00000401885.5 (SEQ ID NO: 12241); |
| | ENST00000403838.5 (SEQ ID NO: 12243); ENST00000404223.5 (SEQ ID NO: 12245); |
| | ENST00000404532.5 (SEQ ID NO: 12247); ENST00000404603.5 (SEQ ID NO: 12248); |
| | ENST00000404920.1 (SEQ ID NO: 12250); ENST00000411974.5 (SEQ ID NO: 12252); |
| | ENST00000412658.5 (SEQ ID NO: 12254); ENST00000412898.5 (SEQ ID NO: 12256); |
| | ENST00000419133.5 (SEQ ID NO: 12258); ENST00000425895.5 (SEQ ID NO: 12260); |
| | ENST00000428855.5 (SEQ ID NO: 12262); ENST00000430289.5 (SEQ ID NO: 12264); |
| | ENST00000432867.5 (SEQ ID NO: 12266); ENST00000438643.6 (SEQ ID NO: 12268); |
| | ENST00000439775.1 (SEQ ID NO: 12269); ENST00000445029.5 (SEQ ID NO: 12271); |
| | ENST00000447416.5 (SEQ ID NO: 12273); ENST00000451366.5 (SEQ ID NO: 12275); |
| | ENST00000452551.5 (SEQ ID NO: 12277); ENST00000455483.5 (SEQ ID NO: 12279); |
| | ENST00000456869.5 (SEQ ID NO: 12281); ENST00000466310.5 (SEQ ID NO: 12283); |
| | ENST00000474191.6 (SEQ ID NO: 12285); ENST00000487766.1 (SEQ ID NO: 12287); |
| | ENST00000490087.1 (SEQ ID NO: 12289); ENST00000651180.1 (SEQ ID NO: 12290); |
| | ENST00000652248.1 (SEQ ID NO: 12291) |

Target: GLMN

| | |
|---|---|
| pre-mRNA | ENST00000370360.8 (SEQ ID NO: 15591); ENST00000463560.1 (SEQ ID NO: 12293); |
| transcript | ENST00000471465.1 (SEQ ID NO: 12295); ENST00000487911.1 (SEQ ID NO: 12297); |
| | ENST00000495106.5 (SEQ ID NO: 15592); ENST00000495852.6 (SEQ ID NO: 12300) |
| transcript | ENST00000370360.8 (SEQ ID NO: 12292); ENST00000463560.1 (SEQ ID NO: 12294); |
| | ENST00000471465.1 (SEQ ID NO: 12296); ENST00000487911.1 (SEQ ID NO: 12298); |
| | ENST00000495106.5 (SEQ ID NO: 12299); ENST00000495852.6 (SEQ ID NO: 12301) |

Target: GON4L

| | |
|---|---|
| pre-mRNA | ENST00000271883.9 (SEQ ID NO: 15593); ENST00000361040.9 (SEQ ID NO: 15594); |
| transcript | ENST00000368331.5 (SEQ ID NO: 15595); ENST00000437809.5 (SEQ ID NO: 15596); |
| | ENST00000460075.1 (SEQ ID NO: 12306); ENST00000466224.1 (SEQ ID NO: 12308); |
| | ENST00000467009.1 (SEQ ID NO: 15597); ENST00000468867.1 (SEQ ID NO: 15598); |
| | ENST00000471341.5 (SEQ ID NO: 15599); ENST00000473267.1 (SEQ ID NO: 12313); |
| | ENST00000482386.5 (SEQ ID NO: 15600); ENST00000483032.1 (SEQ ID NO: 12316); |
| | ENST00000488251.1 (SEQ ID NO: 12318); ENST00000490801.1 (SEQ ID NO: 12320); |
| | ENST00000496021.1 (SEQ ID NO: 12322); ENST00000497369.5 (SEQ ID NO: 12324); |
| | ENST00000615926.4 (SEQ ID NO: 15601); ENST00000620426.4 (SEQ ID NO: 15602); |
| | ENST00000622608.1 (SEQ ID NO: 15603) |
| transcript | ENST00000271883.9 (SEQ ID NO: 12302); ENST00000361040.9 (SEQ ID NO: 12303); |
| | ENST00000368331.5 (SEQ ID NO: 12304); ENST00000437809.5 (SEQ ID NO: 12305); |
| | ENST00000460075.1 (SEQ ID NO: 12307); ENST00000466224.1 (SEQ ID NO: 12309); |
| | ENST00000467009.1 (SEQ ID NO: 12310); ENST00000468867.1 (SEQ ID NO: 12311); |
| | ENST00000471341.5 (SEQ ID NO: 12312); ENST00000473267.1 (SEQ ID NO: 12314); |
| | ENST00000482386.5 (SEQ ID NO: 12315); ENST00000483032.1 (SEQ ID NO: 12317); |
| | ENST00000488251.1 (SEQ ID NO: 12319); ENST00000490801.1 (SEQ ID NO: 12321); |
| | ENST00000496021.1 (SEQ ID NO: 12323); ENST00000497369.5 (SEQ ID NO: 12325); |
| | ENST00000615926.4 (SEQ ID NO: 12326); ENST00000620426.4 (SEQ ID NO: 12327); |
| | ENST00000622608.1 (SEQ ID NO: 12328) |

Target: GRB14

| | |
|---|---|
| pre-mRNA | ENST00000263915.8 (SEQ ID NO: 15604); ENST00000424693.1 (SEQ ID NO: 15605); |
| transcript | ENST00000446413.6 (SEQ ID NO: 15606); ENST00000469573.1 (SEQ ID NO: 15607); |
| | ENST00000488342.5 (SEQ ID NO: 15608); ENST00000497306.1 (SEQ ID NO: 12334) |
| transcript | ENST00000263915.8 (SEQ ID NO: 12329); ENST00000424693.1 (SEQ ID NO: 12330); |
| | ENST00000446413.6 (SEQ ID NO: 12331); ENST00000469573.1 (SEQ ID NO: 12332); |
| | ENST00000488342.5 (SEQ ID NO: 12333); ENST00000497306.1 (SEQ ID NO: 12335) |

Target: HDAC3

| | |
|---|---|
| pre-mRNA | ENST00000305264.8 (SEQ ID NO: 12336); ENST00000459727.5 (SEQ ID NO: 12338); |
| transcript | ENST00000467533.5 (SEQ ID NO: 12340); ENST00000469207.5 (SEQ ID NO: 12342); |
| | ENST00000469550.6 (SEQ ID NO: 12344); ENST00000471968.1 (SEQ ID NO: 12346); |
| | ENST00000475549.1 (SEQ ID NO: 12348); ENST00000476739.5 (SEQ ID NO: 12350); |
| | ENST00000486618.1 (SEQ ID NO: 12352); ENST00000490808.1 (SEQ ID NO: 12354); |
| | ENST00000491581.5 (SEQ ID NO: 12356); ENST00000492407.1 (SEQ ID NO: 12358); |
| | ENST00000492506.1 (SEQ ID NO: 12360); ENST00000495485.1 (SEQ ID NO: 12362); |
| | ENST00000519474.5 (SEQ ID NO: 12364); ENST00000523088.5 (SEQ ID NO: 12366) |
| transcript | ENST00000305264.8 (SEQ ID NO: 12337); ENST00000459727.5 (SEQ ID NO: 12339); |
| | ENST00000467533.5 (SEQ ID NO: 12341); ENST00000469207.5 (SEQ ID NO: 12343); |
| | ENST00000469550.6 (SEQ ID NO: 12345); ENST00000471968.1 (SEQ ID NO: 12347); |
| | ENST00000475549.1 (SEQ ID NO: 12349); ENST00000476739.5 (SEQ ID NO: 12351); |
| | ENST00000486618.1 (SEQ ID NO: 12353); ENST00000490808.1 (SEQ ID NO: 12355); |
| | ENST00000491581.5 (SEQ ID NO: 12357); ENST00000492407.1 (SEQ ID NO: 12359); |
| | ENST00000492506.1 (SEQ ID NO: 12361); ENST00000495485.1 (SEQ ID NO: 12363); |
| | ENST00000519474.5 (SEQ ID NO: 12365); ENST00000523088.5 (SEQ ID NO: 12367) |

Target: HELQ

| | |
|---|---|
| pre-mRNA | ENST00000295488.8 (SEQ ID NO: 15609); ENST00000440639.2 (SEQ ID NO: 12369); |
| transcript | ENST00000508591.5 (SEQ ID NO: 15610); ENST00000510985.1 (SEQ ID NO: 15611); |
| | ENST00000512539.1 (SEQ ID NO: 12373); ENST00000515482.1; (SEQ ID NO: 12375) |
| transcript | ENST00000295488.8 (SEQ ID NO: 12368); ENST00000440639.2 (SEQ ID NO: 12370); |
| | ENST00000508591.5 (SEQ ID NO: 12371); ENST00000510985.1 (SEQ ID NO: 12372); |
| | ENST00000512539.1 (SEQ ID NO: 12374); ENST00000515482.1 (SEQ ID NO: 12376) |

Target: HP1BP3

| | |
|---|---|
| pre-mRNA | ENST00000312239.10 (SEQ ID NO: 15612); ENST00000375000.5 (SEQ ID NO: 12378); |
| transcript | ENST00000375003.6 (SEQ ID NO: 15613); ENST00000414993.1 (SEQ ID NO: 12381); |
| | ENST00000417710.5 (SEQ ID NO: 12383); ENST00000419490.5 (SEQ ID NO: 12385); |
| | ENST00000419948.5 (SEQ ID NO: 12387); ENST00000424732.5 (SEQ ID NO: 15614); |
| | ENST00000437575.5 (SEQ ID NO: 12390); ENST00000438032.6 (SEQ ID NO: 15615); |
| | ENST00000443615.1 (SEQ ID NO: 12393); ENST00000487117.1 (SEQ ID NO: 12395); |
| | ENST00000488722.5 (SEQ ID NO: 12397); ENST00000491748.1 (SEQ ID NO: 12399) |
| transcript | ENST00000312239.10 (SEQ ID NO: 12377); ENST00000375000.5 (SEQ ID NO: 12379); |
| | ENST00000375003.6 (SEQ ID NO: 12380); ENST00000414993.1 (SEQ ID NO: 12382); |
| | ENST00000417710.5 (SEQ ID NO: 12384); ENST00000419490.5 (SEQ ID NO: 12386); |
| | ENST00000419948.5 (SEQ ID NO: 12388); ENST00000424732.5 (SEQ ID NO: 12389); |
| | ENST00000437575.5 (SEQ ID NO: 12391); ENST00000438032.6 (SEQ ID NO: 12392); |
| | ENST00000443615.1 (SEQ ID NO: 12394); ENST00000487117.1 (SEQ ID NO: 12396); |
| | ENST00000488722.5 (SEQ ID NO: 12398); ENST00000491748.1 (SEQ ID NO: 12400) |

Target: HPS1

| | |
|---|---|
| pre-mRNA | ENST00000325103.10 (SEQ ID NO: 15616); ENST00000338546.9 (SEQ ID NO: 12402); |
| transcript | ENST00000359632.7 (SEQ ID NO: 12404); ENST00000361490.9 (SEQ ID NO: 15617); |
| | ENST00000414009.1 (SEQ ID NO: 12407); ENST00000462743.1 (SEQ ID NO: 12409); |
| | ENST00000465957.1 (SEQ ID NO: 12411); ENST00000467246.5 (SEQ ID NO: 12413); |
| | ENST00000470095.5 (SEQ ID NO: 12415); ENST00000474873.5 (SEQ ID NO: 12417); |
| | ENST00000478087.5 (SEQ ID NO: 12419); ENST00000480020.5 (SEQ ID NO: 12421); |
| | ENST00000497527.1 (SEQ ID NO: 12423); ENST00000498219.5 (SEQ ID NO: 12425); |
| | ENST00000613394.4 (SEQ ID NO: 15618) |
| transcript | ENST00000325103.10 (SEQ ID NO: 12401); ENST00000338546.9 (SEQ ID NO: 12403); |
| | ENST00000359632.7 (SEQ ID NO: 12405); ENST00000361490.9 (SEQ ID NO: 12406); |
| | ENST00000414009.1 (SEQ ID NO: 12408); ENST00000462743.1 (SEQ ID NO: 12410); |
| | ENST00000465957.1 (SEQ ID NO: 12412); ENST00000467246.5 (SEQ ID NO: 12414); |
| | ENST00000470095.5 (SEQ ID NO: 12416); ENST00000474873.5 (SEQ ID NO: 12418); |
| | ENST00000478087.5 (SEQ ID NO: 12420); ENST00000480020.5 (SEQ ID NO: 12422); |
| | ENST00000497527.1 (SEQ ID NO: 12424); ENST00000498219.5 (SEQ ID NO: 12426); |
| | ENST00000613394.4 (SEQ ID NO: 12427) |

Target: HPS4

| | |
|---|---|
| pre-mRNA | ENST00000336873.9 (SEQ ID NO: 15619); ENST00000398145.6 (SEQ ID NO: 15620); |
| transcript | ENST00000402105.7 (SEQ ID NO: 12430); ENST00000422379.2 (SEQ ID NO: 12432); |
| | ENST00000429411.5 (SEQ ID NO: 12434); ENST00000439453.5 (SEQ ID NO: 15621); |
| | ENST00000459918.1 (SEQ ID NO: 12437); ENST00000464362.5 (SEQ ID NO: 12439); |
| | ENST00000466781.5 (SEQ ID NO: 15622); ENST00000473782.1 (SEQ ID NO: 12442); |
| | ENST00000479064.5 (SEQ ID NO: 12444); ENST00000481910.1 (SEQ ID NO: 12446); |
| | ENST00000483631.1 (SEQ ID NO: 12448); ENST00000485842.5 (SEQ ID NO: 12450); |
| | ENST00000491142.1 (SEQ ID NO: 12452); ENST00000493455.6 (SEQ ID NO: 12454); |
| | ENST00000496385.5 (SEQ ID NO: 12456); ENST00000519774.5 (SEQ ID NO: 12458) |
| transcript | ENST00000336873.9 (SEQ ID NO: 12428); ENST00000398145.6 (SEQ ID NO: 12429); |
| | ENST00000402105.7 (SEQ ID NO: 12431); ENST00000422379.2 (SEQ ID NO: 12433); |
| | ENST00000429411.5 (SEQ ID NO: 12435); ENST00000439453.5 (SEQ ID NO: 12436); |
| | ENST00000459918.1 (SEQ ID NO: 12438); ENST00000464362.5 (SEQ ID NO: 12440); |
| | ENST00000466781.5 (SEQ ID NO: 12441); ENST00000473782.1 (SEQ ID NO: 12443); |
| | ENST00000479064.5 (SEQ ID NO: 12445); ENST00000481910.1 (SEQ ID NO: 12447); |
| | ENST00000483631.1 (SEQ ID NO: 12449); ENST00000485842.5 (SEQ ID NO: 12451); |
| | ENST00000491142.1 (SEQ ID NO: 12453); ENST00000493455.6 (SEQ ID NO: 12455); |
| | ENST00000496385.5 (SEQ ID NO: 12457); ENST00000519774.5 (SEQ ID NO: 12459) |

Target: IDUA

| | |
|---|---|
| pre-mRNA | ENST00000247933.9 (SEQ ID NO: 12460); ENST00000502829.1 (SEQ ID NO: 12462); |
| transcript | ENST00000502910.5 (SEQ ID NO: 12464); ENST00000504568.5 (SEQ ID NO: 12466); |
| | ENST00000506561.5 (SEQ ID NO: 12468); ENST00000508168.5 (SEQ ID NO: 12470); |
| | ENST00000509744.1 (SEQ ID NO: 12472); ENST00000509948.5 (SEQ ID NO: 12474); |
| | ENST00000514192.5 (SEQ ID NO: 12476); ENST00000514224.2 (SEQ ID NO: 12478); |
| | ENST00000514417.1 (SEQ ID NO: 12480); ENST00000514698.5 (SEQ ID NO: 12482); |
| | ENST00000652070.1 (SEQ ID NO: 12484) |
| transcript | ENST00000247933.9 (SEQ ID NO: 12461); ENST00000502829.1 (SEQ ID NO: 12463); |
| | ENST00000502910.5 (SEQ ID NO: 12465); ENST00000504568.5 (SEQ ID NO: 12467); |
| | ENST00000506561.5 (SEQ ID NO: 12469); ENST00000508168.5 (SEQ ID NO: 12471); |
| | ENST00000509744.1 (SEQ ID NO: 12473); ENST00000509948.5 (SEQ ID NO: 12475); |
| | ENST00000514192.5 (SEQ ID NO: 12477); ENST00000514224.2 (SEQ ID NO: 12479); |
| | ENST00000514417.1 (SEQ ID NO: 12481); ENST00000514698.5 (SEQ ID NO: 12483); |
| | ENST00000652070.1 (SEQ ID NO: 12485) |

Target: IFT122

| | |
|---|---|
| pre-mRNA | ENST00000296266.7 (SEQ ID NO: 15623); ENST00000347300.6 (SEQ ID NO: 15624); |
| transcript | ENST00000348417.6 (SEQ ID NO: 15625); ENST00000349441.6 (SEQ ID NO: 15626); |
| | ENST00000431818.6 (SEQ ID NO: 15627); ENST00000440957.6 (SEQ ID NO: 15628); |
| | ENST00000448668.2 (SEQ ID NO: 12492); ENST00000502304.5 (SEQ ID NO: 12494); |
| | ENST00000502456.5 (SEQ ID NO: 12496); ENST00000504021.5 (SEQ ID NO: 15629); |
| | ENST00000504444.1 (SEQ ID NO: 12499); ENST00000504653.5 (SEQ ID NO: 12501); |
| | ENST00000506507.5 (SEQ ID NO: 15630); ENST00000507221.1 (SEQ ID NO: 12504); |
| | ENST00000507564.5 (SEQ ID NO: 15631); ENST00000508654.1 (SEQ ID NO: 12507); |
| | ENST00000508826.5 (SEQ ID NO: 12509); ENST00000509195.5 (SEQ ID NO: 12511); |
| | ENST00000509522.5 (SEQ ID NO: 12513); ENST00000509815.1 (SEQ ID NO: 12515); |
| | ENST00000510524.5 (SEQ ID NO: 12517); ENST00000511425.5 (SEQ ID NO: 15632); |
| | ENST00000511498.1 (SEQ ID NO: 12520); ENST00000512157.5 (SEQ ID NO: 12522); |
| | ENST00000512220.5 (SEQ ID NO: 15633); ENST00000512814.5 (SEQ ID NO: 12525); |
| | ENST00000513190.1 (SEQ ID NO: 12527); ENST00000513891.1 (SEQ ID NO: 12529); |
| | ENST00000513932.1 (SEQ ID NO: 12531); ENST00000514081.1 (SEQ ID NO: 12533); |
| | ENST00000514275.5 (SEQ ID NO: 12535); ENST00000515783.5 (SEQ ID NO: 15634) |
| transcript | ENST00000296266.7 (SEQ ID NO: 12486); ENST00000347300.6 (SEQ ID NO: 12487); |
| | ENST00000348417.6 (SEQ ID NO: 12488); ENST00000349441.6 (SEQ ID NO: 12489); |
| | ENST00000431818.6 (SEQ ID NO: 12490); ENST00000440957.6 (SEQ ID NO: 12491); |
| | ENST00000448668.2 (SEQ ID NO: 12493); ENST00000502304.5 (SEQ ID NO: 12495); |
| | ENST00000502456.5 (SEQ ID NO: 12497); ENST00000504021.5 (SEQ ID NO: 12498); |
| | ENST00000504444.1 (SEQ ID NO: 12500); ENST00000504653.5 (SEQ ID NO: 12502); |
| | ENST00000506507.5 (SEQ ID NO: 12503); ENST00000507221.1 (SEQ ID NO: 12505); |
| | ENST00000507564.5 (SEQ ID NO: 12506); ENST00000508654.1 (SEQ ID NO: 12508); |
| | ENST00000508826.5 (SEQ ID NO: 12510); ENST00000509195.5 (SEQ ID NO: 12512); |
| | ENST00000509522.5 (SEQ ID NO: 12514); ENST00000509815.1 (SEQ ID NO: 12516); |
| | ENST00000510524.5 (SEQ ID NO: 12518); ENST00000511425.5 (SEQ ID NO: 12519); |
| | ENST00000511498.1 (SEQ ID NO: 12521); ENST00000512157.5 (SEQ ID NO: 12523); |
| | ENST00000512220.5 (SEQ ID NO: 12524); ENST00000512814.5 (SEQ ID NO: 12526); |
| | ENST00000513190.1 (SEQ ID NO: 12528); ENST00000513891.1 (SEQ ID NO: 12530); |
| | ENST00000513932.1 (SEQ ID NO: 12532); ENST00000514081.1 (SEQ ID NO: 12534); |
| | ENST00000514275.5 (SEQ ID NO: 12536); ENST00000515783.5 (SEQ ID NO: 12537) |

Target: IL17RC

| | |
|---|---|
| pre-mRNA | ENST00000295981.7 (SEQ ID NO: 12538); ENST00000383812.9 (SEQ ID NO: 12540); |
| transcript | ENST00000403601.8 (SEQ ID NO: 12542); ENST00000412901.5 (SEQ ID NO: 12544); |
| | ENST00000413608.2 (SEQ ID NO: 12546); ENST00000416074.6 (SEQ ID NO: 12548); |
| | ENST00000424206.5 (SEQ ID NO: 12550); ENST00000434756.5 (SEQ ID NO: 12552); |
| | ENST00000436503.5 (SEQ ID NO: 12554); ENST00000438091.5 (SEQ ID NO: 12556); |
| | ENST00000440502.5 (SEQ ID NO: 12558); ENST00000451165.6 (SEQ ID NO: 12560); |
| | ENST00000451231.5 (SEQ ID NO: 12562); ENST00000451271.5 (SEQ ID NO: 12564); |
| | ENST00000455057.5 (SEQ ID NO: 12566); ENST00000461995.5 (SEQ ID NO: 12568); |
| | ENST00000464406.5 (SEQ ID NO: 12570); ENST00000465794.1 (SEQ ID NO: 12572); |
| | ENST00000466046.5 (SEQ ID NO: 12574); ENST00000466712.1 (SEQ ID NO: 12576); |
| | ENST00000469686.5 (SEQ ID NO: 12578); ENST00000476810.5 (SEQ ID NO: 12580); |
| | ENST00000478206.1 (SEQ ID NO: 12582); ENST00000481032.1 (SEQ ID NO: 12584); |
| | ENST00000483582.5 (SEQ ID NO: 12586); ENST00000490512.5 (SEQ ID NO: 12588); |
| | ENST00000494365.5 (SEQ ID NO: 12590); ENST00000497102.5 (SEQ ID NO: 12592); |
| | ENST00000497387.5 (SEQ ID NO: 12594); ENST00000498214.6 (SEQ ID NO: 12596) |
| transcript | ENST00000295981.7 (SEQ ID NO: 12539); ENST00000383812.9 (SEQ ID NO: 12541); |
| | ENST00000403601.8 (SEQ ID NO: 12543); ENST00000412901.5 (SEQ ID NO: 12545); |
| | ENST00000413608.2 (SEQ ID NO: 12547); ENST00000416074.6 (SEQ ID NO: 12549); |
| | ENST00000424206.5 (SEQ ID NO: 12551); ENST00000434756.5 (SEQ ID NO: 12553); |
| | ENST00000436503.5 (SEQ ID NO: 12555); ENST00000438091.5 (SEQ ID NO: 12557); |
| | ENST00000440502.5 (SEQ ID NO: 12559); ENST00000451165.6 (SEQ ID NO: 12561); |
| | ENST00000451231.5 (SEQ ID NO: 12563); ENST00000451271.5 (SEQ ID NO: 12565); |
| | ENST00000455057.5 (SEQ ID NO: 12567); ENST00000461995.5 (SEQ ID NO: 12569); |
| | ENST00000464406.5 (SEQ ID NO: 12571); ENST00000465794.1 (SEQ ID NO: 12573); |
| | ENST00000466046.5 (SEQ ID NO: 12575); ENST00000466712.1 (SEQ ID NO: 12577); |
| | ENST00000469686.5 (SEQ ID NO: 12579); ENST00000476810.5 (SEQ ID NO: 12581); |
| | ENST00000478206.1 (SEQ ID NO: 12583); ENST00000481032.1 (SEQ ID NO: 12585); |
| | ENST00000483582.5 (SEQ ID NO: 12587); ENST00000490512.5 (SEQ ID NO: 12589); |
| | ENST00000494365.5 (SEQ ID NO: 12591); ENST00000497102.5 (SEQ ID NO: 12593); |
| | ENST00000497387.5 (SEQ ID NO: 12595); ENST00000498214.6 (SEQ ID NO: 12597) |

Target: IMPDH1

| | |
|---|---|
| pre-mRNA | ENST00000338791.11 (SEQ ID NO: 12598); ENST00000348127.10 (SEQ ID NO: 12600); |
| transcript | ENST00000354269.9 (SEQ ID NO: 12602); ENST00000419067.6 (SEQ ID NO: 12604); |
| | ENST00000460045.1 (SEQ ID NO: 12606); ENST00000468842.1 (SEQ ID NO: 12608); |
| | ENST00000469328.5 (SEQ ID NO: 12610); ENST00000470772.5 (SEQ ID NO: 12612); |
| | ENST00000473463.1 (SEQ ID NO: 12614); ENST00000480861.5 (SEQ ID NO: 12616); |
| | ENST00000484496.5 (SEQ ID NO: 12618); ENST00000489263.1 (SEQ ID NO: 12620); |
| | ENST00000491376.5 (SEQ ID NO: 12622); ENST00000496200.5 (SEQ ID NO: 12624); |
| | ENST00000496487.5 (SEQ ID NO: 12626); ENST00000497868.5 (SEQ ID NO: 12628); |
| | ENST00000626419.2 (SEQ ID NO: 12630); ENST00000648462.1 (SEQ ID NO: 12632) |
| transcript | ENST00000338791.11 (SEQ ID NO: 12599); ENST00000348127.10 (SEQ ID NO: 12601); |
| | ENST00000354269.9 (SEQ ID NO: 12603); ENST00000419067.6 (SEQ ID NO: 12605); |
| | ENST00000460045.1 (SEQ ID NO: 12607); ENST00000468842.1 (SEQ ID NO: 12609); |
| | ENST00000469328.5 (SEQ ID NO: 12611); ENST00000470772.5 (SEQ ID NO: 12613); |
| | ENST00000473463.1 (SEQ ID NO: 12615); ENST00000480861.5 (SEQ ID NO: 12617); |
| | ENST00000484496.5 (SEQ ID NO: 12619); ENST00000489263.1 (SEQ ID NO: 12621); |
| | ENST00000491376.5 (SEQ ID NO: 12623); ENST00000496200.5 (SEQ ID NO: 12625); |
| | ENST00000496487.5 (SEQ ID NO: 12627); ENST00000497868.5 (SEQ ID NO: 12629); |
| | ENST00000626419.2 (SEQ ID NO: 12631); ENST00000648462.1 (SEQ ID NO: 12633) |

Target: INVS

| | |
|---|---|
| pre-mRNA | ENST00000262456.6 (SEQ ID NO: 15635); ENST00000262457.7 (SEQ ID NO: 15636); |
| transcript | ENST00000374921.3 (SEQ ID NO: 15637); ENST00000460636.2 (SEQ ID NO: 15638); |
| | ENST00000466647.5 (SEQ ID NO: 15639); ENST00000480309.1 (SEQ ID NO: 12639); |
| | ENST00000496467.5 (SEQ ID NO: 15640) |
| transcript | ENST00000262456.6 (SEQ ID NO: 12634); ENST00000262457.7 (SEQ ID NO: 12635); |
| | ENST00000374921.3 (SEQ ID NO: 12636); ENST00000460636.2 (SEQ ID NO: 12637); |
| | ENST00000466647.5 (SEQ ID NO: 12638); ENST00000480309.1 (SEQ ID NO: 12640); |
| | ENST00000496467.5 (SEQ ID NO: 12641) |

Target: IRF3

| | |
|---|---|
| pre-mRNA | ENST00000309877.11 (SEQ ID NO: 12642); ENST00000377135.8 (SEQ ID NO: 12644); |
| transcript | ENST00000377139.8 (SEQ ID NO: 12646); ENST00000442265.2 (SEQ ID NO: 12648); |
| | ENST00000593337.5 (SEQ ID NO: 12650); ENST00000593818.5 (SEQ ID NO: 12652); |
| | ENST00000593922.5 (SEQ ID NO: 12654); ENST00000594387.1 (SEQ ID NO: 12656); |
| | ENST00000595034.5 (SEQ ID NO: 12658); ENST00000595240.5 (SEQ ID NO: 12660); |
| | ENST00000596644.5 (SEQ ID NO: 12662); ENST00000596756.5 (SEQ ID NO: 12664); |
| | ENST00000596765.5 (SEQ ID NO: 12666); ENST00000596788.1 (SEQ ID NO: 12668); |
| | ENST00000596822.5 (SEQ ID NO: 12670); ENST00000597180.1 (SEQ ID NO: 12672); |
| | ENST00000597198.5 (SEQ ID NO: 12674); ENST00000597369.1 (SEQ ID NO: 12676); |
| | ENST00000597636.5 (SEQ ID NO: 12678); ENST00000598108.5 (SEQ ID NO: 12680); |
| | ENST00000598808.5 (SEQ ID NO: 12682); ENST00000599144.5 (SEQ ID NO: 12684); |
| | ENST00000599223.5 (SEQ ID NO: 12686); ENST00000599680.1 (SEQ ID NO: 12688); |
| | ENST00000600022.5 (SEQ ID NO: 12690); ENST00000600453.1 (SEQ ID NO: 12692); |
| | ENST00000600911.5 (SEQ ID NO: 12694); ENST00000601291.5 (SEQ ID NO: 12696); |
| | ENST00000601373.5 (SEQ ID NO: 12698); ENST00000601809.5 (SEQ ID NO: 12700); |
| | ENST00000602190.1 (SEQ ID NO: 12702) |
| transcript | ENST00000309877.11 (SEQ ID NO: 12643); ENST00000377135.8 (SEQ ID NO: 12645); |
| | ENST00000377139.8 (SEQ ID NO: 12647); ENST00000442265.2 (SEQ ID NO: 12649); |
| | ENST00000593337.5 (SEQ ID NO: 12651); ENST00000593818.5 (SEQ ID NO: 12653); |
| | ENST00000593922.5 (SEQ ID NO: 12655); ENST00000594387.1 (SEQ ID NO: 12657); |
| | ENST00000595034.5 (SEQ ID NO: 12659); ENST00000595240.5 (SEQ ID NO: 12661); |
| | ENST00000596644.5 (SEQ ID NO: 12663); ENST00000596756.5 (SEQ ID NO: 12665); |
| | ENST00000596765.5 (SEQ ID NO: 12667); ENST00000596788.1 (SEQ ID NO: 12669); |
| | ENST00000596822.5 (SEQ ID NO: 12671); ENST00000597180.1 (SEQ ID NO: 12673); |
| | ENST00000597198.5 (SEQ ID NO: 12675); ENST00000597369.1 (SEQ ID NO: 12677); |
| | ENST00000597636.5 (SEQ ID NO: 12679); ENST00000598108.5 (SEQ ID NO: 12681); |
| | ENST00000598808.5 (SEQ ID NO: 12683); ENST00000599144.5 (SEQ ID NO: 12685); |
| | ENST00000599223.5 (SEQ ID NO: 12687); ENST00000599680.1 (SEQ ID NO: 12689); |
| | ENST00000600022.5 (SEQ ID NO: 12691); ENST00000600453.1 (SEQ ID NO: 12693); |
| | ENST00000600911.5 (SEQ ID NO: 12695); ENST00000601291.5 (SEQ ID NO: 12697); |
| | ENST00000601373.5 (SEQ ID NO: 12699); ENST00000601809.5 (SEQ ID NO: 12701); |
| | ENST00000602190.1 (SEQ ID NO: 12703) |

Target: KCTD3

| | |
|---|---|
| pre-mRNA | ENST00000259154.9 (SEQ ID NO: 15641); ENST00000448333.1 (SEQ ID NO: 12705); |
| transcript | ENST00000452413.1 (SEQ ID NO: 12707); ENST00000465650.1 (SEQ ID NO: 12709); |
| | ENST00000495537.1 (SEQ ID NO: 12711) |
| transcript | ENST00000259154.9 (SEQ ID NO: 12704); ENST00000448333.1 (SEQ ID NO: 12706); |
| | ENST00000452413.1 (SEQ ID NO: 12708); ENST00000465650.1 (SEQ ID NO: 12710); |
| | ENST00000495537.1 (SEQ ID NO: 12712) |

Target: KLKB1

| | |
|---|---|
| pre-mRNA | ENST00000264690.11 (SEQ ID NO: 15642); ENST00000428196.5 (SEQ ID NO: 12714); |
| transcript | ENST00000446598.6 (SEQ ID NO: 12716); ENST00000467271.1 (SEQ ID NO: 12718); |
| | ENST00000511406.5 (SEQ ID NO: 15643); ENST00000511608.5 (SEQ ID NO: 15644); |
| | ENST00000513864.2 (SEQ ID NO: 15645) |
| transcript | ENST00000264690.11 (SEQ ID NO: 12713); ENST00000428196.5 (SEQ ID NO: 12715); |
| | ENST00000446598.6 (SEQ ID NO: 12717); ENST00000467271.1 (SEQ ID NO: 12719); |
| | ENST00000511406.5 (SEQ ID NO: 12720); ENST00000511608.5 (SEQ ID NO: 12721); |
| | ENST00000513864.2 (SEQ ID NO: 12722) |

Target: KYAT1

| | |
|---|---|
| pre-mRNA | ENST00000302586.8 (SEQ ID NO: 15646); ENST00000320665.10 (SEQ ID NO: 15647); |
| transcript | ENST00000416084.5 (SEQ ID NO: 12725); ENST00000427720.1 (SEQ ID NO: 12727); |
| | ENST00000436267.7 (SEQ ID NO: 15648); ENST00000451800.5 (SEQ ID NO: 15649); |
| | ENST00000462722.5 (SEQ ID NO: 15650); ENST00000466418.1 (SEQ ID NO: 12732); |
| | ENST00000474824.1 (SEQ ID NO: 15651); ENST00000483599.5 (SEQ ID NO: 12735) |
| transcript | ENST00000302586.8 (SEQ ID NO: 12723); ENST00000320665.10 (SEQ ID NO: 12724); |
| | ENST00000416084.5 (SEQ ID NO: 12726); ENST00000427720.1 (SEQ ID NO: 12728); |
| | ENST00000436267.7 (SEQ ID NO: 12729); ENST00000451800.5 (SEQ ID NO: 12730); |
| | ENST00000462722.5 (SEQ ID NO: 12731); ENST00000466418.1 (SEQ ID NO: 12733); |
| | ENST00000474824.1 (SEQ ID NO: 12734); ENST00000483599.5 (SEQ ID NO: 12736) |

Target: LAMC3

| | |
|---|---|
| pre-mRNA | ENST00000355452.5 (SEQ ID NO: 12737); ENST00000361069.9 (SEQ ID NO: 15652); |
| transcript | ENST00000462567.1 (SEQ ID NO: 12740); ENST00000480883.1 (SEQ ID NO: 15653) |
| transcript | ENST00000355452.5 (SEQ ID NO: 12738); ENST00000361069.9 (SEQ ID NO: 12739); |
| | ENST00000462567.1 (SEQ ID NO: 12741); ENST00000480883.1 (SEQ ID NO: 12742) |

Target: LDAH

| | |
|---|---|
| pre-mRNA | ENST00000237822.8 (SEQ ID NO: 15654); ENST00000381090.7 (SEQ ID NO: 15655); |
| transcript | ENST00000402479.6 (SEQ ID NO: 15656); ENST00000403006.6 (SEQ ID NO: 15657); |
| | ENST00000412261.5 (SEQ ID NO: 15658); ENST00000419825.2 (SEQ ID NO: 15659); |
| | ENST00000432947.1 (SEQ ID NO: 15660); ENST00000435420.6 (SEQ ID NO: 15661); |
| | ENST00000440866.6 (SEQ ID NO: 15662); ENST00000470099.1 (SEQ ID NO: 15663); |
| | ENST00000541941.5 (SEQ ID NO: 15664); ENST00000619656.4 (SEQ ID NO: 15665); |
| | ENST00000626491.2 (SEQ ID NO: 15666) |
| transcript | ENST00000237822.8 (SEQ ID NO: 12743); ENST00000381090.7 (SEQ ID NO: 12744); |
| | ENST00000402479.6 (SEQ ID NO: 12745); ENST00000403006.6 (SEQ ID NO: 12746); |
| | ENST00000412261.5 (SEQ ID NO: 12747); ENST00000419825.2 (SEQ ID NO: 12748); |
| | ENST00000432947.1 (SEQ ID NO: 12749); ENST00000435420.6 (SEQ ID NO: 12750); |
| | ENST00000440866.6 (SEQ ID NO: 12751); ENST00000470099.1 (SEQ ID NO: 12752); |
| | ENST00000541941.5 (SEQ ID NO: 12753); ENST00000619656.4 (SEQ ID NO: 12754); |
| | ENST00000626491.2 (SEQ ID NO: 12755) |

Target: LIMS2

| | |
|---|---|
| pre-mRNA | ENST00000324938.9 (SEQ ID NO: 12756); ENST00000355119.8 (SEQ ID NO: 15667); |
| transcript | ENST00000409254.1 (SEQ ID NO: 12759); ENST00000409286.5 (SEQ ID NO: 12761); |
| | ENST00000409455.5 (SEQ ID NO: 15668); ENST00000409754.5 (SEQ ID NO: 12764); |
| | ENST00000409808.6 (SEQ ID NO: 15669); ENST00000410011.5 (SEQ ID NO: 15670); |
| | ENST00000410038.5 (SEQ ID NO: 12768); ENST00000413578.5 (SEQ ID NO: 12770); |
| | ENST00000426981.5 (SEQ ID NO: 12772); ENST00000466410.5 (SEQ ID NO: 12774); |
| | ENST00000469300.6 (SEQ ID NO: 12776); ENST00000476932.5 (SEQ ID NO: 12778); |
| | ENST00000484252.5 (SEQ ID NO: 12780); ENST00000494613.5 (SEQ ID NO: 12782); |
| | ENST00000545738.6 (SEQ ID NO: 15671); ENST00000582671.1 (SEQ ID NO: 12785) |
| transcript | ENST00000324938.9 (SEQ ID NO: 12757); ENST00000355119.8 (SEQ ID NO: 12758); |
| | ENST00000409254.1 (SEQ ID NO: 12760); ENST00000409286.5 (SEQ ID NO: 12762); |
| | ENST00000409455.5 (SEQ ID NO: 12763); ENST00000409754.5 (SEQ ID NO: 12765); |
| | ENST00000409808.6 (SEQ ID NO: 12766); ENST00000410011.5 (SEQ ID NO: 12767); |
| | ENST00000410038.5 (SEQ ID NO: 12769); ENST00000413578.5 (SEQ ID NO: 12771); |
| | ENST00000426981.5 (SEQ ID NO: 12773); ENST00000466410.5 (SEQ ID NO: 12775); |
| | ENST00000469300.6 (SEQ ID NO: 12777); ENST00000476932.5 (SEQ ID NO: 12779); |
| | ENST00000484252.5 (SEQ ID NO: 12781); ENST00000494613.5 (SEQ ID NO: 12783); |
| | ENST00000545738.6 (SEQ ID NO: 12784); ENST00000582671.1 (SEQ ID NO: 12786) |

Target: MALT1

| | |
|---|---|
| pre-mRNA | ENST00000345724.7 (SEQ ID NO: 15672); ENST00000587438.1 (SEQ ID NO: 12788); |
| transcript | ENST00000589873.5 (SEQ ID NO: 12790); ENST00000591792.1 (SEQ ID NO: 12792); |
| | ENST00000648670.1 (SEQ ID NO: 15673); ENST00000649125.1 (SEQ ID NO: 15674); |
| | ENST00000649202.1 (SEQ ID NO: 15675); ENST00000649217.2 (SEQ ID NO: 15676); |
| | ENST00000649756.1 (SEQ ID NO: 12798); ENST00000650045.1 (SEQ ID NO: 15677); |
| | ENST00000650355.1; (SEQ ID NO: 12801) |
| transcript | ENST00000345724.7 (SEQ ID NO: 12787); ENST00000587438.1 (SEQ ID NO: 12789); |
| | ENST00000589873.5 (SEQ ID NO: 12791); ENST00000591792.1 (SEQ ID NO: 12793); |
| | ENST00000648670.1 (SEQ ID NO: 12794); ENST00000649125.1 (SEQ ID NO: 12795); |
| | ENST00000649202.1 (SEQ ID NO: 12796); ENST00000649217.2 (SEQ ID NO: 12797); |
| | ENST00000649756.1 (SEQ ID NO: 12799); ENST00000650045.1 (SEQ ID NO: 12800); |
| | ENST00000650355.1 (SEQ ID NO: 12802) |

Target: MAP3K7

| | |
|---|---|
| pre-mRNA | ENST00000369320.1 (SEQ ID NO: 15678); ENST00000369325.7 (SEQ ID NO: 15679); |
| transcript | ENST00000369327.7 (SEQ ID NO: 15680); ENST00000369329.8 (SEQ ID NO: 15681); |
| | ENST00000369332.7 (SEQ ID NO: 15682); ENST00000479630.1 (SEQ ID NO: 12808) |
| transcript | ENST00000369320.1 (SEQ ID NO: 12803); ENST00000369325.7 (SEQ ID NO: 12804); |
| | ENST00000369327.7 (SEQ ID NO: 12805); ENST00000369329.8 (SEQ ID NO: 12806); |
| | ENST00000369332.7 (SEQ ID NO: 12807); ENST00000479630.1 (SEQ ID NO: 12809) |

Target: MAPK13

| | |
|---|---|
| pre-mRNA | ENST00000211287.9 (SEQ ID NO: 12810); ENST00000373759.1 (SEQ ID NO: 12812); |
| transcript | ENST00000373766.9 (SEQ ID NO: 12814); ENST00000476951.5 (SEQ ID NO: 12816); |
| | ENST00000490334.1 (SEQ ID NO: 12818) |
| transcript | ENST00000211287.9 (SEQ ID NO: 12811); ENST00000373759.1 (SEQ ID NO: 12813); |
| | ENST00000373766.9 (SEQ ID NO: 12815); ENST00000476951.5 (SEQ ID NO: 12817); |
| | ENST00000490334.1 (SEQ ID NO: 12819) |

Target: MCAT

| | |
|---|---|
| pre-mRNA | ENST00000290429.11 (SEQ ID NO: 12820); ENST00000327555.5 (SEQ ID NO: 12822); |
| transcript | ENST00000464244.1 (SEQ ID NO: 12824); ENST00000608052.1 (SEQ ID NO: 12826) |
| transcript | ENST00000290429.11 (SEQ ID NO: 12821); ENST00000327555.5 (SEQ ID NO: 12823); |
| | ENST00000464244.1 (SEQ ID NO: 12825); ENST00000608052.1 (SEQ ID NO: 12827) |

Target: MCEE

| | |
|---|---|
| pre-mRNA | ENST00000244217.6 (SEQ ID NO: 12828); ENST00000413592.5 (SEQ ID NO: 12830); |
| transcript | ENST00000462609.2 (SEQ ID NO: 12832); ENST00000486135.1 (SEQ ID NO: 12834); |
| | ENST00000494660.6 (SEQ ID NO: 12836) |
| transcript | ENST00000244217.6 (SEQ ID NO: 12829); ENST00000413592.5 (SEQ ID NO: 12831); |
| | ENST00000462609.2 (SEQ ID NO: 12833); ENST00000486135.1 (SEQ ID NO: 12835); |
| | ENST00000494660.6 (SEQ ID NO: 12837) |

Target: MPI

| | |
|---|---|
| pre-mRNA | ENST00000323744.10 (SEQ ID NO: 12838); ENST00000352410.9 (SEQ ID NO: 12840); |
| transcript | ENST00000535694.5 (SEQ ID NO: 12842); ENST00000561470.5 (SEQ ID NO: 12844); |
| | ENST00000562606.5 (SEQ ID NO: 12846); ENST00000562800.5 (SEQ ID NO: 12848); |
| | ENST00000563422.5 (SEQ ID NO: 12850); ENST00000563786.5 (SEQ ID NO: 12852); |
| | ENST00000564003.5 (SEQ ID NO: 12854); ENST00000564633.5 (SEQ ID NO: 12856); |
| | ENST00000564692.1 (SEQ ID NO: 12858); ENST00000565576.5 (SEQ ID NO: 12860); |
| | ENST00000566377.5 (SEQ ID NO: 12862); ENST00000566556.1 (SEQ ID NO: 12864); |
| | ENST00000567116.5 (SEQ ID NO: 12866); ENST00000567132.5 (SEQ ID NO: 12868); |
| | ENST00000567177.1 (SEQ ID NO: 12870); ENST00000567570.5 (SEQ ID NO: 12872); |
| | ENST00000568303.1 (SEQ ID NO: 12874); ENST00000568828.5 (SEQ ID NO: 12876); |
| | ENST00000568840.1 (SEQ ID NO: 12878); ENST00000568907.5 (SEQ ID NO: 12880); |
| | ENST00000569233.5 (SEQ ID NO: 12882); ENST00000569931.5 (SEQ ID NO: 12884) |
| transcript | ENST00000323744.10 (SEQ ID NO: 12839); ENST00000352410.9 (SEQ ID NO: 12841); |
| | ENST00000535694.5 (SEQ ID NO: 12843); ENST00000561470.5 (SEQ ID NO: 12845); |
| | ENST00000562606.5 (SEQ ID NO: 12847); ENST00000562800.5 (SEQ ID NO: 12849); |
| | ENST00000563422.5 (SEQ ID NO: 12851); ENST00000563786.5 (SEQ ID NO: 12853); |
| | ENST00000564003.5 (SEQ ID NO: 12855); ENST00000564633.5 (SEQ ID NO: 12857); |
| | ENST00000564692.1 (SEQ ID NO: 12859); ENST00000565576.5 (SEQ ID NO: 12861); |
| | ENST00000566377.5 (SEQ ID NO: 12863); ENST00000566556.1 (SEQ ID NO: 12865); |
| | ENST00000567116.5 (SEQ ID NO: 12867); ENST00000567132.5 (SEQ ID NO: 12869); |
| | ENST00000567177.1 (SEQ ID NO: 12871); ENST00000567570.5 (SEQ ID NO: 12873); |
| | ENST00000568303.1 (SEQ ID NO: 12875); ENST00000568828.5 (SEQ ID NO: 12877); |
| | ENST00000568840.1 (SEQ ID NO: 12879); ENST00000568907.5 (SEQ ID NO: 12881); |
| | ENST00000569233.5 (SEQ ID NO: 12883); ENST00000569931.5 (SEQ ID NO: 12885) |

Target: MSTO1

| | |
|---|---|
| pre-mRNA | ENST00000245564.7 (SEQ ID NO: 12886); ENST00000368341.8 (SEQ ID NO: 12888); |
| transcript | ENST00000460199.5 (SEQ ID NO: 12890); ENST00000462250.2 (SEQ ID NO: 12892); |
| | ENST00000465137.5 (SEQ ID NO: 12894); ENST00000466815.1 (SEQ ID NO: 12896); |
| | ENST00000471209.1 (SEQ ID NO: 12898); ENST00000473327.5 (SEQ ID NO: 12900); |
| | ENST00000475253.5 (SEQ ID NO: 12902); ENST00000478756.1 (SEQ ID NO: 12904); |
| | ENST00000482284.5 (SEQ ID NO: 12906); ENST00000483734.5 (SEQ ID NO: 12908); |
| | ENST00000483832.5 (SEQ ID NO: 12910); ENST00000488901.5 (SEQ ID NO: 12912); |
| | ENST00000490642.5 (SEQ ID NO: 12914); ENST00000490743.5 (SEQ ID NO: 12916); |
| | ENST00000491308.5 (SEQ ID NO: 12918); ENST00000494995.5 (SEQ ID NO: 12920); |
| | ENST00000649846.1 (SEQ ID NO: 12922) |
| transcript | ENST00000245564.7 (SEQ ID NO: 12887); ENST00000368341.8 (SEQ ID NO: 12889); |
| | ENST00000460199.5 (SEQ ID NO: 12891); ENST00000462250.2 (SEQ ID NO: 12893); |
| | ENST00000465137.5 (SEQ ID NO: 12895); ENST00000466815.1 (SEQ ID NO: 12897); |
| | ENST00000471209.1 (SEQ ID NO: 12899); ENST00000473327.5 (SEQ ID NO: 12901); |
| | ENST00000475253.5 (SEQ ID NO: 12903); ENST00000478756.1 (SEQ ID NO: 12905); |
| | ENST00000482284.5 (SEQ ID NO: 12907); ENST00000483734.5 (SEQ ID NO: 12909); |
| | ENST00000483832.5 (SEQ ID NO: 12911); ENST00000488901.5 (SEQ ID NO: 12913); |
| | ENST00000490642.5 (SEQ ID NO: 12915); ENST00000490743.5 (SEQ ID NO: 12917); |
| | ENST00000491308.5 (SEQ ID NO: 12919); ENST00000494995.5 (SEQ ID NO: 12921); |
| | ENST00000649846.1 (SEQ ID NO: 12923) |

Target: NBEAL2

| | |
|---|---|
| pre-mRNA | ENST00000416683.5 (SEQ ID NO: 12924); ENST00000423436.1 (SEQ ID NO: 12926); |
| transcript | ENST00000441027.5 (SEQ ID NO: 12928); ENST00000443829.5 (SEQ ID NO: 12930); |
| | ENST00000450053.8 (SEQ ID NO: 15683); ENST00000461036.1 (SEQ ID NO: 12933); |
| | ENST00000469349.1 (SEQ ID NO: 12935); ENST00000475689.1 (SEQ ID NO: 12937); |
| | ENST00000476095.5 (SEQ ID NO: 12939); ENST00000477412.1 (SEQ ID NO: 12941); |
| | ENST00000486870.1 (SEQ ID NO: 12943); ENST00000651350.1 (SEQ ID NO: 12945); |
| | ENST00000651450.1 (SEQ ID NO: 12947); ENST00000651453.1 (SEQ ID NO: 12949); |
| | ENST00000651747.1 (SEQ ID NO: 12951); ENST00000652242.1 (SEQ ID NO: 12953); |
| | ENST00000652744.1; (SEQ ID NO: 12955) |
| transcript | ENST00000416683.5 (SEQ ID NO: 12925); ENST00000423436.1 (SEQ ID NO: 12927); |
| | ENST00000441027.5 (SEQ ID NO: 12929); ENST00000443829.5 (SEQ ID NO: 12931); |
| | ENST00000450053.8 (SEQ ID NO: 12932); ENST00000461036.1 (SEQ ID NO: 12934); |
| | ENST00000469349.1 (SEQ ID NO: 12936); ENST00000475689.1 (SEQ ID NO: 12938); |
| | ENST00000476095.5 (SEQ ID NO: 12940); ENST00000477412.1 (SEQ ID NO: 12942); |
| | ENST00000486870.1 (SEQ ID NO: 12944); ENST00000651350.1 (SEQ ID NO: 12946); |
| | ENST00000651450.1 (SEQ ID NO: 12948); ENST00000651453.1 (SEQ ID NO: 12950); |
| | ENST00000651747.1 (SEQ ID NO: 12952); ENST00000652242.1 (SEQ ID NO: 12954); |
| | ENST00000652744.1 (SEQ ID NO: 12956) |

Target: NLE1

| | |
|---|---|
| pre-mRNA | ENST00000360831.9 (SEQ ID NO: 12957); ENST00000442241.9 (SEQ ID NO: 12959); |
| transcript | ENST00000586869.5 (SEQ ID NO: 12961); ENST00000588019.1 (SEQ ID NO: 12963); |
| | ENST00000588642.1 (SEQ ID NO: 12965); ENST00000589367.5 (SEQ ID NO: 12967); |
| | ENST00000593176.1; (SEQ ID NO: 12969) |
| transcript | ENST00000360831.9 (SEQ ID NO: 12958); ENST00000442241.9 (SEQ ID NO: 12960); |
| | ENST00000586869.5 (SEQ ID NO: 12962); ENST00000588019.1 (SEQ ID NO: 12964); |
| | ENST00000588642.1 (SEQ ID NO: 12966); ENST00000589367.5 (SEQ ID NO: 12968); |
| | ENST00000593176.1 (SEQ ID NO: 12970) |

Target: NLRC5

| | |
|---|---|
| pre-mRNA | ENST00000262510.10 (SEQ ID NO: 15684); ENST00000399221.3 (SEQ ID NO: 12972); |
| transcript | ENST00000436936.5 (SEQ ID NO: 15685); ENST00000534927.5 (SEQ ID NO: 12975); |
| | ENST00000534931.1 (SEQ ID NO: 12977); ENST00000535284.1 (SEQ ID NO: 12979); |
| | ENST00000535658.1 (SEQ ID NO: 12981); ENST00000536231.1 (SEQ ID NO: 12983); |
| | ENST00000537056.5 (SEQ ID NO: 15686); ENST00000538059.5 (SEQ ID NO: 12986); |
| | ENST00000538110.5 (SEQ ID NO: 15687); ENST00000538273.5 (SEQ ID NO: 15688); |
| | ENST00000538453.5 (SEQ ID NO: 15689); ENST00000538778.5 (SEQ ID NO: 12991); |
| | ENST00000538805.5 (SEQ ID NO: 15690); ENST00000538930.5 (SEQ ID NO: 12994); |
| | ENST00000539144.5 (SEQ ID NO: 15691); ENST00000539881.5 (SEQ ID NO: 15692); |
| | ENST00000540182.5 (SEQ ID NO: 15693); ENST00000541020.1 (SEQ ID NO: 12999); |
| | ENST00000543030.5 (SEQ ID NO: 15694); ENST00000543049.1 (SEQ ID NO: 13002); |
| | ENST00000543103.1 (SEQ ID NO: 13004); ENST00000543141.5 (SEQ ID NO: 13006); |
| | ENST00000543402.1 (SEQ ID NO: 13008); ENST00000544189.1 (SEQ ID NO: 13010); |
| | ENST00000544641.5 (SEQ ID NO: 13012); ENST00000545081.5 (SEQ ID NO: 15695); |
| | ENST00000545349.1; (SEQ ID NO: 13015) |
| transcript | ENST00000262510.10 (SEQ ID NO: 12971); ENST00000399221.3 (SEQ ID NO: 12973); |
| | ENST00000436936.5 (SEQ ID NO: 12974); ENST00000534927.5 (SEQ ID NO: 12976); |
| | ENST00000534931.1 (SEQ ID NO: 12978); ENST00000535284.1 (SEQ ID NO: 12980); |
| | ENST00000535658.1 (SEQ ID NO: 12982); ENST00000536231.1 (SEQ ID NO: 12984); |
| | ENST00000537056.5 (SEQ ID NO: 12985); ENST00000538059.5 (SEQ ID NO: 12987); |
| | ENST00000538110.5 (SEQ ID NO: 12988); ENST00000538273.5 (SEQ ID NO: 12989); |
| | ENST00000538453.5 (SEQ ID NO: 12990); ENST00000538778.5 (SEQ ID NO: 12992); |
| | ENST00000538805.5 (SEQ ID NO: 12993); ENST00000538930.5 (SEQ ID NO: 12995); |
| | ENST00000539144.5 (SEQ ID NO: 12996); ENST00000539881.5 (SEQ ID NO: 12997); |
| | ENST00000540182.5 (SEQ ID NO: 12998); ENST00000541020.1 (SEQ ID NO: 13000); |
| | ENST00000543030.5 (SEQ ID NO: 13001); ENST00000543049.1 (SEQ ID NO: 13003); |
| | ENST00000543103.1 (SEQ ID NO: 13005); ENST00000543141.5 (SEQ ID NO: 13007); |
| | ENST00000543402.1 (SEQ ID NO: 13009); ENST00000544189.1 (SEQ ID NO: 13011); |
| | ENST00000544641.5 (SEQ ID NO: 13013); ENST00000545081.5 (SEQ ID NO: 13014); |
| | ENST00000545349.1 (SEQ ID NO: 13016) |

Target: NOM1

| | |
|---|---|
| pre-mRNA | ENST00000275820.4 (SEQ ID NO: 13017); ENST00000460332.1 (SEQ ID NO: 13019); |
| transcript | ENST00000469271.1 (SEQ ID NO: 13021); ENST00000472491.1 (SEQ ID NO: 13023); |
| | ENST00000475176.1 (SEQ ID NO: 13025); ENST00000485661.1 (SEQ ID NO: 13027); |
| | ENST00000486131.1 (SEQ ID NO: 13029); ENST00000489850.5 (SEQ ID NO: 13031) |
| transcript | ENST00000275820.4 (SEQ ID NO: 13018); ENST00000460332.1 (SEQ ID NO: 13020); |
| | ENST00000469271.1 (SEQ ID NO: 13022); ENST00000472491.1 (SEQ ID NO: 13024); |
| | ENST00000475176.1 (SEQ ID NO: 13026); ENST00000485661.1 (SEQ ID NO: 13028); |
| | ENST00000486131.1 (SEQ ID NO: 13030); ENST00000489850.5 (SEQ ID NO: 13032) |

Target: NOP58

| | |
|---|---|
| pre-mRNA | ENST00000264279.10 (SEQ ID NO: 15696); ENST00000426814.5 (SEQ ID NO: 13034); |
| transcript | ENST00000433543.2 (SEQ ID NO: 13036); ENST00000467734.5 (SEQ ID NO: 13038); |
| | ENST00000472050.5 (SEQ ID NO: 13040); ENST00000478508.1 (SEQ ID NO: 13042); |
| | ENST00000478941.1 (SEQ ID NO: 13044); ENST00000488403.5 (SEQ ID NO: 13046); |
| | ENST00000492688.5 (SEQ ID NO: 13048); ENST00000492740.5 (SEQ ID NO: 13050) |
| transcript | ENST00000264279.10 (SEQ ID NO: 13033); ENST00000426814.5 (SEQ ID NO: 13035); |
| | ENST00000433543.2 (SEQ ID NO: 13037); ENST00000467734.5 (SEQ ID NO: 13039); |
| | ENST00000472050.5 (SEQ ID NO: 13041); ENST00000478508.1 (SEQ ID NO: 13043); |
| | ENST00000478941.1 (SEQ ID NO: 13045); ENST00000488403.5 (SEQ ID NO: 13047); |
| | ENST00000492688.5 (SEQ ID NO: 13049); ENST00000492740.5 (SEQ ID NO: 13051) |

Target: NPHP1

| | |
|---|---|
| pre-mRNA | ENST00000316534.8 (SEQ ID NO: 15697); ENST00000355301.8 (SEQ ID NO: 15698); |
| transcript | ENST00000393272.7 (SEQ ID NO: 15699); ENST00000417665.5 (SEQ ID NO: 15700); |
| | ENST00000418527.1 (SEQ ID NO: 13056); ENST00000422492.1 (SEQ ID NO: 13058); |
| | ENST00000445609.6 (SEQ ID NO: 15701); ENST00000449600.1 (SEQ ID NO: 13061); |
| | ENST00000461707.5 (SEQ ID NO: 15702); ENST00000493051.1 (SEQ ID NO: 13064); |
| | ENST00000496524.5 (SEQ ID NO: 15703) |
| transcript | ENST00000316534.8 (SEQ ID NO: 13052); ENST00000355301.8 (SEQ ID NO: 13053); |
| | ENST00000393272.7 (SEQ ID NO: 13054); ENST00000417665.5 (SEQ ID NO: 13055); |
| | ENST00000418527.1 (SEQ ID NO: 13057); ENST00000422492.1 (SEQ ID NO: 13059); |
| | ENST00000445609.6 (SEQ ID NO: 13060); ENST00000449600.1 (SEQ ID NO: 13062); |
| | ENST00000461707.5 (SEQ ID NO: 13063); ENST00000493051.1 (SEQ ID NO: 13065); |
| | ENST00000496524.5 (SEQ ID NO: 13066) |

Target: NPR1

| | |
|---|---|
| pre-mRNA | ENST00000368677.2 (SEQ ID NO: 13067); ENST00000368680.4 (SEQ ID NO: 13069); |
| transcript | ENST00000413826.1 (SEQ ID NO: 13071) |
| transcript | ENST00000368677.2 (SEQ ID NO: 13068); ENST00000368680.4 (SEQ ID NO: 13070); |
| | ENST00000413826.1 (SEQ ID NO: 13072) |

Target: NUP188

| | |
|---|---|
| pre-mRNA | ENST00000372577.2 (SEQ ID NO: 15704); ENST00000464729.1 (SEQ ID NO: 13074); |
| transcript | ENST00000465344.1 (SEQ ID NO: 13076); ENST00000467044.1 (SEQ ID NO: 13078); |
| | ENST00000477069.5 (SEQ ID NO: 13080); ENST00000485158.1 (SEQ ID NO: 13082); |
| | ENST00000487952.1 (SEQ ID NO: 13084); ENST00000491502.1 (SEQ ID NO: 13086); |
| | ENST00000491990.5 (SEQ ID NO: 13088); ENST00000495726.1 (SEQ ID NO: 13090); |
| | ENST00000550219.1 (SEQ ID NO: 13092) |
| transcript | ENST00000372577.2 (SEQ ID NO: 13073); ENST00000464729.1 (SEQ ID NO: 13075); |
| | ENST00000465344.1 (SEQ ID NO: 13077); ENST00000467044.1 (SEQ ID NO: 13079); |
| | ENST00000477069.5 (SEQ ID NO: 13081); ENST00000485158.1 (SEQ ID NO: 13083); |
| | ENST00000487952.1 (SEQ ID NO: 13085); ENST00000491502.1 (SEQ ID NO: 13087); |
| | ENST00000491990.5 (SEQ ID NO: 13089); ENST00000495726.1 (SEQ ID NO: 13091); |
| | ENST00000550219.1 (SEQ ID NO: 13093) |

Target: OSGEP

| | |
|---|---|
| pre-mRNA | ENST00000206542.9 (SEQ ID NO: 13094); ENST00000553292.1 (SEQ ID NO: 13096); |
| transcript | ENST00000553640.3 (SEQ ID NO: 13098); ENST00000554249.5 (SEQ ID NO: 13100); |
| | ENST00000554699.1 (SEQ ID NO: 13102); ENST00000554915.1 (SEQ ID NO: 13104); |
| | ENST00000555223.5 (SEQ ID NO: 13106); ENST00000555656.5 (SEQ ID NO: 13108); |
| | ENST00000555785.2 (SEQ ID NO: 13110); ENST00000556124.3 (SEQ ID NO: 13112); |
| | ENST00000556252.1 (SEQ ID NO: 13114); ENST00000556439.1; (SEQ ID NO: 13116) |
| transcript | ENST00000206542.9 (SEQ ID NO: 13095); ENST00000553292.1 (SEQ ID NO: 13097); |
| | ENST00000553640.3 (SEQ ID NO: 13099); ENST00000554249.5 (SEQ ID NO: 13101); |
| | ENST00000554699.1 (SEQ ID NO: 13103); ENST00000554915.1 (SEQ ID NO: 13105); |
| | ENST00000555223.5 (SEQ ID NO: 13107); ENST00000555656.5 (SEQ ID NO: 13109); |
| | ENST00000555785.2 (SEQ ID NO: 13111); ENST00000556124.3 (SEQ ID NO: 13113); |
| | ENST00000556252.1 (SEQ ID NO: 13115); ENST00000556439.1 (SEQ ID NO: 13117) |

Target: PABPC4

| | |
|---|---|
| pre-mRNA | ENST00000372856.7 (SEQ ID NO: 13118); ENST00000372857.7 (SEQ ID NO: 13120); |
| transcript | ENST00000372858.8 (SEQ ID NO: 13122); ENST00000372862.7 (SEQ ID NO: 13124); |
| | ENST00000421687.6 (SEQ ID NO: 13126); ENST00000437136.5 (SEQ ID NO: 13128); |
| | ENST00000451091.2 (SEQ ID NO: 13130); ENST00000461578.1 (SEQ ID NO: 13132); |
| | ENST00000468476.1 (SEQ ID NO: 13134); ENST00000470443.5 (SEQ ID NO: 13136); |
| | ENST00000474378.1 (SEQ ID NO: 13138); ENST00000477556.1 (SEQ ID NO: 13140); |
| | ENST00000482028.5 (SEQ ID NO: 13142); ENST00000483770.1 (SEQ ID NO: 13144); |
| | ENST00000484555.1 (SEQ ID NO: 13146); ENST00000492468.5 (SEQ ID NO: 13148); |
| | ENST00000492519.1 (SEQ ID NO: 13150); ENST00000513632.2 (SEQ ID NO: 13152); |
| | ENST00000525045.5 (SEQ ID NO: 13154); ENST00000525669.5 (SEQ ID NO: 13156); |
| | ENST00000525751.5 (SEQ ID NO: 13158); ENST00000527718.1 (SEQ ID NO: 13160); |
| | ENST00000529216.1 (SEQ ID NO: 13162); ENST00000530186.1 (SEQ ID NO: 13164); |
| | ENST00000531243.2 (SEQ ID NO: 13166) |
| transcript | ENST00000372856.7 (SEQ ID NO: 13119); ENST00000372857.7 (SEQ ID NO: 13121); |
| | ENST00000372858.8 (SEQ ID NO: 13123); ENST00000372862.7 (SEQ ID NO: 13125); |
| | ENST00000421687.6 (SEQ ID NO: 13127); ENST00000437136.5 (SEQ ID NO: 13129); |
| | ENST00000451091.2 (SEQ ID NO: 13131); ENST00000461578.1 (SEQ ID NO: 13133); |
| | ENST00000468476.1 (SEQ ID NO: 13135); ENST00000470443.5 (SEQ ID NO: 13137); |
| | ENST00000474378.1 (SEQ ID NO: 13139); ENST00000477556.1 (SEQ ID NO: 13141); |
| | ENST00000482028.5 (SEQ ID NO: 13143); ENST00000483770.1 (SEQ ID NO: 13145); |
| | ENST00000484555.1 (SEQ ID NO: 13147); ENST00000492468.5 (SEQ ID NO: 13149); |
| | ENST00000492519.1 (SEQ ID NO: 13151); ENST00000513632.2 (SEQ ID NO: 13153); |
| | ENST00000525045.5 (SEQ ID NO: 13155); ENST00000525669.5 (SEQ ID NO: 13157); |
| | ENST00000525751.5 (SEQ ID NO: 13159); ENST00000527718.1 (SEQ ID NO: 13161); |
| | ENST00000529216.1 (SEQ ID NO: 13163); ENST00000530186.1 (SEQ ID NO: 13165); |
| | ENST00000531243.2 (SEQ ID NO: 13167) |

Target: PCOLCE

| | |
|---|---|
| pre-mRNA | ENST00000223061.6 (SEQ ID NO: 13168); ENST00000460002.1 (SEQ ID NO: 13170); |
| transcript | ENST00000462260.1 (SEQ ID NO: 13172); ENST00000468214.1 (SEQ ID NO: 13174); |
| | ENST00000472348.1 (SEQ ID NO: 13176); ENST00000482863.1 (SEQ ID NO: 13178); |
| | ENST00000486440.5 (SEQ ID NO: 13180); ENST00000487172.1 (SEQ ID NO: 13182); |
| | ENST00000490909.1 (SEQ ID NO: 13184); ENST00000496269.1 (SEQ ID NO: 13186) |
| transcript | ENST00000223061.6 (SEQ ID NO: 13169); ENST00000460002.1 (SEQ ID NO: 13171); |
| | ENST00000462260.1 (SEQ ID NO: 13173); ENST00000468214.1 (SEQ ID NO: 13175); |
| | ENST00000472348.1 (SEQ ID NO: 13177); ENST00000482863.1 (SEQ ID NO: 13179); |
| | ENST00000486440.5 (SEQ ID NO: 13181); ENST00000487172.1 (SEQ ID NO: 13183); |
| | ENST00000490909.1 (SEQ ID NO: 13185); ENST00000496269.1 (SEQ ID NO: 13187) |

Target: PHKA2

| | |
|---|---|
| pre-mRNA | ENST00000379942.5 (SEQ ID NO: 15705); ENST00000464455.1 (SEQ ID NO: 13189); |
| transcript | ENST00000469485.5 (SEQ ID NO: 13191); ENST00000469645.5 (SEQ ID NO: 13193); |
| | ENST00000473597.1 (SEQ ID NO: 13195); ENST00000473739.5 (SEQ ID NO: 13197); |
| | ENST00000481718.1 (SEQ ID NO: 13199); ENST00000486231.2 (SEQ ID NO: 13201) |
| transcript | ENST00000379942.5 (SEQ ID NO: 13188); ENST00000464455.1 (SEQ ID NO: 13190); |
| | ENST00000469485.5 (SEQ ID NO: 13192); ENST00000469645.5 (SEQ ID NO: 13194); |
| | ENST00000473597.1 (SEQ ID NO: 13196); ENST00000473739.5 (SEQ ID NO: 13198); |
| | ENST00000481718.1 (SEQ ID NO: 13200); ENST00000486231.2 (SEQ ID NO: 13202) |

Target: PIDD1

| | |
|---|---|
| pre-mRNA | ENST00000347755.10 (SEQ ID NO: 13203); ENST00000411829.6 (SEQ ID NO: 13205); |
| transcript | ENST00000524486.5 (SEQ ID NO: 13207); ENST00000525028.6 (SEQ ID NO: 13209); |
| | ENST00000527357.5 (SEQ ID NO: 13211); ENST00000527812.1 (SEQ ID NO: 13213); |
| | ENST00000528122.1 (SEQ ID NO: 13215); ENST00000530911.1 (SEQ ID NO: 13217); |
| | ENST00000531286.5 (SEQ ID NO: 13219); ENST00000534525.5 (SEQ ID NO: 13221); |
| | ENST00000534649.1 (SEQ ID NO: 13223) |
| transcript | ENST00000347755.10 (SEQ ID NO: 13204); ENST00000411829.6 (SEQ ID NO: 13206); |
| | ENST00000524486.5 (SEQ ID NO: 13208); ENST00000525028.6 (SEQ ID NO: 13210); |
| | ENST00000527357.5 (SEQ ID NO: 13212); ENST00000527812.1 (SEQ ID NO: 13214); |
| | ENST00000528122.1 (SEQ ID NO: 13216); ENST00000530911.1 (SEQ ID NO: 13218); |
| | ENST00000531286.5 (SEQ ID NO: 13220); ENST00000534525.5 (SEQ ID NO: 13222); |
| | ENST00000534649.1 (SEQ ID NO: 13224) |

Target: PKD1

| | |
|---|---|
| pre-mRNA | ENST00000262304.9 (SEQ ID NO: 15706); ENST00000415938.7 (SEQ ID NO: 13226); |
| transcript | ENST00000423118.5 (SEQ ID NO: 15707); ENST00000468674.5 (SEQ ID NO: 13229); |
| | ENST00000469241.2 (SEQ ID NO: 13231); ENST00000469851.1 (SEQ ID NO: 13233); |
| | ENST00000471603.6 (SEQ ID NO: 13235); ENST00000472577.1 (SEQ ID NO: 13237); |
| | ENST00000472659.1 (SEQ ID NO: 13239); ENST00000473780.2 (SEQ ID NO: 13241); |
| | ENST00000474088.1 (SEQ ID NO: 13243); ENST00000475889.1 (SEQ ID NO: 13245); |
| | ENST00000480227.5 (SEQ ID NO: 13247); ENST00000483024.1 (SEQ ID NO: 13249); |
| | ENST00000483558.5 (SEQ ID NO: 13251); ENST00000483731.5 (SEQ ID NO: 13253); |
| | ENST00000483814.1 (SEQ ID NO: 13255); ENST00000485120.1 (SEQ ID NO: 13257); |
| | ENST00000486339.6 (SEQ ID NO: 13259); ENST00000487932.5 (SEQ ID NO: 13261); |
| | ENST00000488185.2 (SEQ ID NO: 13263); ENST00000496574.6 (SEQ ID NO: 13265); |
| | ENST00000561668.5 (SEQ ID NO: 13267); ENST00000561991.5 (SEQ ID NO: 13269); |
| | ENST00000562297.5 (SEQ ID NO: 13271); ENST00000562425.1 (SEQ ID NO: 13273); |
| | ENST00000564313.1 (SEQ ID NO: 13275); ENST00000564865.5 (SEQ ID NO: 13277); |
| | ENST00000564890.1 (SEQ ID NO: 13279); ENST00000565639.6 (SEQ ID NO: 13281); |
| | ENST00000566784.5 (SEQ ID NO: 13283); ENST00000566905.5 (SEQ ID NO: 13285); |
| | ENST00000567355.1 (SEQ ID NO: 13287); ENST00000567946.1 (SEQ ID NO: 13289); |
| | ENST00000568591.5 (SEQ ID NO: 13291); ENST00000568796.1 (SEQ ID NO: 13293); |
| | ENST00000569983.5 (SEQ ID NO: 13295); ENST00000570150.1 (SEQ ID NO: 13297); |
| | ENST00000570193.5 (SEQ ID NO: 13299); ENST00000570253.5 (SEQ ID NO: 13301) |
| transcript | ENST00000262304.9 (SEQ ID NO: 13225); ENST00000415938.7 (SEQ ID NO: 13227); |
| | ENST00000423118.5 (SEQ ID NO: 13228); ENST00000468674.5 (SEQ ID NO: 13230); |
| | ENST00000469241.2 (SEQ ID NO: 13232); ENST00000469851.1 (SEQ ID NO: 13234); |
| | ENST00000471603.6 (SEQ ID NO: 13236); ENST00000472577.1 (SEQ ID NO: 13238); |
| | ENST00000472659.1 (SEQ ID NO: 13240); ENST00000473780.2 (SEQ ID NO: 13242); |
| | ENST00000474088.1 (SEQ ID NO: 13244); ENST00000475889.1 (SEQ ID NO: 13246); |
| | ENST00000480227.5 (SEQ ID NO: 13248); ENST00000483024.1 (SEQ ID NO: 13250); |
| | ENST00000483558.5 (SEQ ID NO: 13252); ENST00000483731.5 (SEQ ID NO: 13254); |
| | ENST00000483814.1 (SEQ ID NO: 13256); ENST00000485120.1 (SEQ ID NO: 13258); |
| | ENST00000486339.6 (SEQ ID NO: 13260); ENST00000487932.5 (SEQ ID NO: 13262); |
| | ENST00000488185.2 (SEQ ID NO: 13264); ENST00000496574.6 (SEQ ID NO: 13266); |
| | ENST00000561668.5 (SEQ ID NO: 13268); ENST00000561991.5 (SEQ ID NO: 13270); |
| | ENST00000562297.5 (SEQ ID NO: 13272); ENST00000562425.1 (SEQ ID NO: 13274); |
| | ENST00000564313.1 (SEQ ID NO: 13276); ENST00000564865.5 (SEQ ID NO: 13278); |
| | ENST00000564890.1 (SEQ ID NO: 13280); ENST00000565639.6 (SEQ ID NO: 13282); |
| | ENST00000566784.5 (SEQ ID NO: 13284); ENST00000566905.5 (SEQ ID NO: 13286); |
| | ENST00000567355.1 (SEQ ID NO: 13288); ENST00000567946.1 (SEQ ID NO: 13290); |
| | ENST00000568591.5 (SEQ ID NO: 13292); ENST00000568796.1 (SEQ ID NO: 13294); |
| | ENST00000569983.5 (SEQ ID NO: 13296); ENST00000570150.1 (SEQ ID NO: 13298); |
| | ENST00000570193.5 (SEQ ID NO: 13300); ENST00000570253.5 (SEQ ID NO: 13302) |

Target: PLA2G6

| | |
|---|---|
| pre-mRNA | ENST00000332509.8 (SEQ ID NO: 15708); ENST00000335539.7 (SEQ ID NO: 15709); |
| transcript | ENST00000402064.5 (SEQ ID NO: 15710); ENST00000417303.6 (SEQ ID NO: 15711); |
| | ENST00000420435.5 (SEQ ID NO: 15712); ENST00000426674.1 (SEQ ID NO: 15713); |
| | ENST00000427114.6 (SEQ ID NO: 15714); ENST00000427453.5 (SEQ ID NO: 13310); |
| | ENST00000430886.5 (SEQ ID NO: 15715); ENST00000435484.5 (SEQ ID NO: 15716); |
| | ENST00000436218.6 (SEQ ID NO: 15717); ENST00000445591.5 (SEQ ID NO: 13315); |
| | ENST00000447598.6 (SEQ ID NO: 15718); ENST00000448094.5 (SEQ ID NO: 13318); |
| | ENST00000452542.5 (SEQ ID NO: 13320); ENST00000452794.5 (SEQ ID NO: 13322); |
| | ENST00000452972.1 (SEQ ID NO: 13324); ENST00000454670.1 (SEQ ID NO: 13326); |
| | ENST00000455341.2 (SEQ ID NO: 15719); ENST00000463287.1 (SEQ ID NO: 13329); |
| | ENST00000471636.5 (SEQ ID NO: 15720); ENST00000479641.5 (SEQ ID NO: 13332); |
| | ENST00000480154.1 (SEQ ID NO: 13334); ENST00000490473.1 (SEQ ID NO: 13336); |
| | ENST00000491986.1 (SEQ ID NO: 13338); ENST00000496409.1 (SEQ ID NO: 13340); |
| | ENST00000498338.1 (SEQ ID NO: 13342); ENST00000594306.1 (SEQ ID NO: 15721); |
| | ENST00000655142.1 (SEQ ID NO: 15722); ENST00000660610.1 (SEQ ID NO: 15723); |
| | ENST00000663895.1 (SEQ ID NO: 15724); ENST00000664587.1 (SEQ ID NO: 15725); |
| | ENST00000665987.1 (SEQ ID NO: 15726); ENST00000667521.1 (SEQ ID NO: 15727); |
| | ENST00000668208.1 (SEQ ID NO: 15728); ENST00000668499.1 (SEQ ID NO: 15729); |
| | ENST00000668949.1 (SEQ ID NO: 15730); ENST00000671093.1 (SEQ ID NO: 15731); |
| | ENST00000673413.1 (SEQ ID NO: 15732) |
| transcript | ENST00000332509.8 (SEQ ID NO: 13303); ENST00000335539.7 (SEQ ID NO: 13304); |
| | ENST00000402064.5 (SEQ ID NO: 13305); ENST00000417303.6 (SEQ ID NO: 13306); |
| | ENST00000420435.5 (SEQ ID NO: 13307); ENST00000426674.1 (SEQ ID NO: 13308); |
| | ENST00000427114.6 (SEQ ID NO: 13309); ENST00000427453.5 (SEQ ID NO: 13311); |
| | ENST00000430886.5 (SEQ ID NO: 13312); ENST00000435484.5 (SEQ ID NO: 13313); |
| | ENST00000436218.6 (SEQ ID NO: 13314); ENST00000445591.5 (SEQ ID NO: 13316); |
| | ENST00000447598.6 (SEQ ID NO: 13317); ENST00000448094.5 (SEQ ID NO: 13319); |
| | ENST00000452542.5 (SEQ ID NO: 13321); ENST00000452794.5 (SEQ ID NO: 13323); |
| | ENST00000452972.1 (SEQ ID NO: 13325); ENST00000454670.1 (SEQ ID NO: 13327); |
| | ENST00000455341.2 (SEQ ID NO: 13328); ENST00000463287.1 (SEQ ID NO: 13330); |
| | ENST00000471636.5 (SEQ ID NO: 13331); ENST00000479641.5 (SEQ ID NO: 13333); |
| | ENST00000480154.1 (SEQ ID NO: 13335); ENST00000490473.1 (SEQ ID NO: 13337); |
| | ENST00000491986.1 (SEQ ID NO: 13339); ENST00000496409.1 (SEQ ID NO: 13341); |
| | ENST00000498338.1 (SEQ ID NO: 13343); ENST00000594306.1 (SEQ ID NO: 13344); |
| | ENST00000655142.1 (SEQ ID NO: 13345); ENST00000660610.1 (SEQ ID NO: 13346); |
| | ENST00000663895.1 (SEQ ID NO: 13347); ENST00000664587.1 (SEQ ID NO: 13348); |
| | ENST00000665987.1 (SEQ ID NO: 13349); ENST00000667521.1 (SEQ ID NO: 13350); |
| | ENST00000668208.1 (SEQ ID NO: 13351); ENST00000668499.1 (SEQ ID NO: 13352); |
| | ENST00000668949.1 (SEQ ID NO: 13353); ENST00000671093.1 (SEQ ID NO: 13354); |
| | ENST00000673413.1 (SEQ ID NO: 13355) |

Target: PLD2

| | |
|---|---|
| pre-mRNA | ENST00000263088.11 (SEQ ID NO: 13356); ENST00000571273.5 (SEQ ID NO: 13358); |
| transcript | ENST00000572127.1 (SEQ ID NO: 13360); ENST00000572199.1 (SEQ ID NO: 13362); |
| | ENST00000572940.5 (SEQ ID NO: 13364); ENST00000573258.1 (SEQ ID NO: 13366); |
| | ENST00000574268.1 (SEQ ID NO: 13368); ENST00000574796.1 (SEQ ID NO: 13370); |
| | ENST00000575246.6 (SEQ ID NO: 13372); ENST00000575316.1 (SEQ ID NO: 13374); |
| | ENST00000575813.5 (SEQ ID NO: 13376); ENST00000575945.1 (SEQ ID NO: 13378); |
| | ENST00000576329.1 (SEQ ID NO: 13380); ENST00000576864.1 (SEQ ID NO: 13382); |
| | ENST00000576983.5 (SEQ ID NO: 13384) |
| transcript | ENST00000263088.11 (SEQ ID NO: 13357); ENST00000571273.5 (SEQ ID NO: 13359); |
| | ENST00000572127.1 (SEQ ID NO: 13361); ENST00000572199.1 (SEQ ID NO: 13363); |
| | ENST00000572940.5 (SEQ ID NO: 13365); ENST00000573258.1 (SEQ ID NO: 13367); |
| | ENST00000574268.1 (SEQ ID NO: 13369); ENST00000574796.1 (SEQ ID NO: 13371); |
| | ENST00000575246.6 (SEQ ID NO: 13373); ENST00000575316.1 (SEQ ID NO: 13375); |
| | ENST00000575813.5 (SEQ ID NO: 13377); ENST00000575945.1 (SEQ ID NO: 13379); |
| | ENST00000576329.1 (SEQ ID NO: 13381); ENST00000576864.1 (SEQ ID NO: 13383); |
| | ENST00000576983.5 (SEQ ID NO: 13385) |

Target: PLEKHG5

| | |
|---|---|
| pre-mRNA | ENST00000340850.9 (SEQ ID NO: 13386); ENST00000377725.5 (SEQ ID NO: 13388); |
| transcript | ENST00000377728.7 (SEQ ID NO: 13390); ENST00000377732.5 (SEQ ID NO: 13392); |
| | ENST00000377740.4 (SEQ ID NO: 15733); ENST00000377748.5 (SEQ ID NO: 15734); |
| | ENST00000400913.5 (SEQ ID NO: 13396); ENST00000400915.7 (SEQ ID NO: 15735); |
| | ENST00000487949.4 (SEQ ID NO: 13399); ENST00000489097.5 (SEQ ID NO: 13401); |
| | ENST00000535355.5 (SEQ ID NO: 13403); ENST00000537245.5 (SEQ ID NO: 15736); |
| | ENST00000673471.1 (SEQ ID NO: 15737) |
| transcript | ENST00000340850.9 (SEQ ID NO: 13387); ENST00000377725.5 (SEQ ID NO: 13389); |
| | ENST00000377728.7 (SEQ ID NO: 13391); ENST00000377732.5 (SEQ ID NO: 13393); |
| | ENST00000377740.4 (SEQ ID NO: 13394); ENST00000377748.5 (SEQ ID NO: 13395); |
| | ENST00000400913.5 (SEQ ID NO: 13397); ENST00000400915.7 (SEQ ID NO: 13398); |
| | ENST00000487949.4 (SEQ ID NO: 13400); ENST00000489097.5 (SEQ ID NO: 13402); |
| | ENST00000535355.5 (SEQ ID NO: 13404); ENST00000537245.5 (SEQ ID NO: 13405); |
| | ENST00000673471.1 (SEQ ID NO: 13406) |

Target: PNPO

| | |
|---|---|
| pre-mRNA | ENST00000225573.5 (SEQ ID NO: 13407); ENST00000434554.7 (SEQ ID NO: 13409); |
| transcript | ENST00000582171.6 (SEQ ID NO: 13411); ENST00000583245.6 (SEQ ID NO: 13413); |
| | ENST00000583599.6 (SEQ ID NO: 13415); ENST00000584061.6 (SEQ ID NO: 13417); |
| | ENST00000584806.2 (SEQ ID NO: 13419); ENST00000585320.5 (SEQ ID NO: 13421); |
| | ENST00000641285.1 (SEQ ID NO: 13423); ENST00000641305.1 (SEQ ID NO: 13425); |
| | ENST00000641323.1 (SEQ ID NO: 13427); ENST00000641427.1 (SEQ ID NO: 13429); |
| | ENST00000641511.1 (SEQ ID NO: 13431); ENST00000641703.1 (SEQ ID NO: 13433); |
| | ENST00000641709.1 (SEQ ID NO: 13435); ENST00000641856.1 (SEQ ID NO: 13437); |
| | ENST00000642017.1; (SEQ ID NO: 13439) |
| transcript | ENST00000225573.5 (SEQ ID NO: 13408); ENST00000434554.7 (SEQ ID NO: 13410); |
| | ENST00000582171.6 (SEQ ID NO: 13412); ENST00000583245.6 (SEQ ID NO: 13414); |
| | ENST00000583599.6 (SEQ ID NO: 13416); ENST00000584061.6 (SEQ ID NO: 13418); |
| | ENST00000584806.2 (SEQ ID NO: 13420); ENST00000585320.5 (SEQ ID NO: 13422); |
| | ENST00000641285.1 (SEQ ID NO: 13424); ENST00000641305.1 (SEQ ID NO: 13426); |
| | ENST00000641323.1 (SEQ ID NO: 13428); ENST00000641427.1 (SEQ ID NO: 13430); |
| | ENST00000641511.1 (SEQ ID NO: 13432); ENST00000641703.1 (SEQ ID NO: 13434); |
| | ENST00000641709.1 (SEQ ID NO: 13436); ENST00000641856.1 (SEQ ID NO: 13438); |
| | ENST00000642017.1 (SEQ ID NO: 13440) |

Target: POLE

| | |
|---|---|
| pre-mRNA | ENST00000320574.10 (SEQ ID NO: 15738); ENST00000416953.2 (SEQ ID NO: 13442); |
| transcript | ENST00000434528.4 (SEQ ID NO: 13444); ENST00000441786.3 (SEQ ID NO: 13446); |
| | ENST00000503265.4 (SEQ ID NO: 13448); ENST00000534922.5 (SEQ ID NO: 13450); |
| | ENST00000535270.5 (SEQ ID NO: 15739); ENST00000535934.2 (SEQ ID NO: 13453); |
| | ENST00000536445.5 (SEQ ID NO: 13455); ENST00000537064.5 (SEQ ID NO: 15740); |
| | ENST00000538196.1 (SEQ ID NO: 13458); ENST00000539215.5 (SEQ ID NO: 13460); |
| | ENST00000539357.1 (SEQ ID NO: 13462); ENST00000539618.1 (SEQ ID NO: 13464); |
| | ENST00000540987.1 (SEQ ID NO: 13466); ENST00000541213.5 (SEQ ID NO: 13468); |
| | ENST00000541627.2 (SEQ ID NO: 13470); ENST00000544414.1 (SEQ ID NO: 13472); |
| | ENST00000544692.5 (SEQ ID NO: 13474); ENST00000544870.5 (SEQ ID NO: 13476); |
| | ENST00000545015.1 (SEQ ID NO: 13478); ENST00000672002.1 (SEQ ID NO: 15741); |
| | ENST00000672742.1; (SEQ ID NO: 15742) |
| transcript | ENST00000320574.10 (SEQ ID NO: 13441); ENST00000416953.2 (SEQ ID NO: 13443); |
| | ENST00000434528.4 (SEQ ID NO: 13445); ENST00000441786.3 (SEQ ID NO: 13447); |
| | ENST00000503265.4 (SEQ ID NO: 13449); ENST00000534922.5 (SEQ ID NO: 13451); |
| | ENST00000535270.5 (SEQ ID NO: 13452); ENST00000535934.2 (SEQ ID NO: 13454); |
| | ENST00000536445.5 (SEQ ID NO: 13456); ENST00000537064.5 (SEQ ID NO: 13457); |
| | ENST00000538196.1 (SEQ ID NO: 13459); ENST00000539215.5 (SEQ ID NO: 13461); |
| | ENST00000539357.1 (SEQ ID NO: 13463); ENST00000539618.1 (SEQ ID NO: 13465); |
| | ENST00000540987.1 (SEQ ID NO: 13467); ENST00000541213.5 (SEQ ID NO: 13469); |
| | ENST00000541627.2 (SEQ ID NO: 13471); ENST00000544414.1 (SEQ ID NO: 13473); |
| | ENST00000544692.5 (SEQ ID NO: 13475); ENST00000544870.5 (SEQ ID NO: 13477); |
| | ENST00000545015.1 (SEQ ID NO: 13479); ENST00000672002.1 (SEQ ID NO: 13480); |
| | ENST00000672742.1 (SEQ ID NO: 13481) |

Target: PON2

| | |
|---|---|
| pre-mRNA | ENST00000222572.8 (SEQ ID NO: 15743); ENST00000433091.6 (SEQ ID NO: 15744); |
| transcript | ENST00000446142.5 (SEQ ID NO: 13484); ENST00000455123.5 (SEQ ID NO: 15745); |
| | ENST00000459842.1 (SEQ ID NO: 13487); ENST00000460873.5 (SEQ ID NO: 13489); |
| | ENST00000469716.1 (SEQ ID NO: 13491); ENST00000469926.5 (SEQ ID NO: 13493); |
| | ENST00000471883.1 (SEQ ID NO: 13495); ENST00000478801.5 (SEQ ID NO: 13497); |
| | ENST00000483292.5 (SEQ ID NO: 13499); ENST00000490778.5 (SEQ ID NO: 13501); |
| | ENST00000491069.5 (SEQ ID NO: 13503); ENST00000493290.5 (SEQ ID NO: 13505); |
| | ENST00000493469.5 (SEQ ID NO: 13507); ENST00000632034.1 (SEQ ID NO: 13509); |
| | ENST00000633192.1 (SEQ ID NO: 15746); ENST00000633531.1 (SEQ ID NO: 15747) |
| transcript | ENST00000222572.8 (SEQ ID NO: 13482); ENST00000433091.6 (SEQ ID NO: 13483); |
| | ENST00000446142.5 (SEQ ID NO: 13485); ENST00000455123.5 (SEQ ID NO: 13486); |
| | ENST00000459842.1 (SEQ ID NO: 13488); ENST00000460873.5 (SEQ ID NO: 13490); |
| | ENST00000469716.1 (SEQ ID NO: 13492); ENST00000469926.5 (SEQ ID NO: 13494); |
| | ENST00000471883.1 (SEQ ID NO: 13496); ENST00000478801.5 (SEQ ID NO: 13498); |
| | ENST00000483292.5 (SEQ ID NO: 13500); ENST00000490778.5 (SEQ ID NO: 13502); |
| | ENST00000491069.5 (SEQ ID NO: 13504); ENST00000493290.5 (SEQ ID NO: 13506); |
| | ENST00000493469.5 (SEQ ID NO: 13508); ENST00000632034.1 (SEQ ID NO: 13510); |
| | ENST00000633192.1 (SEQ ID NO: 13511); ENST00000633531.1 (SEQ ID NO: 13512) |

Target: PRMT7

| | |
|---|---|
| pre-mRNA | ENST00000339507.9 (SEQ ID NO: 15748); ENST00000441236.2 (SEQ ID NO: 15749); |
| transcript | ENST00000449359.7 (SEQ ID NO: 15750); ENST00000561806.5 (SEQ ID NO: 13516); |
| | ENST00000562050.5 (SEQ ID NO: 13518); ENST00000562381.7 (SEQ ID NO: 13520); |
| | ENST00000562456.1 (SEQ ID NO: 13522); ENST00000563443.1 (SEQ ID NO: 13524); |
| | ENST00000563520.5 (SEQ ID NO: 13526); ENST00000563562.5 (SEQ ID NO: 13528); |
| | ENST00000563608.2 (SEQ ID NO: 13530); ENST00000564050.6 (SEQ ID NO: 15751); |
| | ENST00000564441.5 (SEQ ID NO: 13533); ENST00000565356.5 (SEQ ID NO: 15752); |
| | ENST00000565745.5 (SEQ ID NO: 13536); ENST00000565761.1 (SEQ ID NO: 13538); |
| | ENST00000565983.5 (SEQ ID NO: 13540); ENST00000566341.5 (SEQ ID NO: 13542); |
| | ENST00000566430.2 (SEQ ID NO: 13544); ENST00000566657.5 (SEQ ID NO: 13546); |
| | ENST00000566687.1 (SEQ ID NO: 13548); ENST00000566708.1 (SEQ ID NO: 13550); |
| | ENST00000567542.5 (SEQ ID NO: 15753); ENST00000568463.1 (SEQ ID NO: 13553); |
| | ENST00000568975.5 (SEQ ID NO: 15754); ENST00000569047.7 (SEQ ID NO: 13556); |
| | ENST00000569571.5 (SEQ ID NO: 13558) |
| transcript | ENST00000339507.9 (SEQ ID NO: 13513); ENST00000441236.2 (SEQ ID NO: 13514); |
| | ENST00000449359.7 (SEQ ID NO: 13515); ENST00000561806.5 (SEQ ID NO: 13517); |
| | ENST00000562050.5 (SEQ ID NO: 13519); ENST00000562381.7 (SEQ ID NO: 13521); |
| | ENST00000562456.1 (SEQ ID NO: 13523); ENST00000563443.1 (SEQ ID NO: 13525); |
| | ENST00000563520.5 (SEQ ID NO: 13527); ENST00000563562.5 (SEQ ID NO: 13529); |
| | ENST00000563608.2 (SEQ ID NO: 13531); ENST00000564050.6 (SEQ ID NO: 13532); |
| | ENST00000564441.5 (SEQ ID NO: 13534); ENST00000565356.5 (SEQ ID NO: 13535); |
| | ENST00000565745.5 (SEQ ID NO: 13537); ENST00000565761.1 (SEQ ID NO: 13539); |
| | ENST00000565983.5 (SEQ ID NO: 13541); ENST00000566341.5 (SEQ ID NO: 13543); |
| | ENST00000566430.2 (SEQ ID NO: 13545); ENST00000566657.5 (SEQ ID NO: 13547); |
| | ENST00000566687.1 (SEQ ID NO: 13549); ENST00000566708.1 (SEQ ID NO: 13551); |
| | ENST00000567542.5 (SEQ ID NO: 13552); ENST00000568463.1 (SEQ ID NO: 13554); |
| | ENST00000568975.5 (SEQ ID NO: 13555); ENST00000569047.7 (SEQ ID NO: 13557); |
| | ENST00000569571.5 (SEQ ID NO: 13559) |

Target: PRODH

| | |
|---|---|
| pre-mRNA | ENST00000313755.9 (SEQ ID NO: 13560); ENST00000334029.6 (SEQ ID NO: 13562); |
| transcript | ENST00000357068.10 (SEQ ID NO: 13564); ENST00000399694.1 (SEQ ID NO: 13566); |
| | ENST00000420436.5 (SEQ ID NO: 13568); ENST00000429300.5 (SEQ ID NO: 13570); |
| | ENST00000438924.5 (SEQ ID NO: 13572); ENST00000446371.1 (SEQ ID NO: 13574); |
| | ENST00000450579.1 (SEQ ID NO: 13576); ENST00000457083.1 (SEQ ID NO: 13578); |
| | ENST00000482858.5 (SEQ ID NO: 13580); ENST00000491604.5 (SEQ ID NO: 13582); |
| | ENST00000496625.1 (SEQ ID NO: 13584); ENST00000609229.1 (SEQ ID NO: 13586); |
| | ENST00000610940.4; (SEQ ID NO: 13588) |
| transcript | ENST00000313755.9 (SEQ ID NO: 13561); ENST00000334029.6 (SEQ ID NO: 13563); |
| | ENST00000357068.10 (SEQ ID NO: 13565); ENST00000399694.1 (SEQ ID NO: 13567); |
| | ENST00000420436.5 (SEQ ID NO: 13569); ENST00000429300.5 (SEQ ID NO: 13571); |
| | ENST00000438924.5 (SEQ ID NO: 13573); ENST00000446371.1 (SEQ ID NO: 13575); |
| | ENST00000450579.1 (SEQ ID NO: 13577); ENST00000457083.1 (SEQ ID NO: 13579); |
| | ENST00000482858.5 (SEQ ID NO: 13581); ENST00000491604.5 (SEQ ID NO: 13583); |
| | ENST00000496625.1 (SEQ ID NO: 13585); ENST00000609229.1 (SEQ ID NO: 13587); |
| | ENST00000610940.4 (SEQ ID NO: 13589) |

Target: PRPF3

| | |
|---|---|
| pre-mRNA | ENST00000324862.7 (SEQ ID NO: 15755); ENST00000467329.5 (SEQ ID NO: 13591); |
| transcript | ENST00000467514.1 (SEQ ID NO: 13593); ENST00000470824.1 (SEQ ID NO: 13595); |
| | ENST00000476970.1 (SEQ ID NO: 13597); ENST00000493553.1 (SEQ ID NO: 13599); |
| | ENST00000496202.5; (SEQ ID NO: 13601) |
| transcript | ENST00000324862.7 (SEQ ID NO: 13590); ENST00000467329.5 (SEQ ID NO: 13592); |
| | ENST00000467514.1 (SEQ ID NO: 13594); ENST00000470824.1 (SEQ ID NO: 13596); |
| | ENST00000476970.1 (SEQ ID NO: 13598); ENST00000493553.1 (SEQ ID NO: 13600); |
| | ENST00000496202.5 (SEQ ID NO: 13602) |

Target: PRPF4

| | |
|---|---|
| pre-mRNA | ENST00000374198.4 (SEQ ID NO: 13603); ENST00000374199.8 (SEQ ID NO: 13605); |
| transcript | ENST00000488937.1; (SEQ ID NO: 13607) |
| transcript | ENST00000374198.4 (SEQ ID NO: 13604); ENST00000374199.8 (SEQ ID NO: 13606); |
| | ENST00000488937.1 (SEQ ID NO: 13608) |

Target: PYCR1

| | |
|---|---|
| pre-mRNA | ENST00000329875.13 (SEQ ID NO: 13609); ENST00000337943.9 (SEQ ID NO: 13611); |
| transcript | ENST00000402252.6 (SEQ ID NO: 13613); ENST00000403172.8 (SEQ ID NO: 13615); |
| | ENST00000405481.8 (SEQ ID NO: 13617); ENST00000577624.5 (SEQ ID NO: 13619); |
| | ENST00000577756.5 (SEQ ID NO: 13621); ENST00000579366.5 (SEQ ID NO: 13623); |
| | ENST00000579698.5 (SEQ ID NO: 13625); ENST00000581271.5 (SEQ ID NO: 13627); |
| | ENST00000582198.5 (SEQ ID NO: 13629); ENST00000583564.5 (SEQ ID NO: 13631); |
| | ENST00000584848.5 (SEQ ID NO: 13633); ENST00000585215.5 (SEQ ID NO: 13635); |
| | ENST00000585244.1 (SEQ ID NO: 13637); ENST00000619204.4 (SEQ ID NO: 13639); |
| | ENST00000629768.2 (SEQ ID NO: 13641) |
| transcript | ENST00000329875.13 (SEQ ID NO: 13610); ENST00000337943.9 (SEQ ID NO: 13612); |
| | ENST00000402252.6 (SEQ ID NO: 13614); ENST00000403172.8 (SEQ ID NO: 13616); |
| | ENST00000405481.8 (SEQ ID NO: 13618); ENST00000577624.5 (SEQ ID NO: 13620); |
| | ENST00000577756.5 (SEQ ID NO: 13622); ENST00000579366.5 (SEQ ID NO: 13624); |
| | ENST00000579698.5 (SEQ ID NO: 13626); ENST00000581271.5 (SEQ ID NO: 13628); |
| | ENST00000582198.5 (SEQ ID NO: 13630); ENST00000583564.5 (SEQ ID NO: 13632); |
| | ENST00000584848.5 (SEQ ID NO: 13634); ENST00000585215.5 (SEQ ID NO: 13636); |
| | ENST00000585244.1 (SEQ ID NO: 13638); ENST00000619204.4 (SEQ ID NO: 13640); |
| | ENST00000629768.2 (SEQ ID NO: 13642) |

Target: RAD52

| | |
|---|---|
| pre-mRNA | ENST00000228345.9 (SEQ ID NO: 13643); ENST00000358495.8 (SEQ ID NO: 15756); |
| transcript | ENST00000397230.6 (SEQ ID NO: 13646); ENST00000430095.6 (SEQ ID NO: 15757); |
| | ENST00000461568.5 (SEQ ID NO: 15758); ENST00000463750.5 (SEQ ID NO: 15759); |
| | ENST00000468231.5 (SEQ ID NO: 15760); ENST00000481052.5 (SEQ ID NO: 15761); |
| | ENST00000488642.6 (SEQ ID NO: 15762); ENST00000535376.5 (SEQ ID NO: 13654); |
| | ENST00000536177.5 (SEQ ID NO: 15763); ENST00000541619.1 (SEQ ID NO: 13657); |
| | ENST00000542297.1 (SEQ ID NO: 13659); ENST00000542584.5 (SEQ ID NO: 15764); |
| | ENST00000542785.5 (SEQ ID NO: 13662); ENST00000543912.5 (SEQ ID NO: 15765); |
| | ENST00000544742.5 (SEQ ID NO: 13665); ENST00000545564.5 (SEQ ID NO: 13667); |
| | ENST00000545967.1; (SEQ ID NO: 13669) |
| transcript | ENST00000228345.9 (SEQ ID NO: 13644); ENST00000358495.8 (SEQ ID NO: 13645); |
| | ENST00000397230.6 (SEQ ID NO: 13647); ENST00000430095.6 (SEQ ID NO: 13648); |
| | ENST00000461568.5 (SEQ ID NO: 13649); ENST00000463750.5 (SEQ ID NO: 13650); |
| | ENST00000468231.5 (SEQ ID NO: 13651); ENST00000481052.5 (SEQ ID NO: 13652); |
| | ENST00000488642.6 (SEQ ID NO: 13653); ENST00000535376.5 (SEQ ID NO: 13655); |
| | ENST00000536177.5 (SEQ ID NO: 13656); ENST00000541619.1 (SEQ ID NO: 13658); |
| | ENST00000542297.1 (SEQ ID NO: 13660); ENST00000542584.5 (SEQ ID NO: 13661); |
| | ENST00000542785.5 (SEQ ID NO: 13663); ENST00000543912.5 (SEQ ID NO: 13664); |
| | ENST00000544742.5 (SEQ ID NO: 13666); ENST00000545564.5 (SEQ ID NO: 13668); |
| | ENST00000545967.1 (SEQ ID NO: 13670) |

Target: REXO1

| | |
|---|---|
| pre-mRNA | ENST00000170168.9 (SEQ ID NO: 15766); ENST00000586291.1 (SEQ ID NO: 13672); |
| transcript | ENST00000586343.2 (SEQ ID NO: 13674); ENST00000587404.1 (SEQ ID NO: 13676); |
| | ENST00000587524.1 (SEQ ID NO: 13678); ENST00000588743.2 (SEQ ID NO: 13680); |
| | ENST00000590936.5 (SEQ ID NO: 13682); ENST00000643515.1 (SEQ ID NO: 13684) |
| transcript | ENST00000170168.9 (SEQ ID NO: 13671); ENST00000586291.1 (SEQ ID NO: 13673); |
| | ENST00000586343.2 (SEQ ID NO: 13675); ENST00000587404.1 (SEQ ID NO: 13677); |
| | ENST00000587524.1 (SEQ ID NO: 13679); ENST00000588743.2 (SEQ ID NO: 13681); |
| | ENST00000590936.5 (SEQ ID NO: 13683); ENST00000643515.1 (SEQ ID NO: 13685) |

Target: RFX5

| | |
|---|---|
| pre-mRNA | ENST00000290524.8 (SEQ ID NO: 13686); ENST00000368870.6 (SEQ ID NO: 13688); |
| transcript | ENST00000392746.7 (SEQ ID NO: 13690); ENST00000412774.5 (SEQ ID NO: 13692); |
| | ENST00000421986.5 (SEQ ID NO: 13694); ENST00000422595.5 (SEQ ID NO: 13696); |
| | ENST00000430227.5 (SEQ ID NO: 13698); ENST00000435314.5 (SEQ ID NO: 13700); |
| | ENST00000436271.5 (SEQ ID NO: 13702); ENST00000436637.5 (SEQ ID NO: 13704); |
| | ENST00000437327.5 (SEQ ID NO: 13706); ENST00000444392.5 (SEQ ID NO: 13708); |
| | ENST00000450506.5 (SEQ ID NO: 13710); ENST00000452456.1 (SEQ ID NO: 13712); |
| | ENST00000452671.6 (SEQ ID NO: 13714); ENST00000458484.5 (SEQ ID NO: 13716); |
| | ENST00000469513.5 (SEQ ID NO: 13718); ENST00000475144.1 (SEQ ID NO: 13720); |
| | ENST00000478564.5 (SEQ ID NO: 13722); ENST00000479681.5 (SEQ ID NO: 13724); |
| | ENST00000494217.5 (SEQ ID NO: 13726) |
| transcript | ENST00000290524.8 (SEQ ID NO: 13687); ENST00000368870.6 (SEQ ID NO: 13689); |
| | ENST00000392746.7 (SEQ ID NO: 13691); ENST00000412774.5 (SEQ ID NO: 13693); |
| | ENST00000421986.5 (SEQ ID NO: 13695); ENST00000422595.5 (SEQ ID NO: 13697); |
| | ENST00000430227.5 (SEQ ID NO: 13699); ENST00000435314.5 (SEQ ID NO: 13701); |
| | ENST00000436271.5 (SEQ ID NO: 13703); ENST00000436637.5 (SEQ ID NO: 13705); |
| | ENST00000437327.5 (SEQ ID NO: 13707); ENST00000444392.5 (SEQ ID NO: 13709); |
| | ENST00000450506.5 (SEQ ID NO: 13711); ENST00000452456.1 (SEQ ID NO: 13713); |
| | ENST00000452671.6 (SEQ ID NO: 13715); ENST00000458484.5 (SEQ ID NO: 13717); |
| | ENST00000469513.5 (SEQ ID NO: 13719); ENST00000475144.1 (SEQ ID NO: 13721); |
| | ENST00000478564.5 (SEQ ID NO: 13723); ENST00000479681.5 (SEQ ID NO: 13725); |
| | ENST00000494217.5 (SEQ ID NO: 13727) |

Target: RHBDF2

| | |
|---|---|
| pre-mRNA | ENST00000313080.8 (SEQ ID NO: 15767); ENST00000585701.5 (SEQ ID NO: 13729); |
| transcript | ENST00000585989.5 (SEQ ID NO: 13731); ENST00000587640.1 (SEQ ID NO: 13733); |
| | ENST00000589526.5 (SEQ ID NO: 13735); ENST00000589582.5 (SEQ ID NO: 13737); |
| | ENST00000590168.5 (SEQ ID NO: 13739); ENST00000590288.1 (SEQ ID NO: 13741); |
| | ENST00000590322.1 (SEQ ID NO: 13743); ENST00000591192.1 (SEQ ID NO: 13745); |
| | ENST00000591255.5 (SEQ ID NO: 13747); ENST00000591697.5 (SEQ ID NO: 13749); |
| | ENST00000591860.1 (SEQ ID NO: 13751); ENST00000591879.1 (SEQ ID NO: 13753); |
| | ENST00000591885.5 (SEQ ID NO: 15768); ENST00000592123.5 (SEQ ID NO: 13756); |
| | ENST00000592378.5 (SEQ ID NO: 13758); ENST00000593103.1 (SEQ ID NO: 13760) |
| transcript | ENST00000313080.8 (SEQ ID NO: 13728); ENST00000585701.5 (SEQ ID NO: 13730); |
| | ENST00000585989.5 (SEQ ID NO: 13732); ENST00000587640.1 (SEQ ID NO: 13734); |
| | ENST00000589526.5 (SEQ ID NO: 13736); ENST00000589582.5 (SEQ ID NO: 13738); |
| | ENST00000590168.5 (SEQ ID NO: 13740); ENST00000590288.1 (SEQ ID NO: 13742); |
| | ENST00000590322.1 (SEQ ID NO: 13744); ENST00000591192.1 (SEQ ID NO: 13746); |
| | ENST00000591255.5 (SEQ ID NO: 13748); ENST00000591697.5 (SEQ ID NO: 13750); |
| | ENST00000591860.1 (SEQ ID NO: 13752); ENST00000591879.1 (SEQ ID NO: 13754); |
| | ENST00000591885.5 (SEQ ID NO: 13755); ENST00000592123.5 (SEQ ID NO: 13757); |
| | ENST00000592378.5 (SEQ ID NO: 13759); ENST00000593103.1 (SEQ ID NO: 13761) |

Target: RMND1

| | |
|---|---|
| pre-mRNA | ENST00000336451.8 (SEQ ID NO: 15769); ENST00000444024.3 (SEQ ID NO: 15770); |
| transcript | ENST00000491268.2 (SEQ ID NO: 13764); ENST00000622845.5 (SEQ ID NO: 15771); |
| | ENST00000643550.1 (SEQ ID NO: 13767); ENST00000643564.1 (SEQ ID NO: 13769); |
| | ENST00000644054.1 (SEQ ID NO: 15772); ENST00000644711.1 (SEQ ID NO: 15773); |
| | ENST00000645367.1 (SEQ ID NO: 15774); ENST00000645895.1 (SEQ ID NO: 15775); |
| | ENST00000645917.1 (SEQ ID NO: 13775); ENST00000646926.1 (SEQ ID NO: 15776) |
| transcript | ENST00000336451.8 (SEQ ID NO: 13762); ENST00000444024.3 (SEQ ID NO: 13763); |
| | ENST00000491268.2 (SEQ ID NO: 13765); ENST00000622845.5 (SEQ ID NO: 13766); |
| | ENST00000643550.1 (SEQ ID NO: 13768); ENST00000643564.1 (SEQ ID NO: 13770); |
| | ENST00000644054.1 (SEQ ID NO: 13771); ENST00000644711.1 (SEQ ID NO: 13772); |
| | ENST00000645367.1 (SEQ ID NO: 13773); ENST00000645895.1 (SEQ ID NO: 13774); |
| | ENST00000645917.1 (SEQ ID NO: 13776); ENST00000646926.1 (SEQ ID NO: 13777) |

Target: ROBO3

| | |
|---|---|
| pre-mRNA | ENST00000397801.6 (SEQ ID NO: 13778); ENST00000524971.1 (SEQ ID NO: 13780); |
| transcript | ENST00000525304.5 (SEQ ID NO: 13782); ENST00000525448.5 (SEQ ID NO: 13784); |
| | ENST00000525482.5 (SEQ ID NO: 13786); ENST00000526551.5 (SEQ ID NO: 13788); |
| | ENST00000527196.5 (SEQ ID NO: 13790); ENST00000527245.5 (SEQ ID NO: 13792); |
| | ENST00000528068.5 (SEQ ID NO: 13794); ENST00000528144.5 (SEQ ID NO: 13796); |
| | ENST00000528820.5 (SEQ ID NO: 13798); ENST00000529658.5 (SEQ ID NO: 13800); |
| | ENST00000530647.5 (SEQ ID NO: 13802); ENST00000531075.5 (SEQ ID NO: 13804); |
| | ENST00000531119.1 (SEQ ID NO: 13806); ENST00000531545.5 (SEQ ID NO: 13808); |
| | ENST00000531888.1 (SEQ ID NO: 13810); ENST00000532472.1 (SEQ ID NO: 13812); |
| | ENST00000534598.5 (SEQ ID NO: 13814); ENST00000538940.5 (SEQ ID NO: 13816); |
| | ENST00000543966.5; (SEQ ID NO: 13818) |
| transcript | ENST00000397801.6 (SEQ ID NO: 13779); ENST00000524971.1 (SEQ ID NO: 13781); |
| | ENST00000525304.5 (SEQ ID NO: 13783); ENST00000525448.5 (SEQ ID NO: 13785); |
| | ENST00000525482.5 (SEQ ID NO: 13787); ENST00000526551.5 (SEQ ID NO: 13789); |
| | ENST00000527196.5 (SEQ ID NO: 13791); ENST00000527245.5 (SEQ ID NO: 13793); |
| | ENST00000528068.5 (SEQ ID NO: 13795); ENST00000528144.5 (SEQ ID NO: 13797); |
| | ENST00000528820.5 (SEQ ID NO: 13799); ENST00000529658.5 (SEQ ID NO: 13801); |
| | ENST00000530647.5 (SEQ ID NO: 13803); ENST00000531075.5 (SEQ ID NO: 13805); |
| | ENST00000531119.1 (SEQ ID NO: 13807); ENST00000531545.5 (SEQ ID NO: 13809); |
| | ENST00000531888.1 (SEQ ID NO: 13811); ENST00000532472.1 (SEQ ID NO: 13813); |
| | ENST00000534598.5 (SEQ ID NO: 13815); ENST00000538940.5 (SEQ ID NO: 13817); |
| | ENST00000543966.5 (SEQ ID NO: 13819) |

Target: RPGRIP1

| | |
|---|---|
| pre-mRNA | ENST00000382933.8 (SEQ ID NO: 15777); ENST00000400017.6 (SEQ ID NO: 15778); |
| transcript | ENST00000553500.5 (SEQ ID NO: 13822); ENST00000553927.1 (SEQ ID NO: 13824); |
| | ENST00000554303.1 (SEQ ID NO: 13826); ENST00000554750.1 (SEQ ID NO: 13828); |
| | ENST00000555322.5 (SEQ ID NO: 13830); ENST00000555489.5 (SEQ ID NO: 13832); |
| | ENST00000555587.5 (SEQ ID NO: 13834); ENST00000556336.5 (SEQ ID NO: 15779); |
| | ENST00000557351.1 (SEQ ID NO: 13837); ENST00000557606.1 (SEQ ID NO: 13839); |
| | ENST00000557771.5 (SEQ ID NO: 15780) |
| transcript | ENST00000382933.8 (SEQ ID NO: 13820); ENST00000400017.6 (SEQ ID NO: 13821); |
| | ENST00000553500.5 (SEQ ID NO: 13823); ENST00000553927.1 (SEQ ID NO: 13825); |
| | ENST00000554303.1 (SEQ ID NO: 13827); ENST00000554750.1 (SEQ ID NO: 13829); |
| | ENST00000555322.5 (SEQ ID NO: 13831); ENST00000555489.5 (SEQ ID NO: 13833); |
| | ENST00000555587.5 (SEQ ID NO: 13835); ENST00000556336.5 (SEQ ID NO: 13836); |
| | ENST00000557351.1 (SEQ ID NO: 13838); ENST00000557606.1 (SEQ ID NO: 13840); |
| | ENST00000557771.5 (SEQ ID NO: 13841) |

Target: RTTN

| | |
|---|---|
| pre-mRNA | ENST00000255674.11 (SEQ ID NO: 15781); ENST00000578780.2 (SEQ ID NO: 13843); |
| transcript | ENST00000579021.1 (SEQ ID NO: 13845); ENST00000579986.6 (SEQ ID NO: 15782); |
| | ENST00000580034.2 (SEQ ID NO: 13848); ENST00000581161.5 (SEQ ID NO: 15783); |
| | ENST00000581583.1 (SEQ ID NO: 15784); ENST00000581709.1 (SEQ ID NO: 13852); |
| | ENST00000583043.5 (SEQ ID NO: 15785); ENST00000583765.1 (SEQ ID NO: 13855); |
| | ENST00000638251.1 (SEQ ID NO: 15786); ENST00000638298.1 (SEQ ID NO: 13858); |
| | ENST00000638799.1 (SEQ ID NO: 13860); ENST00000639128.1 (SEQ ID NO: 15787); |
| | ENST00000639487.1 (SEQ ID NO: 15788); ENST00000640376.1 (SEQ ID NO: 15789); |
| | ENST00000640393.1 (SEQ ID NO: 13865); ENST00000640408.1 (SEQ ID NO: 15790); |
| | ENST00000640525.1 (SEQ ID NO: 13868); ENST00000640654.1 (SEQ ID NO: 13870); |
| | ENST00000640736.1 (SEQ ID NO: 13872); ENST00000640769.2 (SEQ ID NO: 15791); |
| | ENST00000640931.1; (SEQ ID NO: 15792) |
| transcript | ENST00000255674.11 (SEQ ID NO: 13842); ENST00000578780.2 (SEQ ID NO: 13844); |
| | ENST00000579021.1 (SEQ ID NO: 13846); ENST00000579986.6 (SEQ ID NO: 13847); |
| | ENST00000580034.2 (SEQ ID NO: 13849); ENST00000581161.5 (SEQ ID NO: 13850); |
| | ENST00000581583.1 (SEQ ID NO: 13851); ENST00000581709.1 (SEQ ID NO: 13853); |
| | ENST00000583043.5 (SEQ ID NO: 13854); ENST00000583765.1 (SEQ ID NO: 13856); |
| | ENST00000638251.1 (SEQ ID NO: 13857); ENST00000638298.1 (SEQ ID NO: 13859); |
| | ENST00000638799.1 (SEQ ID NO: 13861); ENST00000639128.1 (SEQ ID NO: 13862); |
| | ENST00000639487.1 (SEQ ID NO: 13863); ENST00000640376.1 (SEQ ID NO: 13864); |
| | ENST00000640393.1 (SEQ ID NO: 13866); ENST00000640408.1 (SEQ ID NO: 13867); |
| | ENST00000640525.1 (SEQ ID NO: 13869); ENST00000640654.1 (SEQ ID NO: 13871); |
| | ENST00000640736.1 (SEQ ID NO: 13873); ENST00000640769.2 (SEQ ID NO: 13874); |
| | ENST00000640931.1 (SEQ ID NO: 13875) |

Target: RUFY3

| | |
|---|---|
| pre-mRNA | ENST00000226328.8 (SEQ ID NO: 15793); ENST00000381006.8 (SEQ ID NO: 15794); |
| transcript | ENST00000417478.6 (SEQ ID NO: 15795); ENST00000502653.5 (SEQ ID NO: 15796); |
| | ENST00000503025.5 (SEQ ID NO: 13880); ENST00000503876.5 (SEQ ID NO: 15797); |
| | ENST00000504805.6 (SEQ ID NO: 13883); ENST00000507333.5 (SEQ ID NO: 13885); |
| | ENST00000512103.5 (SEQ ID NO: 13887); ENST00000512331.5 (SEQ ID NO: 13889); |
| | ENST00000513593.1 (SEQ ID NO: 13891); ENST00000513597.5 (SEQ ID NO: 15798); |
| | ENST00000514898.1 (SEQ ID NO: 13894); ENST00000515442.1 (SEQ ID NO: 13896); |
| | ENST00000515479.5 (SEQ ID NO: 13898) |
| transcript | ENST00000226328.8 (SEQ ID NO: 13876); ENST00000381006.8 (SEQ ID NO: 13877); |
| | ENST00000417478.6 (SEQ ID NO: 13878); ENST00000502653.5 (SEQ ID NO: 13879); |
| | ENST00000503025.5 (SEQ ID NO: 13881); ENST00000503876.5 (SEQ ID NO: 13882); |
| | ENST00000504805.6 (SEQ ID NO: 13884); ENST00000507333.5 (SEQ ID NO: 13886); |
| | ENST00000512103.5 (SEQ ID NO: 13888); ENST00000512331.5 (SEQ ID NO: 13890); |
| | ENST00000513593.1 (SEQ ID NO: 13892); ENST00000513597.5 (SEQ ID NO: 13893); |
| | ENST00000514898.1 (SEQ ID NO: 13895); ENST00000515442.1 (SEQ ID NO: 13897); |
| | ENST00000515479.5 (SEQ ID NO: 13899) |

Target: SEMA3B

| | |
|---|---|
| pre-mRNA | ENST00000416295.1 (SEQ ID NO: 13900); ENST00000418576.3 (SEQ ID NO: 13902); |
| transcript | ENST00000419007.5 (SEQ ID NO: 13904); ENST00000433753.4 (SEQ ID NO: 13906); |
| | ENST00000434030.1 (SEQ ID NO: 13908); ENST00000439487.5 (SEQ ID NO: 13910); |
| | ENST00000441915.5 (SEQ ID NO: 13912); ENST00000456210.5 (SEQ ID NO: 13914); |
| | ENST00000456560.6 (SEQ ID NO: 13916); ENST00000611067.4 (SEQ ID NO: 13918); |
| | ENST00000612509.4 (SEQ ID NO: 13920); ENST00000616701.5 (SEQ ID NO: 13922); |
| | ENST00000618865.4 (SEQ ID NO: 13924); ENST00000619119.4 (SEQ ID NO: 13926); |
| | ENST00000621029.4 (SEQ ID NO: 13928) |
| transcript | ENST00000416295.1 (SEQ ID NO: 13901); ENST00000418576.3 (SEQ ID NO: 13903); |
| | ENST00000419007.5 (SEQ ID NO: 13905); ENST00000433753.4 (SEQ ID NO: 13907); |
| | ENST00000434030.1 (SEQ ID NO: 13909); ENST00000439487.5 (SEQ ID NO: 13911); |
| | ENST00000441915.5 (SEQ ID NO: 13913); ENST00000456210.5 (SEQ ID NO: 13915); |
| | ENST00000456560.6 (SEQ ID NO: 13917); ENST00000611067.4 (SEQ ID NO: 13919); |
| | ENST00000612509.4 (SEQ ID NO: 13921); ENST00000616701.5 (SEQ ID NO: 13923); |
| | ENST00000618865.4 (SEQ ID NO: 13925); ENST00000619119.4 (SEQ ID NO: 13927); |
| | ENST00000621029.4 (SEQ ID NO: 13929) |

Target: SEMA3F

| | |
|---|---|
| pre-mRNA | ENST00000002829.8 (SEQ ID NO: 15799); ENST00000413852.5 (SEQ ID NO: 15800); |
| transcript | ENST00000414301.5 (SEQ ID NO: 13932); ENST00000420831.1 (SEQ ID NO: 13934); |
| | ENST00000426511.5 (SEQ ID NO: 13936); ENST00000434342.5 (SEQ ID NO: 15801); |
| | ENST00000450338.5 (SEQ ID NO: 13939); ENST00000470737.1 (SEQ ID NO: 13941); |
| | ENST00000493743.1 (SEQ ID NO: 13943) |
| transcript | ENST00000002829.8 (SEQ ID NO: 13930); ENST00000413852.5 (SEQ ID NO: 13931); |
| | ENST00000414301.5 (SEQ ID NO: 13933); ENST00000420831.1 (SEQ ID NO: 13935); |
| | ENST00000426511.5 (SEQ ID NO: 13937); ENST00000434342.5 (SEQ ID NO: 13938); |
| | ENST00000450338.5 (SEQ ID NO: 13940); ENST00000470737.1 (SEQ ID NO: 13942); |
| | ENST00000493743.1 (SEQ ID NO: 13944) |

Target: SH2D3A

| | |
|---|---|
| pre-mRNA | ENST00000245908.11 (SEQ ID NO: 13945); ENST00000437152.7 (SEQ ID NO: 13947); |
| transcript | ENST00000595369.1 (SEQ ID NO: 13949); ENST00000595681.5 (SEQ ID NO: 13951); |
| | ENST00000597168.1 (SEQ ID NO: 13953); ENST00000597254.1 (SEQ ID NO: 13955); |
| | ENST00000597687.1 (SEQ ID NO: 13957); ENST00000599563.5 (SEQ ID NO: 13959) |
| transcript | ENST00000245908.11 (SEQ ID NO: 13946); ENST00000437152.7 (SEQ ID NO: 13948); |
| | ENST00000595369.1 (SEQ ID NO: 13950); ENST00000595681.5 (SEQ ID NO: 13952); |
| | ENST00000597168.1 (SEQ ID NO: 13954); ENST00000597254.1 (SEQ ID NO: 13956); |
| | ENST00000597687.1 (SEQ ID NO: 13958); ENST00000599563.5 (SEQ ID NO: 13960) |

Target: SIK3

| | |
|---|---|
| pre-mRNA | ENST00000375300.6 (SEQ ID NO: 15802); ENST00000413553.1 (SEQ ID NO: 15803); |
| transcript | ENST00000415541.5 (SEQ ID NO: 15804); ENST00000445177.5 (SEQ ID NO: 15805); |
| | ENST00000446921.6 (SEQ ID NO: 15806); ENST00000454905.5 (SEQ ID NO: 13966); |
| | ENST00000465421.5 (SEQ ID NO: 13968); ENST00000472648.1 (SEQ ID NO: 13970); |
| | ENST00000480222.1 (SEQ ID NO: 13972); ENST00000480468.1 (SEQ ID NO: 13974); |
| | ENST00000485363.1 (SEQ ID NO: 15807); ENST00000488337.5 (SEQ ID NO: 13977); |
| | ENST00000497049.5; (SEQ ID NO: 15808) |
| transcript | ENST00000375300.6 (SEQ ID NO: 13961); ENST00000413553.1 (SEQ ID NO: 13962); |
| | ENST00000415541.5 (SEQ ID NO: 13963); ENST00000445177.5 (SEQ ID NO: 13964); |
| | ENST00000446921.6 (SEQ ID NO: 13965); ENST00000454905.5 (SEQ ID NO: 13967); |
| | ENST00000465421.5 (SEQ ID NO: 13969); ENST00000472648.1 (SEQ ID NO: 13971); |
| | ENST00000480222.1 (SEQ ID NO: 13973); ENST00000480468.1 (SEQ ID NO: 13975); |
| | ENST00000485363.1 (SEQ ID NO: 13976); ENST00000488337.5 (SEQ ID NO: 13978); |
| | ENST00000497049.5 (SEQ ID NO: 13979) |

Target: SIRT3

| | |
|---|---|
| pre-mRNA | ENST00000382743.9 (SEQ ID NO: 13980); ENST00000524564.5 (SEQ ID NO: 13982); |
| transcript | ENST00000525237.1 (SEQ ID NO: 13984); ENST00000525319.5 (SEQ ID NO: 13986); |
| | ENST00000525776.1 (SEQ ID NO: 13988); ENST00000526854.5 (SEQ ID NO: 13990); |
| | ENST00000528469.1 (SEQ ID NO: 13992); ENST00000528702.5 (SEQ ID NO: 13994); |
| | ENST00000529055.5 (SEQ ID NO: 13996); ENST00000529382.5 (SEQ ID NO: 13998); |
| | ENST00000529937.1 (SEQ ID NO: 14000); ENST00000530067.1 (SEQ ID NO: 14002); |
| | ENST00000531753.5 (SEQ ID NO: 14004); ENST00000532837.5 (SEQ ID NO: 14006); |
| | ENST00000532956.5 (SEQ ID NO: 14008); ENST00000534381.1 (SEQ ID NO: 14010) |
| transcript | ENST00000382743.9 (SEQ ID NO: 13981); ENST00000524564.5 (SEQ ID NO: 13983); |
| | ENST00000525237.1 (SEQ ID NO: 13985); ENST00000525319.5 (SEQ ID NO: 13987); |
| | ENST00000525776.1 (SEQ ID NO: 13989); ENST00000526854.5 (SEQ ID NO: 13991); |
| | ENST00000528469.1 (SEQ ID NO: 13993); ENST00000528702.5 (SEQ ID NO: 13995); |
| | ENST00000529055.5 (SEQ ID NO: 13997); ENST00000529382.5 (SEQ ID NO: 13999); |
| | ENST00000529937.1 (SEQ ID NO: 14001); ENST00000530067.1 (SEQ ID NO: 14003); |
| | ENST00000531753.5 (SEQ ID NO: 14005); ENST00000532837.5 (SEQ ID NO: 14007); |
| | ENST00000532956.5 (SEQ ID NO: 14009); ENST00000534381.1 (SEQ ID NO: 14011) |

Target: SKTV2L

| | |
|---|---|
| pre-mRNA | ENST00000375394.7 (SEQ ID NO: 14012); ENST00000461073.5 (SEQ ID NO: 14014); |
| transcript | ENST00000461915.5 (SEQ ID NO: 14016); ENST00000465703.5 (SEQ ID NO: 14018); |
| | ENST00000466290.1 (SEQ ID NO: 14020); ENST00000470453.1 (SEQ ID NO: 14022); |
| | ENST00000471818.1 (SEQ ID NO: 14024); ENST00000474839.5 (SEQ ID NO: 14026); |
| | ENST00000483553.5 (SEQ ID NO: 14028); ENST00000484835.1 (SEQ ID NO: 14030); |
| | ENST00000485349.5 (SEQ ID NO: 14032); ENST00000488648.5 (SEQ ID NO: 14034); |
| | ENST00000491994.1 (SEQ ID NO: 14036); ENST00000492900.1 (SEQ ID NO: 14038); |
| | ENST00000494058.5 (SEQ ID NO: 14040); ENST00000628157.1 (SEQ ID NO: 14042) |
| transcript | ENST00000375394.7 (SEQ ID NO: 14013); ENST00000461073.5 (SEQ ID NO: 14015); |
| | ENST00000461915.5 (SEQ ID NO: 14017); ENST00000465703.5 (SEQ ID NO: 14019); |
| | ENST00000466290.1 (SEQ ID NO: 14021); ENST00000470453.1 (SEQ ID NO: 14023); |
| | ENST00000471818.1 (SEQ ID NO: 14025); ENST00000474839.5 (SEQ ID NO: 14027); |
| | ENST00000483553.5 (SEQ ID NO: 14029); ENST00000484835.1 (SEQ ID NO: 14031); |
| | ENST00000485349.5 (SEQ ID NO: 14033); ENST00000488648.5 (SEQ ID NO: 14035); |
| | ENST00000491994.1 (SEQ ID NO: 14037); ENST00000492900.1 (SEQ ID NO: 14039); |
| | ENST00000494058.5 (SEQ ID NO: 14041); ENST00000628157.1 (SEQ ID NO: 14043) |

Target: SLC2A13

| | |
|---|---|
| pre-mRNA | ENST00000280871.9 (SEQ ID NO: 14044); ENST00000380858.1 (SEQ ID NO: 14046); |
| transcript | ENST00000465517.1 (SEQ ID NO: 14048); ENST00000505338.1 (SEQ ID NO: 14050) |
| transcript | ENST00000280871.9 (SEQ ID NO: 14045); ENST00000380858.1 (SEQ ID NO: 14047); |
| | ENST00000465517.1 (SEQ ID NO: 14049); ENST00000505338.1 (SEQ ID NO: 14051) |

Target: SLC12A7

| | |
|---|---|
| pre-mRNA | ENST00000264930.10 (SEQ ID NO: 14052); ENST00000504576.2 (SEQ ID NO: 14054); |
| transcript | ENST00000510943.3 (SEQ ID NO: 14056); ENST00000513223.2 (SEQ ID NO: 14058); |
| | ENST00000514994.1 (SEQ ID NO: 14060); ENST00000634447.1 (SEQ ID NO: 14062) |
| transcript | ENST00000264930.10 (SEQ ID NO: 14053); ENST00000504576.2 (SEQ ID NO: 14055); |
| | ENST00000510943.3 (SEQ ID NO: 14057); ENST00000513223.2 (SEQ ID NO: 14059); |
| | ENST00000514994.1 (SEQ ID NO: 14061); ENST00000634447.1 (SEQ ID NO: 14063) |

Target: SLC22A3

| | |
|---|---|
| pre-mRNA | ENST00000275300.3 (SEQ ID NO: 14064) |
| transcript | |
| transcript | ENST00000275300.3 (SEQ ID NO: 14065) |

Target: SLC25A13

| | |
|---|---|
| pre-mRNA | ENST00000265631.9 (SEQ ID NO: 15809); ENST00000416240.6 (SEQ ID NO: 15810); |
| transcript | ENST00000472162.2 (SEQ ID NO: 15811); ENST00000484495.5 (SEQ ID NO: 14069); |
| | ENST00000487710.1 (SEQ ID NO: 14071); ENST00000490072.5 (SEQ ID NO: 15812); |
| | ENST00000492869.1 (SEQ ID NO: 14074); ENST00000494085.1 (SEQ ID NO: 14076) |
| transcript | ENST00000265631.9 (SEQ ID NO: 14066); ENST00000416240.6 (SEQ ID NO: 14067); |
| | ENST00000472162.2 (SEQ ID NO: 14068); ENST00000484495.5 (SEQ ID NO: 14070); |
| | ENST00000487710.1 (SEQ ID NO: 14072); ENST00000490072.5 (SEQ ID NO: 14073); |
| | ENST00000492869.1 (SEQ ID NO: 14075); ENST00000494085.1 (SEQ ID NO: 14077) |

Target: SLC25A37

| | |
|---|---|
| pre-mRNA | ENST00000290075.10 (SEQ ID NO: 15813); ENST00000417331.6 (SEQ ID NO: 15814); |
| transcript | ENST00000517923.1 (SEQ ID NO: 14080); ENST00000518881.5 (SEQ ID NO: 15815); |
| | ENST00000519192.1 (SEQ ID NO: 14083); ENST00000519973.6 (SEQ ID NO: 15816); |
| | ENST00000520654.1 (SEQ ID NO: 15817); ENST00000520949.1 (SEQ ID NO: 14087); |
| | ENST00000521637.1 (SEQ ID NO: 14089); ENST00000522164.5 (SEQ ID NO: 14091); |
| | ENST00000523883.5 (SEQ ID NO: 15818); ENST00000523930.1 (SEQ ID NO: 15819) |
| transcript | ENST00000290075.10 (SEQ ID NO: 14078); ENST00000417331.6 (SEQ ID NO: 14079); |
| | ENST00000517923.1 (SEQ ID NO: 14081); ENST00000518881.5 (SEQ ID NO: 14082); |
| | ENST00000519192.1 (SEQ ID NO: 14084); ENST00000519973.6 (SEQ ID NO: 14085); |
| | ENST00000520654.1 (SEQ ID NO: 14086); ENST00000520949.1 (SEQ ID NO: 14088); |
| | ENST00000521637.1 (SEQ ID NO: 14090); ENST00000522164.5 (SEQ ID NO: 14092); |
| | ENST00000523883.5 (SEQ ID NO: 14093); ENST00000523930.1 (SEQ ID NO: 14094) |

Target: SLC27A5

| | |
|---|---|
| pre-mRNA | ENST00000263093.7 (SEQ ID NO: 14095); ENST00000593745.1 (SEQ ID NO: 14097); |
| transcript | ENST00000594683.1 (SEQ ID NO: 14099); ENST00000594786.1 (SEQ ID NO: 14101); |
| | ENST00000595851.5 (SEQ ID NO: 14103); ENST00000599700.1 (SEQ ID NO: 14105); |
| | ENST00000601355.1 (SEQ ID NO: 14107); ENST00000601997.1; (SEQ ID NO: 14109) |
| transcript | ENST00000263093.7 (SEQ ID NO: 14096); ENST00000593745.1 (SEQ ID NO: 14098); |
| | ENST00000594683.1 (SEQ ID NO: 14100); ENST00000594786.1 (SEQ ID NO: 14102); |
| | ENST00000595851.5 (SEQ ID NO: 14104); ENST00000599700.1 (SEQ ID NO: 14106); |
| | ENST00000601355.1 (SEQ ID NO: 14108); ENST00000601997.1 (SEQ ID NO: 14110) |

Target: SLC30A9

| | |
|---|---|
| pre-mRNA | ENST00000264451.12 (SEQ ID NO: 14111); ENST00000505523.1 (SEQ ID NO: 14113); |
| transcript | ENST00000509683.5 (SEQ ID NO: 14115); ENST00000510460.1 (SEQ ID NO: 14117); |
| | ENST00000513699.5 (SEQ ID NO: 14119) |
| transcript | ENST00000264451.12 (SEQ ID NO: 14112); ENST00000505523.1 (SEQ ID NO: 14114); |
| | ENST00000509683.5 (SEQ ID NO: 14116); ENST00000510460.1 (SEQ ID NO: 14118); |
| | ENST00000513699.5 (SEQ ID NO: 14120) |

Target: SLC30A10

| | |
|---|---|
| pre-mRNA | ENST00000356609.2 (SEQ ID NO: 14121); ENST00000366926.3 (SEQ ID NO: 14123); |
| transcript | ENST00000484079.1 (SEQ ID NO: 14125); ENST00000484239.5 (SEQ ID NO: 14127) |
| transcript | ENST00000356609.2 (SEQ ID NO: 14122); ENST00000366926.3 (SEQ ID NO: 14124); |
| | ENST00000484079.1 (SEQ ID NO: 14126); ENST00000484239.5 (SEQ ID NO: 14128) |

Target: SMPD1

| | |
|---|---|
| pre-mRNA | ENST00000342245.9 (SEQ ID NO: 14129); ENST00000526280.1 (SEQ ID NO: 14131); |
| transcript | ENST00000527275.5 (SEQ ID NO: 14133); ENST00000530395.1 (SEQ ID NO: 14135); |
| | ENST00000531303.5 (SEQ ID NO: 14137); ENST00000531336.1 (SEQ ID NO: 14139); |
| | ENST00000532367.1 (SEQ ID NO: 14141); ENST00000533123.5 (SEQ ID NO: 14143); |
| | ENST00000533196.1 (SEQ ID NO: 14145); ENST00000534405.5 (SEQ ID NO: 14147) |
| transcript | ENST00000342245.9 (SEQ ID NO: 14130); ENST00000526280.1 (SEQ ID NO: 14132); |
| | ENST00000527275.5 (SEQ ID NO: 14134); ENST00000530395.1 (SEQ ID NO: 14136); |
| | ENST00000531303.5 (SEQ ID NO: 14138); ENST00000531336.1 (SEQ ID NO: 14140); |
| | ENST00000532367.1 (SEQ ID NO: 14142); ENST00000533123.5 (SEQ ID NO: 14144); |
| | ENST00000533196.1 (SEQ ID NO: 14146); ENST00000534405.5 (SEQ ID NO: 14148) |

Target: SMTN

| | |
|---|---|
| pre-mRNA | ENST00000333137.11 (SEQ ID NO: 14149); ENST00000347557.6 (SEQ ID NO: 14151); |
| transcript | ENST00000358743.5 (SEQ ID NO: 14153); ENST00000404574.5 (SEQ ID NO: 14155); |
| | ENST00000416786.5 (SEQ ID NO: 14157); ENST00000422839.5 (SEQ ID NO: 14159); |
| | ENST00000426927.5 (SEQ ID NO: 14161); ENST00000431481.1 (SEQ ID NO: 14163); |
| | ENST00000432777.5 (SEQ ID NO: 14165); ENST00000438223.5 (SEQ ID NO: 14167); |
| | ENST00000440425.5 (SEQ ID NO: 14169); ENST00000455608.5 (SEQ ID NO: 14171); |
| | ENST00000460658.5 (SEQ ID NO: 14173); ENST00000466272.1 (SEQ ID NO: 14175); |
| | ENST00000472911.1 (SEQ ID NO: 14177); ENST00000475548.5 (SEQ ID NO: 14179); |
| | ENST00000482444.5 (SEQ ID NO: 14181); ENST00000489337.5 (SEQ ID NO: 14183); |
| | ENST00000493335.5 (SEQ ID NO: 14185); ENST00000497697.5 (SEQ ID NO: 14187); |
| | ENST00000504335.1 (SEQ ID NO: 14189); ENST00000612341.4 (SEQ ID NO: 14191); |
| | ENST00000619644.4 (SEQ ID NO: 14193); ENST00000624247.1 (SEQ ID NO: 14195) |
| transcript | ENST00000333137.11 (SEQ ID NO: 14150); ENST00000347557.6 (SEQ ID NO: 14152); |
| | ENST00000358743.5 (SEQ ID NO: 14154); ENST00000404574.5 (SEQ ID NO: 14156); |
| | ENST00000416786.5 (SEQ ID NO: 14158); ENST00000422839.5 (SEQ ID NO: 14160); |
| | ENST00000426927.5 (SEQ ID NO: 14162); ENST00000431481.1 (SEQ ID NO: 14164); |
| | ENST00000432777.5 (SEQ ID NO: 14166); ENST00000438223.5 (SEQ ID NO: 14168); |
| | ENST00000440425.5 (SEQ ID NO: 14170); ENST00000455608.5 (SEQ ID NO: 14172); |
| | ENST00000460658.5 (SEQ ID NO: 14174); ENST00000466272.1 (SEQ ID NO: 14176); |
| | ENST00000472911.1 (SEQ ID NO: 14178); ENST00000475548.5 (SEQ ID NO: 14180); |
| | ENST00000482444.5 (SEQ ID NO: 14182); ENST00000489337.5 (SEQ ID NO: 14184); |
| | ENST00000493335.5 (SEQ ID NO: 14186); ENST00000497697.5 (SEQ ID NO: 14188); |
| | ENST00000504335.1 (SEQ ID NO: 14190); ENST00000612341.4 (SEQ ID NO: 14192); |
| | ENST00000619644.4 (SEQ ID NO: 14194); ENST00000624247.1 (SEQ ID NO: 14196) |

Target: SNRPB

| | |
|---|---|
| pre-mRNA | ENST00000381342.6 (SEQ ID NO: 14197); ENST00000438552.6 (SEQ ID NO: 14199); |
| transcript | ENST00000474384.2 (SEQ ID NO: 14201) |
| transcript | ENST00000381342.6 (SEQ ID NO: 14198); ENST00000438552.6 (SEQ ID NO: 14200); |
| | ENST00000474384.2 (SEQ ID NO: 14202) |

Target: SP140

| | |
|---|---|
| pre-mRNA | ENST00000343805.10 (SEQ ID NO: 15820); ENST00000373645.3 (SEQ ID NO: 14204); |
| transcript | ENST00000392045.8 (SEQ ID NO: 15821); ENST00000417495.7 (SEQ ID NO: 15822); |
| | ENST00000420434.7 (SEQ ID NO: 15823); ENST00000441657.1 (SEQ ID NO: 14209); |
| | ENST00000456542.5 (SEQ ID NO: 15824); ENST00000473711.1 (SEQ ID NO: 14212); |
| | ENST00000476126.1 (SEQ ID NO: 14214); ENST00000479539.1 (SEQ ID NO: 14216); |
| | ENST00000486750.1 (SEQ ID NO: 14218); ENST00000538494.1 (SEQ ID NO: 14220); |
| | ENST00000543928.5 (SEQ ID NO: 14222); ENST00000544128.5 (SEQ ID NO: 14224) |
| transcript | ENST00000343805.10 (SEQ ID NO: 14203); ENST00000373645.3 (SEQ ID NO: 14205); |
| | ENST00000392045.8 (SEQ ID NO: 14206); ENST00000417495.7 (SEQ ID NO: 14207); |
| | ENST00000420434.7 (SEQ ID NO: 14208); ENST00000441657.1 (SEQ ID NO: 14210); |
| | ENST00000456542.5 (SEQ ID NO: 14211); ENST00000473711.1 (SEQ ID NO: 14213); |
| | ENST00000476126.1 (SEQ ID NO: 14215); ENST00000479539.1 (SEQ ID NO: 14217); |
| | ENST00000486750.1 (SEQ ID NO: 14219); ENST00000538494.1 (SEQ ID NO: 14221); |
| | ENST00000543928.5 (SEQ ID NO: 14223); ENST00000544128.5 (SEQ ID NO: 14225) |

Target: STAMBP

| | |
|---|---|
| pre-mRNA | ENST00000339566.7 (SEQ ID NO: 15825); ENST00000394070.7 (SEQ ID NO: 15826); |
| transcript | ENST00000394073.5 (SEQ ID NO: 15827); ENST00000409707.5 (SEQ ID NO: 15828); |
| | ENST00000424659.5 (SEQ ID NO: 14230); ENST00000432295.6 (SEQ ID NO: 14232); |
| | ENST00000452725.5 (SEQ ID NO: 14234); ENST00000478946.1 (SEQ ID NO: 14236); |
| | ENST00000486458.1 (SEQ ID NO: 14238); ENST00000487811.1 (SEQ ID NO: 14240); |
| | ENST00000536064.1 (SEQ ID NO: 14242) |
| transcript | ENST00000339566.7 (SEQ ID NO: 14226); ENST00000394070.7 (SEQ ID NO: 14227); |
| | ENST00000394073.5 (SEQ ID NO: 14228); ENST00000409707.5 (SEQ ID NO: 14229); |
| | ENST00000424659.5 (SEQ ID NO: 14231); ENST00000432295.6 (SEQ ID NO: 14233); |
| | ENST00000452725.5 (SEQ ID NO: 14235); ENST00000478946.1 (SEQ ID NO: 14237); |
| | ENST00000486458.1 (SEQ ID NO: 14239); ENST00000487811.1 (SEQ ID NO: 14241); |
| | ENST00000536064.1 (SEQ ID NO: 14243) |

Target: STXBP2

| | |
|---|---|
| pre-mRNA | ENST00000221283.10 (SEQ ID NO: 14244); ENST00000414284.6 (SEQ ID NO: 14246); |
| transcript | ENST00000441779.6 (SEQ ID NO: 14248); ENST00000593535.5 (SEQ ID NO: 14250); |
| | ENST00000593854.5 (SEQ ID NO: 14252); ENST00000594221.5 (SEQ ID NO: 14254); |
| | ENST00000595181.5 (SEQ ID NO: 14256); ENST00000595800.1 (SEQ ID NO: 14258); |
| | ENST00000595861.1 (SEQ ID NO: 14260); ENST00000595950.5 (SEQ ID NO: 14262); |
| | ENST00000597068.5 (SEQ ID NO: 14264); ENST00000597467.1 (SEQ ID NO: 14266); |
| | ENST00000599278.1 (SEQ ID NO: 14268); ENST00000599400.1 (SEQ ID NO: 14270); |
| | ENST00000599558.1 (SEQ ID NO: 14272); ENST00000599648.1 (SEQ ID NO: 14274); |
| | ENST00000599737.5 (SEQ ID NO: 14276); ENST00000599905.1 (SEQ ID NO: 14278); |
| | ENST00000600702.5 (SEQ ID NO: 14280); ENST00000601061.1 (SEQ ID NO: 14282); |
| | ENST00000602355.1 (SEQ ID NO: 14284); ENST00000612033.1 (SEQ ID NO: 14286) |
| transcript | ENST00000221283.10 (SEQ ID NO: 14245); ENST00000414284.6 (SEQ ID NO: 14247); |
| | ENST00000441779.6 (SEQ ID NO: 14249); ENST00000593535.5 (SEQ ID NO: 14251); |
| | ENST00000593854.5 (SEQ ID NO: 14253); ENST00000594221.5 (SEQ ID NO: 14255); |
| | ENST00000595181.5 (SEQ ID NO: 14257); ENST00000595800.1 (SEQ ID NO: 14259); |
| | ENST00000595861.1 (SEQ ID NO: 14261); ENST00000595950.5 (SEQ ID NO: 14263); |
| | ENST00000597068.5 (SEQ ID NO: 14265); ENST00000597467.1 (SEQ ID NO: 14267); |
| | ENST00000599278.1 (SEQ ID NO: 14269); ENST00000599400.1 (SEQ ID NO: 14271); |
| | ENST00000599558.1 (SEQ ID NO: 14273); ENST00000599648.1 (SEQ ID NO: 14275); |
| | ENST00000599737.5 (SEQ ID NO: 14277); ENST00000599905.1 (SEQ ID NO: 14279); |
| | ENST00000600702.5 (SEQ ID NO: 14281); ENST00000601061.1 (SEQ ID NO: 14283); |
| | ENST00000602355.1 (SEQ ID NO: 14285); ENST00000612033.1 (SEQ ID NO: 14287) |

Target: SULF2

| | |
|---|---|
| pre-mRNA | ENST00000359930.8 (SEQ ID NO: 15829); ENST00000433632.1 (SEQ ID NO: 14289); |
| transcript | ENST00000437955.1 (SEQ ID NO: 15830); ENST00000463221.2 (SEQ ID NO: 15831); |
| | ENST00000465769.1 (SEQ ID NO: 14293); ENST00000467815.5 (SEQ ID NO: 15832); |
| | ENST00000474450.5 (SEQ ID NO: 15833); ENST00000478766.1 (SEQ ID NO: 15834); |
| | ENST00000479472.1 (SEQ ID NO: 14298); ENST00000479970.1 (SEQ ID NO: 14300); |
| | ENST00000484875.5 (SEQ ID NO: 15835); ENST00000495544.5 (SEQ ID NO: 14303) |
| transcript | ENST00000359930.8 (SEQ ID NO: 14288); ENST00000433632.1 (SEQ ID NO: 14290); |
| | ENST00000437955.1 (SEQ ID NO: 14291); ENST00000463221.2 (SEQ ID NO: 14292); |
| | ENST00000465769.1 (SEQ ID NO: 14294); ENST00000467815.5 (SEQ ID NO: 14295); |
| | ENST00000474450.5 (SEQ ID NO: 14296); ENST00000478766.1 (SEQ ID NO: 14297); |
| | ENST00000479472.1 (SEQ ID NO: 14299); ENST00000479970.1 (SEQ ID NO: 14301); |
| | ENST00000484875.5 (SEQ ID NO: 14302); ENST00000495544.5 (SEQ ID NO: 14304) |

Target: SYNGAP1

| | |
|---|---|
| pre-mRNA | ENST00000293748.9 (SEQ ID NO: 15836); ENST00000418600.7 (SEQ ID NO: 15837); |
| transcript | ENST00000428982.4 (SEQ ID NO: 14307); ENST00000449372.7 (SEQ ID NO: 15838); |
| | ENST00000470232.1 (SEQ ID NO: 14310); ENST00000479510.2 (SEQ ID NO: 14312); |
| | ENST00000628646.2 (SEQ ID NO: 14314); ENST00000629380.3 (SEQ ID NO: 15839); |
| | ENST00000635885.1 (SEQ ID NO: 14317); ENST00000636075.1 (SEQ ID NO: 14319); |
| | ENST00000636116.1 (SEQ ID NO: 14321); ENST00000636146.1 (SEQ ID NO: 14323); |
| | ENST00000636193.1 (SEQ ID NO: 14325); ENST00000636436.1 (SEQ ID NO: 14327); |
| | ENST00000636443.1 (SEQ ID NO: 14329); ENST00000636640.1 (SEQ ID NO: 14331); |
| | ENST00000636731.1 (SEQ ID NO: 14333); ENST00000636905.1 (SEQ ID NO: 14335); |
| | ENST00000637052.1 (SEQ ID NO: 14337); ENST00000637194.1 (SEQ ID NO: 14339); |
| | ENST00000637490.1 (SEQ ID NO: 14341); ENST00000637587.1 (SEQ ID NO: 14343); |
| | ENST00000637671.1 (SEQ ID NO: 14345); ENST00000637721.1 (SEQ ID NO: 14347); |
| | ENST00000637911.1 (SEQ ID NO: 14349); ENST00000638127.1 (SEQ ID NO: 14351); |
| | ENST00000638142.2 (SEQ ID NO: 14353); ENST00000644458.1 (SEQ ID NO: 15840); |
| | ENST00000645250.1 (SEQ ID NO: 14356); ENST00000646630.1 (SEQ ID NO: 15841) |
| transcript | ENST00000293748.9 (SEQ ID NO: 14305); ENST00000418600.7 (SEQ ID NO: 14306); |
| | ENST00000428982.4 (SEQ ID NO: 14308); ENST00000449372.7 (SEQ ID NO: 14309); |
| | ENST00000470232.1 (SEQ ID NO: 14311); ENST00000479510.2 (SEQ ID NO: 14313); |
| | ENST00000628646.2 (SEQ ID NO: 14315); ENST00000629380.3 (SEQ ID NO: 14316); |
| | ENST00000635885.1 (SEQ ID NO: 14318); ENST00000636075.1 (SEQ ID NO: 14320); |
| | ENST00000636116.1 (SEQ ID NO: 14322); ENST00000636146.1 (SEQ ID NO: 14324); |
| | ENST00000636193.1 (SEQ ID NO: 14326); ENST00000636436.1 (SEQ ID NO: 14328); |
| | ENST00000636443.1 (SEQ ID NO: 14330); ENST00000636640.1 (SEQ ID NO: 14332); |
| | ENST00000636731.1 (SEQ ID NO: 14334); ENST00000636905.1 (SEQ ID NO: 14336); |
| | ENST00000637052.1 (SEQ ID NO: 14338); ENST00000637194.1 (SEQ ID NO: 14340); |
| | ENST00000637490.1 (SEQ ID NO: 14342); ENST00000637587.1 (SEQ ID NO: 14344); |
| | ENST00000637671.1 (SEQ ID NO: 14346); ENST00000637721.1 (SEQ ID NO: 14348); |
| | ENST00000637911.1 (SEQ ID NO: 14350); ENST00000638127.1 (SEQ ID NO: 14352); |
| | ENST00000638142.2 (SEQ ID NO: 14354); ENST00000644458.1 (SEQ ID NO: 14355); |
| | ENST00000645250.1 (SEQ ID NO: 14357); ENST00000646630.1 (SEQ ID NO: 14358) |

Target: SYNJ2

| | |
|---|---|
| pre-mRNA | ENST00000355585.9 (SEQ ID NO: 15842); ENST00000367112.1 (SEQ ID NO: 14360); |
| transcript | ENST00000367113.5 (SEQ ID NO: 15843); ENST00000367122.6 (SEQ ID NO: 14363); |
| | ENST00000449320.2 (SEQ ID NO: 14365); ENST00000485863.1 (SEQ ID NO: 15844); |
| | ENST00000638626.1 (SEQ ID NO: 15845); ENST00000640338.1 (SEQ ID NO: 15846); |
| | ENST00000640569.1 (SEQ ID NO: 14370) |
| transcript | ENST00000355585.9 (SEQ ID NO: 14359); ENST00000367112.1 (SEQ ID NO: 14361); |
| | ENST00000367113.5 (SEQ ID NO: 14362); ENST00000367122.6 (SEQ ID NO: 14364); |
| | ENST00000449320.2 (SEQ ID NO: 14366); ENST00000485863.1 (SEQ ID NO: 14367); |
| | ENST00000638626.1 (SEQ ID NO: 14368); ENST00000640338.1 (SEQ ID NO: 14369); |
| | ENST00000640569.1 (SEQ ID NO: 14371) |

Target: TAZ

| | |
|---|---|
| pre-mRNA | ENST00000369776.8 (SEQ ID NO: 14372); ENST00000426231.5 (SEQ ID NO: 14374); |
| transcript | ENST00000439735.2 (SEQ ID NO: 14376); ENST00000470127.2 (SEQ ID NO: 14378); |
| | ENST00000475699.6 (SEQ ID NO: 14380); ENST00000476679.5 (SEQ ID NO: 14382); |
| | ENST00000476800.2 (SEQ ID NO: 14384); ENST00000479875.1 (SEQ ID NO: 14386); |
| | ENST00000483674.3 (SEQ ID NO: 14388); ENST00000483780.5 (SEQ ID NO: 14390); |
| | ENST00000494912.5 (SEQ ID NO: 14392); ENST00000498029.1 (SEQ ID NO: 14394); |
| | ENST00000601016.6 (SEQ ID NO: 14396); ENST00000612012.5 (SEQ ID NO: 14398); |
| | ENST00000612460.5 (SEQ ID NO: 14400); ENST00000613002.4 (SEQ ID NO: 14402); |
| | ENST00000613634.4 (SEQ ID NO: 14404); ENST00000614595.2 (SEQ ID NO: 14406); |
| | ENST00000615658.5 (SEQ ID NO: 14408); ENST00000615986.4 (SEQ ID NO: 14410); |
| | ENST00000616020.5 (SEQ ID NO: 14412); ENST00000617701.5 (SEQ ID NO: 14414); |
| | ENST00000620808.4 (SEQ ID NO: 14416); ENST00000621647.2 (SEQ ID NO: 14418); |
| | ENST00000651139.1 (SEQ ID NO: 14420); ENST00000652354.1 (SEQ ID NO: 14422); |
| | ENST00000652358.1 (SEQ ID NO: 14424); ENST00000652390.1 (SEQ ID NO: 14426); |
| | ENST00000652476.1 (SEQ ID NO: 14428); ENST00000652644.1 (SEQ ID NO: 14430); |
| | ENST00000652682.1 (SEQ ID NO: 14432); ENST00000652685.1; (SEQ ID NO: 14434) |
| transcript | ENST00000369776.8 (SEQ ID NO: 14373); ENST00000426231.5 (SEQ ID NO: 14375); |
| | ENST00000439735.2 (SEQ ID NO: 14377); ENST00000470127.2 (SEQ ID NO: 14379); |
| | ENST00000475699.6 (SEQ ID NO: 14381); ENST00000476679.5 (SEQ ID NO: 14383); |
| | ENST00000476800.2 (SEQ ID NO: 14385); ENST00000479875.1 (SEQ ID NO: 14387); |
| | ENST00000483674.3 (SEQ ID NO: 14389); ENST00000483780.5 (SEQ ID NO: 14391); |
| | ENST00000494912.5 (SEQ ID NO: 14393); ENST00000498029.1 (SEQ ID NO: 14395); |
| | ENST00000601016.6 (SEQ ID NO: 14397); ENST00000612012.5 (SEQ ID NO: 14399); |
| | ENST00000612460.5 (SEQ ID NO: 14401); ENST00000613002.4 (SEQ ID NO: 14403); |
| | ENST00000613634.4 (SEQ ID NO: 14405); ENST00000614595.2 (SEQ ID NO: 14407); |
| | ENST00000615658.5 (SEQ ID NO: 14409); ENST00000615986.4 (SEQ ID NO: 14411); |
| | ENST00000616020.5 (SEQ ID NO: 14413); ENST00000617701.5 (SEQ ID NO: 14415); |
| | ENST00000620808.4 (SEQ ID NO: 14417); ENST00000621647.2 (SEQ ID NO: 14419); |
| | ENST00000651139.1 (SEQ ID NO: 14421); ENST00000652354.1 (SEQ ID NO: 14423); |
| | ENST00000652358.1 (SEQ ID NO: 14425); ENST00000652390.1 (SEQ ID NO: 14427); |
| | ENST00000652476.1 (SEQ ID NO: 14429); ENST00000652644.1 (SEQ ID NO: 14431); |
| | ENST00000652682.1 (SEQ ID NO: 14433); ENST00000652685.1 (SEQ ID NO: 14435) |

Target: TBL2

| | |
|---|---|
| pre-mRNA | ENST00000305632.11 (SEQ ID NO: 14436); ENST00000417008.5 (SEQ ID NO: 14438); |
| transcript | ENST00000424598.5 (SEQ ID NO: 14440); ENST00000426966.5 (SEQ ID NO: 14442); |
| | ENST00000432538.5 (SEQ ID NO: 14444); ENST00000433464.5 (SEQ ID NO: 14446); |
| | ENST00000435792.5 (SEQ ID NO: 14448); ENST00000437521.5 (SEQ ID NO: 14450); |
| | ENST00000450285.5 (SEQ ID NO: 14452); ENST00000452125.5 (SEQ ID NO: 14454); |
| | ENST00000452475.5 (SEQ ID NO: 14456); ENST00000458466.1 (SEQ ID NO: 14458); |
| | ENST00000459913.5 (SEQ ID NO: 14460); ENST00000465279.5 (SEQ ID NO: 14462); |
| | ENST00000468669.5 (SEQ ID NO: 14464); ENST00000469518.1 (SEQ ID NO: 14466); |
| | ENST00000476136.5 (SEQ ID NO: 14468); ENST00000479892.5 (SEQ ID NO: 14470); |
| | ENST00000488915.1 (SEQ ID NO: 14472); ENST00000495885.1 (SEQ ID NO: 14474); |
| | ENST00000496056.5 (SEQ ID NO: 14476); ENST00000610724.4 (SEQ ID NO: 14478) |
| transcript | ENST00000305632.11 (SEQ ID NO: 14437); ENST00000417008.5 (SEQ ID NO: 14439); |
| | ENST00000424598.5 (SEQ ID NO: 14441); ENST00000426966.5 (SEQ ID NO: 14443); |
| | ENST00000432538.5 (SEQ ID NO: 14445); ENST00000433464.5 (SEQ ID NO: 14447); |
| | ENST00000435792.5 (SEQ ID NO: 14449); ENST00000437521.5 (SEQ ID NO: 14451); |
| | ENST00000450285.5 (SEQ ID NO: 14453); ENST00000452125.5 (SEQ ID NO: 14455); |
| | ENST00000452475.5 (SEQ ID NO: 14457); ENST00000458466.1 (SEQ ID NO: 14459); |
| | ENST00000459913.5 (SEQ ID NO: 14461); ENST00000465279.5 (SEQ ID NO: 14463); |
| | ENST00000468669.5 (SEQ ID NO: 14465); ENST00000469518.1 (SEQ ID NO: 14467); |
| | ENST00000476136.5 (SEQ ID NO: 14469); ENST00000479892.5 (SEQ ID NO: 14471); |
| | ENST00000488915.1 (SEQ ID NO: 14473); ENST00000495885.1 (SEQ ID NO: 14475); |
| | ENST00000496056.5 (SEQ ID NO: 14477); ENST00000610724.4 (SEQ ID NO: 14479) |

Target: TDRD7

| | |
|---|---|
| pre-mRNA | ENST00000355295.5 (SEQ ID NO: 15847); ENST00000492428.1 (SEQ ID NO: 14481) |
| transcript | |
| transcript | ENST00000355295.5 (SEQ ID NO: 14480); ENST00000492428.1 (SEQ ID NO: 14482) |

Target: TECPR2

| | |
|---|---|
| pre-mRNA | ENST00000359520.12 (SEQ ID NO: 15848); ENST00000557786.1 (SEQ ID NO: 14484); |
| transcript | ENST00000558678.1 (SEQ ID NO: 15849); ENST00000559124.1 (SEQ ID NO: 14487); |
| | ENST00000560060.5 (SEQ ID NO: 14489); ENST00000561099.1 (SEQ ID NO: 14491); |
| | ENST00000561228.1 (SEQ ID NO: 15850) |
| transcript | ENST00000359520.12 (SEQ ID NO: 14483); ENST00000557786.1 (SEQ ID NO: 14485); |
| | ENST00000558678.1 (SEQ ID NO: 14486); ENST00000559124.1 (SEQ ID NO: 14488); |
| | ENST00000560060.5 (SEQ ID NO: 14490); ENST00000561099.1 (SEQ ID NO: 14492); |
| | ENST00000561228.1 (SEQ ID NO: 14493) |

Target: TFB1M

| | |
|---|---|
| pre-mRNA | ENST00000367166.5 (SEQ ID NO: 15851); ENST00000466349.1 (SEQ ID NO: 14495); |
| transcript | ENST00000468889.5 (SEQ ID NO: 15852); ENST00000470239.1 (SEQ ID NO: 15853); |
| | ENST00000475849.1 (SEQ ID NO: 14499); ENST00000480390.1 (SEQ ID NO: 14501); |
| | ENST00000487586.5 (SEQ ID NO: 14503); ENST00000489874.5 (SEQ ID NO: 15854); |
| | ENST00000495806.1 (SEQ ID NO: 14506) |
| transcript | ENST00000367166.5 (SEQ ID NO: 14494); ENST00000466349.1 (SEQ ID NO: 14496); |
| | ENST00000468889.5 (SEQ ID NO: 14497); ENST00000470239.1 (SEQ ID NO: 14498); |
| | ENST00000475849.1 (SEQ ID NO: 14500); ENST00000480390.1 (SEQ ID NO: 14502); |
| | ENST00000487586.5 (SEQ ID NO: 14504); ENST00000489874.5 (SEQ ID NO: 14505); |
| | ENST00000495806.1 (SEQ ID NO: 14507) |

Target: TM6SF1

| | |
|---|---|
| pre-mRNA | ENST00000258909.13 (SEQ ID NO: 14508); ENST00000322019.14 (SEQ ID NO: 14510); |
| transcript | ENST00000379384.9 (SEQ ID NO: 14512); ENST00000379390.10 (SEQ ID NO: 14514); |
| | ENST00000561551.1 (SEQ ID NO: 14516); ENST00000564988.5 (SEQ ID NO: 14518); |
| | ENST00000565774.5 (SEQ ID NO: 14520); ENST00000565982.1 (SEQ ID NO: 14522) |
| transcript | ENST00000258909.13 (SEQ ID NO: 14509); ENST00000322019.14 (SEQ ID NO: 14511); |
| | ENST00000379384.9 (SEQ ID NO: 14513); ENST00000379390.10 (SEQ ID NO: 14515); |
| | ENST00000561551.1 (SEQ ID NO: 14517); ENST00000564988.5 (SEQ ID NO: 14519); |
| | ENST00000565774.5 (SEQ ID NO: 14521); ENST00000565982.1 (SEQ ID NO: 14523) |

Target: TNK2

| | |
|---|---|
| pre-mRNA | ENST00000333602.13 (SEQ ID NO: 15855); ENST00000381916.7 (SEQ ID NO: 15856); |
| transcript | ENST00000428187.7 (SEQ ID NO: 14526); ENST00000439230.6 (SEQ ID NO: 14528); |
| | ENST00000671726.1 (SEQ ID NO: 14530); ENST00000671734.1 (SEQ ID NO: 14532); |
| | ENST00000671753.1 (SEQ ID NO: 15857); ENST00000671767.1 (SEQ ID NO: 14535); |
| | ENST00000671831.1 (SEQ ID NO: 14537); ENST00000671880.1 (SEQ ID NO: 14539); |
| | ENST00000672024.1 (SEQ ID NO: 15858); ENST00000672098.1 (SEQ ID NO: 14542); |
| | ENST00000672145.1 (SEQ ID NO: 14544); ENST00000672320.1 (SEQ ID NO: 14546); |
| | ENST00000672542.1 (SEQ ID NO: 14548); ENST00000672548.1 (SEQ ID NO: 14550); |
| | ENST00000672614.1 (SEQ ID NO: 14552); ENST00000672623.1 (SEQ ID NO: 14554); |
| | ENST00000672669.1 (SEQ ID NO: 14556); ENST00000672886.1 (SEQ ID NO: 14558); |
| | ENST00000672887.1 (SEQ ID NO: 15859); ENST00000673038.1 (SEQ ID NO: 14561); |
| | ENST00000673167.1 (SEQ ID NO: 15860); ENST00000673236.1 (SEQ ID NO: 14564); |
| | ENST00000673358.1 (SEQ ID NO: 14566); ENST00000673374.1 (SEQ ID NO: 14568); |
| | ENST00000673420.1 (SEQ ID NO: 15861); ENST00000673440.1 (SEQ ID NO: 14571); |
| | ENST00000673443.1 (SEQ ID NO: 14573); ENST00000673559.1 (SEQ ID NO: 14575) |
| transcript | ENST00000333602.13 (SEQ ID NO: 14524); ENST00000381916.7 (SEQ ID NO: 14525); |
| | ENST00000428187.7 (SEQ ID NO: 14527); ENST00000439230.6 (SEQ ID NO: 14529); |
| | ENST00000671726.1 (SEQ ID NO: 14531); ENST00000671734.1 (SEQ ID NO: 14533); |
| | ENST00000671753.1 (SEQ ID NO: 14534); ENST00000671767.1 (SEQ ID NO: 14536); |
| | ENST00000671831.1 (SEQ ID NO: 14538); ENST00000671880.1 (SEQ ID NO: 14540); |
| | ENST00000672024.1 (SEQ ID NO: 14541); ENST00000672098.1 (SEQ ID NO: 14543); |
| | ENST00000672145.1 (SEQ ID NO: 14545); ENST00000672320.1 (SEQ ID NO: 14547); |
| | ENST00000672542.1 (SEQ ID NO: 14549); ENST00000672548.1 (SEQ ID NO: 14551); |
| | ENST00000672614.1 (SEQ ID NO: 14553); ENST00000672623.1 (SEQ ID NO: 14555); |
| | ENST00000672669.1 (SEQ ID NO: 14557); ENST00000672886.1 (SEQ ID NO: 14559); |
| | ENST00000672887.1 (SEQ ID NO: 14560); ENST00000673038.1 (SEQ ID NO: 14562); |
| | ENST00000673167.1 (SEQ ID NO: 14563); ENST00000673236.1 (SEQ ID NO: 14565); |
| | ENST00000673358.1 (SEQ ID NO: 14567); ENST00000673374.1 (SEQ ID NO: 14569); |
| | ENST00000673420.1 (SEQ ID NO: 14570); ENST00000673440.1 (SEQ ID NO: 14572); |
| | ENST00000673443.1 (SEQ ID NO: 14574); ENST00000673559.1 (SEQ ID NO: 14576) |

Target: TOE1

| | |
|---|---|
| pre-mRNA | ENST00000372090.6 (SEQ ID NO: 14577); ENST00000460057.1 (SEQ ID NO: 14579); |
| transcript | ENST00000471337.5 (SEQ ID NO: 14581); ENST00000477731.5 (SEQ ID NO: 14583); |
| | ENST00000495703.5 (SEQ ID NO: 14585) |
| transcript | ENST00000372090.6 (SEQ ID NO: 14578); ENST00000460057.1 (SEQ ID NO: 14580); |
| | ENST00000471337.5 (SEQ ID NO: 14582); ENST00000477731.5 (SEQ ID NO: 14584); |
| | ENST00000495703.5 (SEQ ID NO: 14586) |

Target: TOR1B

| | |
|---|---|
| pre-mRNA | ENST00000259339.7 (SEQ ID NO: 14587); ENST00000427860.1 (SEQ ID NO: 14589); |
| transcript | ENST00000486372.1 (SEQ ID NO: 14591); ENST00000488169.1; (SEQ ID NO: 14593) |
| transcript | ENST00000259339.7 (SEQ ID NO: 14588); ENST00000427860.1 (SEQ ID NO: 14590); |
| | ENST00000486372.1 (SEQ ID NO: 14592); ENST00000488169.1 (SEQ ID NO: 14594) |

Target: TRAPPC6B

| | |
|---|---|
| pre-mRNA | ENST00000330149.10 (SEQ ID NO: 14595); ENST00000347691.9 (SEQ ID NO: 14597); |
| transcript | ENST00000469361.5 (SEQ ID NO: 14599); ENST00000554018.1 (SEQ ID NO: 14601); |
| | ENST00000555269.5 (SEQ ID NO: 14603); ENST00000556765.1 (SEQ ID NO: 14605); |
| | ENST00000557764.5 (SEQ ID NO: 14607) |
| transcript | ENST00000330149.10 (SEQ ID NO: 14596); ENST00000347691.9 (SEQ ID NO: 14598); |
| | ENST00000469361.5 (SEQ ID NO: 14600); ENST00000554018.1 (SEQ ID NO: 14602); |
| | ENST00000555269.5 (SEQ ID NO: 14604); ENST00000556765.1 (SEQ ID NO: 14606); |
| | ENST00000557764.5 (SEQ ID NO: 14608) |

Target: TRIP4

| | |
|---|---|
| pre-mRNA | ENST00000261884.8 (SEQ ID NO: 15862); ENST00000557834.5 (SEQ ID NO: 14610); |
| transcript | ENST00000558162.1 (SEQ ID NO: 14612); ENST00000558442.1 (SEQ ID NO: 14614); |
| | ENST00000558820.5 (SEQ ID NO: 14616); ENST00000559565.5 (SEQ ID NO: 14618); |
| | ENST00000559777.1 (SEQ ID NO: 14620); ENST00000559833.5 (SEQ ID NO: 14622); |
| | ENST00000560475.1 (SEQ ID NO: 15863); ENST00000560567.5 (SEQ ID NO: 15864); |
| | ENST00000560920.6 (SEQ ID NO: 14626); ENST00000561265.1 (SEQ ID NO: 14628) |
| transcript | ENST00000261884.8 (SEQ ID NO: 14609); ENST00000557834.5 (SEQ ID NO: 14611); |
| | ENST00000558162.1 (SEQ ID NO: 14613); ENST00000558442.1 (SEQ ID NO: 14615); |
| | ENST00000558820.5 (SEQ ID NO: 14617); ENST00000559565.5 (SEQ ID NO: 14619); |
| | ENST00000559777.1 (SEQ ID NO: 14621); ENST00000559833.5 (SEQ ID NO: 14623); |
| | ENST00000560475.1 (SEQ ID NO: 14624); ENST00000560567.5 (SEQ ID NO: 14625); |
| | ENST00000560920.6 (SEQ ID NO: 14627); ENST00000561265.1 (SEQ ID NO: 14629) |

Target: TRMT2A

| | |
|---|---|
| pre-mRNA | ENST00000252136.12 (SEQ ID NO: 14630); ENST00000403707.7 (SEQ ID NO: 14632); |
| transcript | ENST00000404751.7 (SEQ ID NO: 14634); ENST00000439169.2 (SEQ ID NO: 14636); |
| | ENST00000444256.1 (SEQ ID NO: 14638); ENST00000444845.5 (SEQ ID NO: 14640); |
| | ENST00000445045.1 (SEQ ID NO: 14642); ENST00000459644.1 (SEQ ID NO: 14644); |
| | ENST00000463710.1 (SEQ ID NO: 14646); ENST00000464535.1 (SEQ ID NO: 14648); |
| | ENST00000468917.1 (SEQ ID NO: 14650); ENST00000471040.5 (SEQ ID NO: 14652); |
| | ENST00000480339.1 (SEQ ID NO: 14654); ENST00000480460.1 (SEQ ID NO: 14656); |
| | ENST00000487378.1 (SEQ ID NO: 14658); ENST00000487668.5 (SEQ ID NO: 14660); |
| | ENST00000488335.1 (SEQ ID NO: 14662); ENST00000492988.5 (SEQ ID NO: 14664); |
| | ENST00000494641.1 (SEQ ID NO: 14666); ENST00000494820.5 (SEQ ID NO: 14668) |
| transcript | ENST00000252136.12 (SEQ ID NO: 14631); ENST00000403707.7 (SEQ ID NO: 14633); |
| | ENST00000404751.7 (SEQ ID NO: 14635); ENST00000439169.2 (SEQ ID NO: 14637); |
| | ENST00000444256.1 (SEQ ID NO: 14639); ENST00000444845.5 (SEQ ID NO: 14641); |
| | ENST00000445045.1 (SEQ ID NO: 14643); ENST00000459644.1 (SEQ ID NO: 14645); |
| | ENST00000463710.1 (SEQ ID NO: 14647); ENST00000464535.1 (SEQ ID NO: 14649); |
| | ENST00000468917.1 (SEQ ID NO: 14651); ENST00000471040.5 (SEQ ID NO: 14653); |
| | ENST00000480339.1 (SEQ ID NO: 14655); ENST00000480460.1 (SEQ ID NO: 14657); |
| | ENST00000487378.1 (SEQ ID NO: 14659); ENST00000487668.5 (SEQ ID NO: 14661); |
| | ENST00000488335.1 (SEQ ID NO: 14663); ENST00000492988.5 (SEQ ID NO: 14665); |
| | ENST00000494641.1 (SEQ ID NO: 14667); ENST00000494820.5 (SEQ ID NO: 14669) |

Target: TRMU

| | |
|---|---|
| pre-mRNA | ENST00000381019.3 (SEQ ID NO: 14670); ENST00000381021.7 (SEQ ID NO: 14672); |
| transcript | ENST00000441818.5 (SEQ ID NO: 14674); ENST00000453630.5 (SEQ ID NO: 14676); |
| | ENST00000456595.5 (SEQ ID NO: 14678); ENST00000457572.5 (SEQ ID NO: 14680); |
| | ENST00000463785.1 (SEQ ID NO: 14682); ENST00000465378.6 (SEQ ID NO: 14684); |
| | ENST00000470831.1 (SEQ ID NO: 14686); ENST00000476901.1 (SEQ ID NO: 14688); |
| | ENST00000479648.1 (SEQ ID NO: 14690); ENST00000485175.5 (SEQ ID NO: 14692); |
| | ENST00000485559.1 (SEQ ID NO: 14694); ENST00000486620.5 (SEQ ID NO: 14696); |
| | ENST00000491612.1 (SEQ ID NO: 14698); ENST00000493556.2 (SEQ ID NO: 14700); |
| | ENST00000496831.5 (SEQ ID NO: 14702); ENST00000642562.1 (SEQ ID NO: 14704); |
| | ENST00000642923.1 (SEQ ID NO: 14706); ENST00000643137.1 (SEQ ID NO: 14708); |
| | ENST00000644006.1 (SEQ ID NO: 14710); ENST00000645026.1 (SEQ ID NO: 14712); |
| | ENST00000645190.1 (SEQ ID NO: 14714); ENST00000647301.1 (SEQ ID NO: 14716) |
| transcript | ENST00000381019.3 (SEQ ID NO: 14671); ENST00000381021.7 (SEQ ID NO: 14673); |
| | ENST00000441818.5 (SEQ ID NO: 14675); ENST00000453630.5 (SEQ ID NO: 14677); |
| | ENST00000456595.5 (SEQ ID NO: 14679); ENST00000457572.5 (SEQ ID NO: 14681); |
| | ENST00000463785.1 (SEQ ID NO: 14683); ENST00000465378.6 (SEQ ID NO: 14685); |
| | ENST00000470831.1 (SEQ ID NO: 14687); ENST00000476901.1 (SEQ ID NO: 14689); |
| | ENST00000479648.1 (SEQ ID NO: 14691); ENST00000485175.5 (SEQ ID NO: 14693); |
| | ENST00000485559.1 (SEQ ID NO: 14695); ENST00000486620.5 (SEQ ID NO: 14697); |
| | ENST00000491612.1 (SEQ ID NO: 14699); ENST00000493556.2 (SEQ ID NO: 14701); |
| | ENST00000496831.5 (SEQ ID NO: 14703); ENST00000642562.1 (SEQ ID NO: 14705); |
| | ENST00000642923.1 (SEQ ID NO: 14707); ENST00000643137.1 (SEQ ID NO: 14709); |
| | ENST00000644006.1 (SEQ ID NO: 14711); ENST00000645026.1 (SEQ ID NO: 14713); |
| | ENST00000645190.1 (SEQ ID NO: 14715); ENST00000647301.1 (SEQ ID NO: 14717) |

Target: TRPV4

| | |
|---|---|
| pre-mRNA | ENST00000261740.7 (SEQ ID NO: 15865); ENST00000418703.6 (SEQ ID NO: 15866); |
| transcript | ENST00000536570.1 (SEQ ID NO: 14720); ENST00000536838.1 (SEQ ID NO: 15867); |
| | ENST00000537083.5 (SEQ ID NO: 15868); ENST00000538125.5 (SEQ ID NO: 15869); |
| | ENST00000541794.5 (SEQ ID NO: 15870); ENST00000544971.5 (SEQ ID NO: 15871) |
| transcript | ENST00000261740.7 (SEQ ID NO: 14718); ENST00000418703.6 (SEQ ID NO: 14719); |
| | ENST00000536570.1 (SEQ ID NO: 14721); ENST00000536838.1 (SEQ ID NO: 14722); |
| | ENST00000537083.5 (SEQ ID NO: 14723); ENST00000538125.5 (SEQ ID NO: 14724); |
| | ENST00000541794.5 (SEQ ID NO: 14725); ENST00000544971.5 (SEQ ID NO: 14726) |

Target: TTC19

| | |
|---|---|
| pre-mRNA | ENST00000261647.10 (SEQ ID NO: 14727); ENST00000465567.1 (SEQ ID NO: 14729); |
| transcript | ENST00000466729.5 (SEQ ID NO: 14731); ENST00000470399.1 (SEQ ID NO: 14733); |
| | ENST00000470649.1 (SEQ ID NO: 14735); ENST00000475723.5 (SEQ ID NO: 14737); |
| | ENST00000481107.1 (SEQ ID NO: 14739); ENST00000497842.6 (SEQ ID NO: 14741); |
| | ENST00000578103.1 (SEQ ID NO: 14743); ENST00000583704.1 (SEQ ID NO: 14745) |
| transcript | ENST00000261647.10 (SEQ ID NO: 14728); ENST00000465567.1 (SEQ ID NO: 14730); |
| | ENST00000466729.5 (SEQ ID NO: 14732); ENST00000470399.1 (SEQ ID NO: 14734); |
| | ENST00000470649.1 (SEQ ID NO: 14736); ENST00000475723.5 (SEQ ID NO: 14738); |
| | ENST00000481107.1 (SEQ ID NO: 14740); ENST00000497842.6 (SEQ ID NO: 14742); |
| | ENST00000578103.1 (SEQ ID NO: 14744); ENST00000583704.1 (SEQ ID NO: 14746) |

Target: TYMP

| | |
|---|---|
| pre-mRNA | ENST00000252029.8 (SEQ ID NO: 14747); ENST00000395678.7 (SEQ ID NO: 14749); |
| transcript | ENST00000395680.6 (SEQ ID NO: 14751); ENST00000395681.6 (SEQ ID NO: 14753); |
| | ENST00000425169.1 (SEQ ID NO: 14755); ENST00000476284.1 (SEQ ID NO: 14757); |
| | ENST00000487162.1 (SEQ ID NO: 14759); ENST00000487577.5 (SEQ ID NO: 14761); |
| | ENST00000650719.1 (SEQ ID NO: 14763); ENST00000651095.1 (SEQ ID NO: 14765); |
| | ENST00000651196.1 (SEQ ID NO: 14767); ENST00000651401.1 (SEQ ID NO: 14769); |
| | ENST00000651490.1 (SEQ ID NO: 14771); ENST00000651906.1 (SEQ ID NO: 14773); |
| | ENST00000652237.1 (SEQ ID NO: 14775); ENST00000652352.1 (SEQ ID NO: 14777); |
| | ENST00000652401.1 (SEQ ID NO: 14779) |
| transcript | ENST00000252029.8 (SEQ ID NO: 14748); ENST00000395678.7 (SEQ ID NO: 14750); |
| | ENST00000395680.6 (SEQ ID NO: 14752); ENST00000395681.6 (SEQ ID NO: 14754); |
| | ENST00000425169.1 (SEQ ID NO: 14756); ENST00000476284.1 (SEQ ID NO: 14758); |
| | ENST00000487162.1 (SEQ ID NO: 14760); ENST00000487577.5 (SEQ ID NO: 14762); |
| | ENST00000650719.1 (SEQ ID NO: 14764); ENST00000651095.1 (SEQ ID NO: 14766); |
| | ENST00000651196.1 (SEQ ID NO: 14768); ENST00000651401.1 (SEQ ID NO: 14770); |
| | ENST00000651490.1 (SEQ ID NO: 14772); ENST00000651906.1 (SEQ ID NO: 14774); |
| | ENST00000652237.1 (SEQ ID NO: 14776); ENST00000652352.1 (SEQ ID NO: 14778); |
| | ENST00000652401.1 (SEQ ID NO: 14780) |

Target: UMPS

| | |
|---|---|
| pre-mRNA | ENST00000232607.7 (SEQ ID NO: 14781); ENST00000460034.5 (SEQ ID NO: 14783); |
| transcript | ENST00000462091.5 (SEQ ID NO: 14785); ENST00000467167.5 (SEQ ID NO: 14787); |
| | ENST00000474588.5 (SEQ ID NO: 14789); ENST00000479719.5 (SEQ ID NO: 14791); |
| | ENST00000487622.5 (SEQ ID NO: 14793); ENST00000495751.1 (SEQ ID NO: 14795); |
| | ENST00000497791.5 (SEQ ID NO: 14797); ENST00000498715.1 (SEQ ID NO: 14799); |
| | ENST00000628619.1 (SEQ ID NO: 14801) |
| transcript | ENST00000232607.7 (SEQ ID NO: 14782); ENST00000460034.5 (SEQ ID NO: 14784); |
| | ENST00000462091.5 (SEQ ID NO: 14786); ENST00000467167.5 (SEQ ID NO: 14788); |
| | ENST00000474588.5 (SEQ ID NO: 14790); ENST00000479719.5 (SEQ ID NO: 14792); |
| | ENST00000487622.5 (SEQ ID NO: 14794); ENST00000495751.1 (SEQ ID NO: 14796); |
| | ENST00000497791.5 (SEQ ID NO: 14798); ENST00000498715.1 (SEQ ID NO: 14800); |
| | ENST00000628619.1 (SEQ ID NO: 14802) |

Target: UROD

| | |
|---|---|
| pre-mRNA | ENST00000246337.9 (SEQ ID NO: 14803); ENST00000428106.1 (SEQ ID NO: 14805); |
| transcript | ENST00000434478.6 (SEQ ID NO: 14807); ENST00000460334.5 (SEQ ID NO: 14809); |
| | ENST00000460906.5 (SEQ ID NO: 14811); ENST00000461035.5 (SEQ ID NO: 14813); |
| | ENST00000462688.5 (SEQ ID NO: 14815); ENST00000463092.5 (SEQ ID NO: 14817); |
| | ENST00000465678.1 (SEQ ID NO: 14819); ENST00000466193.1 (SEQ ID NO: 14821); |
| | ENST00000469548.5 (SEQ ID NO: 14823); ENST00000472254.1 (SEQ ID NO: 14825); |
| | ENST00000473012.1 (SEQ ID NO: 14827); ENST00000478467.5 (SEQ ID NO: 14829); |
| | ENST00000486699.5 (SEQ ID NO: 14831); ENST00000490385.5 (SEQ ID NO: 14833); |
| | ENST00000491300.5 (SEQ ID NO: 14835); ENST00000491773.6 (SEQ ID NO: 14837); |
| | ENST00000494399.5 (SEQ ID NO: 14839); ENST00000496439.1 (SEQ ID NO: 14841); |
| | ENST00000636293.1 (SEQ ID NO: 14843); ENST00000636836.1 (SEQ ID NO: 14845); |
| | ENST00000650713.1 (SEQ ID NO: 14847); ENST00000651476.1 (SEQ ID NO: 14849); |
| | ENST00000652165.1 (SEQ ID NO: 14851); ENST00000652287.1 (SEQ ID NO: 14853); |
| | ENST00000652514.1 (SEQ ID NO: 14855) |
| transcript | ENST00000246337.9 (SEQ ID NO: 14804); ENST00000428106.1 (SEQ ID NO: 14806); |
| | ENST00000434478.6 (SEQ ID NO: 14808); ENST00000460334.5 (SEQ ID NO: 14810); |
| | ENST00000460906.5 (SEQ ID NO: 14812); ENST00000461035.5 (SEQ ID NO: 14814); |
| | ENST00000462688.5 (SEQ ID NO: 14816); ENST00000463092.5 (SEQ ID NO: 14818); |
| | ENST00000465678.1 (SEQ ID NO: 14820); ENST00000466193.1 (SEQ ID NO: 14822); |
| | ENST00000469548.5 (SEQ ID NO: 14824); ENST00000472254.1 (SEQ ID NO: 14826); |
| | ENST00000473012.1 (SEQ ID NO: 14828); ENST00000478467.5 (SEQ ID NO: 14830); |
| | ENST00000486699.5 (SEQ ID NO: 14832); ENST00000490385.5 (SEQ ID NO: 14834); |
| | ENST00000491300.5 (SEQ ID NO: 14836); ENST00000491773.6 (SEQ ID NO: 14838); |
| | ENST00000494399.5 (SEQ ID NO: 14840); ENST00000496439.1 (SEQ ID NO: 14842); |
| | ENST00000636293.1 (SEQ ID NO: 14844); ENST00000636836.1 (SEQ ID NO: 14846); |
| | ENST00000650713.1 (SEQ ID NO: 14848); ENST00000651476.1 (SEQ ID NO: 14850); |
| | ENST00000652165.1 (SEQ ID NO: 14852); ENST00000652287.1 (SEQ ID NO: 14854); |
| | ENST00000652514.1 (SEQ ID NO: 14856) |

Target: WDR11

| | |
|---|---|
| pre-mRNA | ENST00000263461.11 (SEQ ID NO: 15872); ENST00000462529.2 (SEQ ID NO: 14858); |
| transcript | ENST00000470052.5 (SEQ ID NO: 14860); ENST00000478567.5 (SEQ ID NO: 14862); |
| | ENST00000497136.6 (SEQ ID NO: 15873); ENST00000603658.1 (SEQ ID NO: 14865); |
| | ENST00000604220.5 (SEQ ID NO: 14867); ENST00000604509.5 (SEQ ID NO: 15874); |
| | ENST00000604585.5 (SEQ ID NO: 14870); ENST00000604714.1 (SEQ ID NO: 14872); |
| | ENST00000605069.5 (SEQ ID NO: 14874); ENST00000605178.5 (SEQ ID NO: 14876); |
| | ENST00000605202.5 (SEQ ID NO: 14878); ENST00000605320.1 (SEQ ID NO: 14880); |
| | ENST00000605376.5 (SEQ ID NO: 14882); ENST00000605543.5 (SEQ ID NO: 15875); |
| | ENST00000605659.1 (SEQ ID NO: 14885) |
| transcript | ENST00000263461.11 (SEQ ID NO: 14857); ENST00000462529.2 (SEQ ID NO: 14859); |
| | ENST00000470052.5 (SEQ ID NO: 14861); ENST00000478567.5 (SEQ ID NO: 14863); |
| | ENST00000497136.6 (SEQ ID NO: 14864); ENST00000603658.1 (SEQ ID NO: 14866); |
| | ENST00000604220.5 (SEQ ID NO: 14868); ENST00000604509.5 (SEQ ID NO: 14869); |
| | ENST00000604585.5 (SEQ ID NO: 14871); ENST00000604714.1 (SEQ ID NO: 14873); |
| | ENST00000605069.5 (SEQ ID NO: 14875); ENST00000605178.5 (SEQ ID NO: 14877); |
| | ENST00000605202.5 (SEQ ID NO: 14879); ENST00000605320.1 (SEQ ID NO: 14881); |
| | ENST00000605376.5 (SEQ ID NO: 14883); ENST00000605543.5 (SEQ ID NO: 14884); |
| | ENST00000605659.1 (SEQ ID NO: 14886) |

Target: WDR62

| | |
|---|---|
| pre-mRNA | ENST00000270301.11 (SEQ ID NO: 15876); ENST00000378860.8 (SEQ ID NO: 14888); |
| transcript | ENST00000401500.7 (SEQ ID NO: 15877); ENST00000427823.2 (SEQ ID NO: 14891); |
| | ENST00000587391.5 (SEQ ID NO: 15878); ENST00000589953.1 (SEQ ID NO: 14894); |
| | ENST00000608676.1 (SEQ ID NO: 14896); ENST00000644764.1 (SEQ ID NO: 14898) |
| transcript | ENST00000270301.11 (SEQ ID NO: 14887); ENST00000378860.8 (SEQ ID NO: 14889); |
| | ENST00000401500.7 (SEQ ID NO: 14890); ENST00000427823.2 (SEQ ID NO: 14892); |
| | ENST00000587391.5 (SEQ ID NO: 14893); ENST00000589953.1 (SEQ ID NO: 14895); |
| | ENST00000608676.1 (SEQ ID NO: 14897); ENST00000644764.1 (SEQ ID NO: 14899) |

Target: WIPI1

| | |
|---|---|
| pre-mRNA | ENST00000262139.10 (SEQ ID NO: 15879); ENST00000546360.5 (SEQ ID NO: 15880); |
| transcript | ENST00000585393.1 (SEQ ID NO: 14902); ENST00000586815.1 (SEQ ID NO: 14904); |
| | ENST00000587731.1 (SEQ ID NO: 14906); ENST00000589316.5 (SEQ ID NO: 15881); |
| | ENST00000589459.5 (SEQ ID NO: 15882); ENST00000590402.1 (SEQ ID NO: 14910); |
| | ENST00000591494.5 (SEQ ID NO: 14912); ENST00000591744.1 (SEQ ID NO: 14914); |
| | ENST00000592645.5 (SEQ ID NO: 14916) |
| transcript | ENST00000262139.10 (SEQ ID NO: 14900); ENST00000546360.5 (SEQ ID NO: 14901); |
| | ENST00000585393.1 (SEQ ID NO: 14903); ENST00000586815.1 (SEQ ID NO: 14905); |
| | ENST00000587731.1 (SEQ ID NO: 14907); ENST00000589316.5 (SEQ ID NO: 14908); |
| | ENST00000589459.5 (SEQ ID NO: 14909); ENST00000590402.1 (SEQ ID NO: 14911); |
| | ENST00000591494.5 (SEQ ID NO: 14913); ENST00000591744.1 (SEQ ID NO: 14915); |
| | ENST00000592645.5 (SEQ ID NO: 14917) |

Target: WRAP53

| | |
|---|---|
| pre-mRNA | ENST00000316024.9 (SEQ ID NO: 14918); ENST00000396463.6 (SEQ ID NO: 14920); |
| transcript | ENST00000431639.6 (SEQ ID NO: 14922); ENST00000457584.6 (SEQ ID NO: 14924); |
| | ENST00000463804.6 (SEQ ID NO: 14926); ENST00000467699.5 (SEQ ID NO: 14928); |
| | ENST00000471973.6 (SEQ ID NO: 14930); ENST00000498114.1 (SEQ ID NO: 14932); |
| | ENST00000498311.5 (SEQ ID NO: 14934); ENST00000534050.5 (SEQ ID NO: 14936) |
| transcript | ENST00000316024.9 (SEQ ID NO: 14919); ENST00000396463.6 (SEQ ID NO: 14921); |
| | ENST00000431639.6 (SEQ ID NO: 14923); ENST00000457584.6 (SEQ ID NO: 14925); |
| | ENST00000463804.6 (SEQ ID NO: 14927); ENST00000467699.5 (SEQ ID NO: 14929); |
| | ENST00000471973.6 (SEQ ID NO: 14931); ENST00000498114.1 (SEQ ID NO: 14933); |
| | ENST00000498311.5 (SEQ ID NO: 14935); ENST00000534050.5 (SEQ ID NO: 14937) |

Target: XPO1

| | |
|---|---|
| pre-mRNA | ENST00000401558.7 (SEQ ID NO: 15883); ENST00000404992.6 (SEQ ID NO: 15884); |
| transcript | ENST00000406957.5 (SEQ ID NO: 15885); ENST00000420673.5 (SEQ ID NO: 14941); |
| | ENST00000422552.5 (SEQ ID NO: 14943); ENST00000428210.5 (SEQ ID NO: 15886); |
| | ENST00000436018.1 (SEQ ID NO: 14946); ENST00000437159.5 (SEQ ID NO: 14948); |
| | ENST00000443240.5 (SEQ ID NO: 15887); ENST00000449444.5 (SEQ ID NO: 14951); |
| | ENST00000451765.5 (SEQ ID NO: 15888); ENST00000457483.5 (SEQ ID NO: 14954); |
| | ENST00000460037.1 (SEQ ID NO: 14956); ENST00000461407.5 (SEQ ID NO: 14958); |
| | ENST00000468259.1 (SEQ ID NO: 14960); ENST00000469337.1 (SEQ ID NO: 14962); |
| | ENST00000475744.1 (SEQ ID NO: 14964); ENST00000476585.5 (SEQ ID NO: 14966); |
| | ENST00000481073.5 (SEQ ID NO: 14968); ENST00000481214.1 (SEQ ID NO: 14970); |
| | ENST00000489954.1 (SEQ ID NO: 14972); ENST00000492182.5 (SEQ ID NO: 14974); |
| | ENST00000494468.1 (SEQ ID NO: 14976); ENST00000495003.1 (SEQ ID NO: 14978) |
| transcript | ENST00000401558.7 (SEQ ID NO: 14938); ENST00000404992.6 (SEQ ID NO: 14939); |
| | ENST00000406957.5 (SEQ ID NO: 14940); ENST00000420673.5 (SEQ ID NO: 14942); |
| | ENST00000422552.5 (SEQ ID NO: 14944); ENST00000428210.5 (SEQ ID NO: 14945); |
| | ENST00000436018.1 (SEQ ID NO: 14947); ENST00000437159.5 (SEQ ID NO: 14949); |
| | ENST00000443240.5 (SEQ ID NO: 14950); ENST00000449444.5 (SEQ ID NO: 14952); |
| | ENST00000451765.5 (SEQ ID NO: 14953); ENST00000457483.5 (SEQ ID NO: 14955); |
| | ENST00000460037.1 (SEQ ID NO: 14957); ENST00000461407.5 (SEQ ID NO: 14959); |
| | ENST00000468259.1 (SEQ ID NO: 14961); ENST00000469337.1 (SEQ ID NO: 14963); |
| | ENST00000475744.1 (SEQ ID NO: 14965); ENST00000476585.5 (SEQ ID NO: 14967); |
| | ENST00000481073.5 (SEQ ID NO: 14969); ENST00000481214.1 (SEQ ID NO: 14971); |
| | ENST00000489954.1 (SEQ ID NO: 14973); ENST00000492182.5 (SEQ ID NO: 14975); |
| | ENST00000494468.1 (SEQ ID NO: 14977); ENST00000495003.1 (SEQ ID NO: 14979) |

Target: YY1AP1

| | |
|---|---|
| pre-mRNA | ENST00000295566.8 (SEQ ID NO: 14980); ENST00000311573.9 (SEQ ID NO: 14982); |
| transcript | ENST00000347088.9 (SEQ ID NO: 14984); ENST00000354691.9 (SEQ ID NO: 14986); |
| | ENST00000355499.8 (SEQ ID NO: 14988); ENST00000359205.9 (SEQ ID NO: 14990); |
| | ENST00000361140.8 (SEQ ID NO: 14992); ENST00000361831.9 (SEQ ID NO: 14994); |
| | ENST00000368330.6 (SEQ ID NO: 14996); ENST00000368339.9 (SEQ ID NO: 14998); |
| | ENST00000368340.9 (SEQ ID NO: 15000); ENST00000404643.5 (SEQ ID NO: 15002); |
| | ENST00000405763.7 (SEQ ID NO: 15004); ENST00000407221.5 (SEQ ID NO: 15006); |
| | ENST00000436865.5 (SEQ ID NO: 15008); ENST00000442834.6 (SEQ ID NO: 15010); |
| | ENST00000443231.5 (SEQ ID NO: 15012); ENST00000454523.5 (SEQ ID NO: 15014); |
| | ENST00000466366.1 (SEQ ID NO: 15016); ENST00000476027.5 (SEQ ID NO: 15018); |
| | ENST00000476093.5 (SEQ ID NO: 15020); ENST00000477470.1 (SEQ ID NO: 15022); |
| | ENST00000488784.5 (SEQ ID NO: 15024); ENST00000493625.5 (SEQ ID NO: 15026); |
| | ENST00000496324.5 (SEQ ID NO: 15028) |
| transcript | ENST00000295566.8 (SEQ ID NO: 14981); ENST00000311573.9 (SEQ ID NO: 14983); |
| | ENST00000347088.9 (SEQ ID NO: 14985); ENST00000354691.9 (SEQ ID NO: 14987); |
| | ENST00000355499.8 (SEQ ID NO: 14989); ENST00000359205.9 (SEQ ID NO: 14991); |
| | ENST00000361140.8 (SEQ ID NO: 14993); ENST00000361831.9 (SEQ ID NO: 14995); |
| | ENST00000368330.6 (SEQ ID NO: 14997); ENST00000368339.9 (SEQ ID NO: 14999); |
| | ENST00000368340.9 (SEQ ID NO: 15001); ENST00000404643.5 (SEQ ID NO: 15003); |
| | ENST00000405763.7 (SEQ ID NO: 15005); ENST00000407221.5 (SEQ ID NO: 15007); |
| | ENST00000436865.5 (SEQ ID NO: 15009); ENST00000442834.6 (SEQ ID NO: 15011); |
| | ENST00000443231.5 (SEQ ID NO: 15013); ENST00000454523.5 (SEQ ID NO: 15015); |
| | ENST00000466366.1 (SEQ ID NO: 15017); ENST00000476027.5 (SEQ ID NO: 15019); |
| | ENST00000476093.5 (SEQ ID NO: 15021); ENST00000477470.1 (SEQ ID NO: 15023); |
| | ENST00000488784.5 (SEQ ID NO: 15025); ENST00000493625.5 (SEQ ID NO: 15027); |
| | ENST00000496324.5 (SEQ ID NO: 15029) |

Target: ZC3H14

| | |
|---|---|
| pre-mRNA | ENST00000251038.10 (SEQ ID NO: 15889); ENST00000302216.12 (SEQ ID NO: 15890); |
| transcript | ENST00000318308.10 (SEQ ID NO: 15032); ENST00000336693.8 (SEQ ID NO: 15891); |
| | ENST00000393514.9 (SEQ ID NO: 15892); ENST00000406216.7 (SEQ ID NO: 15036); |
| | ENST00000553495.5 (SEQ ID NO: 15038); ENST00000554020.5 (SEQ ID NO: 15040); |
| | ENST00000554602.5 (SEQ ID NO: 15042); ENST00000555120.1 (SEQ ID NO: 15044); |
| | ENST00000555755.5 (SEQ ID NO: 15893); ENST00000555792.1 (SEQ ID NO: 15047); |
| | ENST00000555799.5 (SEQ ID NO: 15049); ENST00000555851.6 (SEQ ID NO: 15051); |
| | ENST00000555900.5 (SEQ ID NO: 15053); ENST00000556000.5 (SEQ ID NO: 15894); |
| | ENST00000556110.5 (SEQ ID NO: 15056); ENST00000556158.5 (SEQ ID NO: 15058); |
| | ENST00000556945.5 (SEQ ID NO: 15895); ENST00000557047.2 (SEQ ID NO: 15061); |
| | ENST00000557491.1 (SEQ ID NO: 15063); ENST00000557605.1 (SEQ ID NO: 15065); |
| | ENST00000557607.5 (SEQ ID NO: 15896); ENST00000557693.5 (SEQ ID NO: 15068); |
| | ENST00000557737.1 (SEQ ID NO: 15070); ENST00000649731.1 (SEQ ID NO: 15897) |
| transcript | ENST00000251038.10 (SEQ ID NO: 15030); ENST00000302216.12 (SEQ ID NO: 15031); |
| | ENST00000318308.10 (SEQ ID NO: 15033); ENST00000336693.8 (SEQ ID NO: 15034); |
| | ENST00000393514.9 (SEQ ID NO: 15035); ENST00000406216.7 (SEQ ID NO: 15037); |
| | ENST00000553495.5 (SEQ ID NO: 15039); ENST00000554020.5 (SEQ ID NO: 15041); |
| | ENST00000554602.5 (SEQ ID NO: 15043); ENST00000555120.1 (SEQ ID NO: 15045); |
| | ENST00000555755.5 (SEQ ID NO: 15046); ENST00000555792.1 (SEQ ID NO: 15048); |
| | ENST00000555799.5 (SEQ ID NO: 15050); ENST00000555851.6 (SEQ ID NO: 15052); |
| | ENST00000555900.5 (SEQ ID NO: 15054); ENST00000556000.5 (SEQ ID NO: 15055); |
| | ENST00000556110.5 (SEQ ID NO: 15057); ENST00000556158.5 (SEQ ID NO: 15059); |
| | ENST00000556945.5 (SEQ ID NO: 15060); ENST00000557047.2 (SEQ ID NO: 15062); |
| | ENST00000557491.1 (SEQ ID NO: 15064); ENST00000557605.1 (SEQ ID NO: 15066); |
| | ENST00000557607.5 (SEQ ID NO: 15067); ENST00000557693.5 (SEQ ID NO: 15069); |
| | ENST00000557737.1 (SEQ ID NO: 15071); ENST00000649731.1 (SEQ ID NO: 15072) |

[0741] Where reference is made to a polynucleic acid polymer sequence, the skilled person will understand that one or more substitutions may be tolerated, optionally two substitutions may be tolerated in the sequence, such that it maintains the ability to hybridize to the target sequence; or where the substitution is in a target sequence, the ability to be recognized as the target sequence. References to sequence identity may be determined by BLAST sequence alignment using standard/default parameters. For example, the sequence may have 99% identity and still function according to the present disclosure. In other embodiments, the sequence may have 98% identity and still function according to the present disclosure. In another embodiment, the sequence may have 95% identity and still function according to the present disclosure. In another embodiment, the sequence may have 90% identity and still function according to the present disclosure.

### Antisense Oligomers

[0742] Provided herein is a composition comprising an antisense oligomer that prevents alternative splicing by binding to a targeted portion of a SYNGAP1 pre-mRNA. Provided herein also is a composition comprising an antisense oligomer that prevents alternative splicing by binding to a targeted portion of a target pre-mRNA, wherein the target is any one selected from the group consisting of ABCA5, ABCA7, ABCC3, ABCC5, ABCC8, ABCD1, ABR, ACAD9, ACAP1, ACOX2, ACSF3, ACTN4, ADAM17, ADAMTS13, AKR1E2, ALAD, ALG3, ANKRD29, ANKS3, ANO4, AP3B2, AP3M1, AP5Z1, ARNTL, ASAP3, ATRX, BBS2, BBS4, BRD9, CALM3, CARS1, CASP9, CATSPER1, CCDC40, CCDC88B, CD4, CD58, CES2, CHFR, CLCN2, CNOT3, CNTROB, COL5A3, CPSF1, CSPP1, CTF1, CTH, CYP3A5, DAB2IP, DBN1, DDX51, DEAF1, DGKE, DHDDS, DMKN, DNHD1, DOCK8, DOK5, EIF2B5, ELAC2, ELP1, ENTPD4, ESRRA, ESS2, ETAA1, ETHE1, FANCA, FASTK, FASTKD3, FPGS, FREM1, GAS8, GCK, GGA1, GGA3, GGT1, GLMN, GON4L, GRB14, HDAC3, HELQ, HP1BP3, HPS1, HPS4, IDUA, IFT122, IL17RC, IMPDH1, INVS, IRF3, KCTD3, KLKB1, KYAT1, LAMC3, LDAH, LIMS2, MALT1, MAP3K7, MAPK13, MCAT, MCEE, MPI, MSTO1, NBEAL2, NLE1, NLRC5, NOM1, NOP58, NPHP1, NPR1, NUP188, OSGEP, PABPC4, PCOLCE, PHKA2, PIDD1, PKD1, PLA2G6, PLD2, PLEKHG5, PNPO, POLE, PON2, PRMT7, PRODH, PRPF3, PRPF4, PYCR1, RAD52, REXO1, RFX5, RHBDF2, RMND1, ROBO3, RPGRIP1, RTTN, RUFY3, SEMA3B, SEMA3F, SH2D3A, SIK3, SIRT3, SKIV2L, SLC2A13, SLC12A7, SLC22A3, SLC25A13, SLC25A37, SLC27A5, SLC30A9, SLC30A10, SMPD1, SMTN, SNRPB, SP140, STAMBP, STXBP2, SULF2, SYNGAP1, SYNJ2, TAZ, TBL2, TDRD7, TECPR2, TFB1M, TM6SF1, TNK2, TOE1, TOR1B, TRAPPC6B, TRIP4, TRMT2A, TRMU, TRPV4, TTC19, TYMP, UMPS, UROD, WDR11, WDR62, WIPI1, WRAP53, XPO1, YY1AP1, and ZC3H14. As used herein, the terms “ASO” and “antisense oligomer” are used interchangeably and refer to an oligomer such as a polynucleotide or polynucleic acid polymer, comprising nucleobases that hybridizes to a target nucleic acid (e.g., a SYNGAP1 pre-mRNA) sequence by Watson-Crick base pairing or wobble base pairing (G-U). The ASO may have exact sequence complementary to the target sequence or near complementarity (e.g., sufficient complementarity to bind the target sequence and enhancing splicing at a splice site). ASOs are designed so that they bind (hybridize) to a target nucleic acid (e.g., a targeted portion of a pre-mRNA transcript) and remain hybridized under physiological conditions. Typically, if they hybridize to a site other than the intended (targeted) nucleic acid sequence, they hybridize to a limited number of sequences that are not a target nucleic acid (to a few sites other than a target nucleic acid). Design of an ASO can take into consideration the occurrence of the nucleic acid sequence of the targeted portion of the pre-mRNA transcript or a sufficiently similar nucleic acid sequence in other locations in the genome or cellular pre-mRNA or transcriptome, such that the likelihood the ASO will bind other sites and cause “off-target” effects is limited. Any antisense oligomers known in the art, for example in PCT Application No. PCT/US2014/054151, published as WO 2015/035091, titled “Reducing Nonsense-Mediated mRNA Decay,” incorporated by reference herein, can be used to practice the methods described herein.

[0743] In some embodiments, ASOs “specifically hybridize” to or are “specific” to a target nucleic acid or a targeted portion of a RIC pre-mRNA. Typically, such hybridization occurs with a Tm substantially greater than 37° C., preferably at least 50° C., and typically between 60° C. to approximately 90° C. Such hybridization preferably corresponds to stringent hybridization conditions. At a given ionic strength and pH, the Tm is the temperature at which 50% of a target sequence hybridizes to a complementary oligonucleotide.

[0744] Oligomers, such as oligonucleotides, are “complementary” to one another when hybridization occurs in an antiparallel configuration between two single-stranded polynucleotides. A double-stranded polynucleotide can be “complementary” to another polynucleotide, if hybridization can occur between one of the strands of the first polynucleotide and the second. Complementarity (the degree to which one polynucleotide is complementary with another) is quantifiable in terms of the proportion (e.g., the percentage) of bases in opposing strands that are expected to form hydrogen bonds with each other, according to generally accepted base-pairing rules. The sequence of an antisense oligomer (ASO) need not be 100% complementary to that of its target nucleic acid to hybridize. In certain embodiments, ASOs can comprise at least 70%, at least 75%, at least 80%, at least 85%, at least 90%, at least 95%, at least 96%, at least 97%, at least 98%, or at least 99% sequence complementarity to a target region within the target nucleic acid sequence to which they are targeted. For example, an ASO in which 18 of 20 nucleobases of the oligomeric compound are complementary to a target region, and would therefore specifically hybridize, would represent 90 percent complementarity. In this example, the remaining non-complementary nucleobases may be clustered together or interspersed with complementary nucleobases and need not be contiguous to each other or to complementary nucleobases. Percent complementarity of an ASO with a region of a target nucleic acid can be determined routinely using BLAST programs (basic local alignment search tools) and PowerBLAST programs known in the art (Altschul, et al., J. Mol. Biol., 1990, 215, 403-410; Zhang and Madden, Genome Res., 1997, 7, 649-656).

[0745] An ASO need not hybridize to all nucleobases in a target sequence and the nucleobases to which it does hybridize may be contiguous or noncontiguous. ASOs may hybridize over one or more segments of a pre-mRNA transcript, such that intervening or adjacent segments are not involved in the hybridization event (e.g., a loop structure or hairpin structure may be formed). In certain embodiments, an ASO hybridizes to noncontiguous nucleobases in a target pre-mRNA transcript. For example, an ASO can hybridize to nucleobases in a pre-mRNA transcript that are separated by one or more nucleobase(s) to which the ASO does not hybridize.

[0746] The ASOs described herein comprise nucleobases that are complementary to nucleobases present in a target portion of a NSAE pre-mRNA. The term ASO embodies oligonucleotides and any other oligomeric molecule that comprises nucleobases capable of hybridizing to a complementary nucleobase on a target mRNA but does not comprise a sugar moiety, such as a peptide nucleic acid (PNA). The ASOs may comprise naturally-occurring nucleotides, nucleotide analogs, modified nucleotides, or any combination of two or three of the preceding. The term “naturally occurring nucleotides” includes deoxyribonucleotides and ribonucleotides. The term “modified nucleotides” includes nucleotides with modified or substituted sugar groups and/or having a modified backbone. In some embodiments, all of the nucleotides of the ASO are modified nucleotides. Chemical modifications of ASOs or components of ASOs that are compatible with the methods and compositions described herein will be evident to one of skill in the art and can be found, for example, in U.S. Pat. No. 8,258,109 B2, U.S. Pat. No. 5,656,612, U.S. Patent Publication No. 2012/0190728, and Dias and Stein, Mol. Cancer Ther. 2002, 347-355, herein incorporated by reference in their entirety.

[0747] One or more nucleobases of an ASO may be any naturally occurring, unmodified nucleobase such as adenine, guanine, cytosine, thymine and uracil, or any synthetic or modified nucleobase that is sufficiently similar to an unmodified nucleobase such that it is capable of hydrogen bonding with a nucleobase present on a target pre-mRNA. Examples of modified nucleobases include, without limitation, hypoxanthine, xanthine, 7-methylguanine, 5, 6-dihydrouracil, 5-methylcytosine, and 5-hydroxymethoylcytosine.

[0748] The ASOs described herein also comprise a backbone structure that connects the components of an oligomer. The term “backbone structure” and “oligomer linkages” may be used interchangeably and refer to the connection between monomers of the ASO. In naturally occurring oligonucleotides, the backbone comprises a 3′-5′ phosphodiester linkage connecting sugar moieties of the oligomer. The backbone structure or oligomer linkages of the ASOs described herein may include (but are not limited to) phosphorothioate, phosphorodithioate, phosphoroselenoate, phosphorodiselenoate, phosphoroanilothioate, phosphoraniladate, phosphoramidate, and the like. See, e.g., LaPlanche, et al., Nucleic Acids Res. 14:9081 (1986); Stec, et al., J. Am. Chem. Soc. 106:6077 (1984), Stein, et al., Nucleic Acids Res. 16:3209 (1988), Zon, et al., Anti Cancer Drug Design 6:539 (1991); Zon, et al., Oligonucleotides and Analogues: A Practical Approach, pp. 87-108 (F. Eckstein, Ed., Oxford University Press, Oxford England (1991)); Stec, et al., U.S. Pat. No. 5,151,510; Uhlmann and Peyman, Chemical Reviews 90:543 (1990). In some embodiments, the backbone structure of the ASO does not contain phosphorous but rather contains peptide bonds, for example in a peptide nucleic acid (PNA), or linking groups including carbamate, amides, and linear and cyclic hydrocarbon groups. In some embodiments, the backbone modification is a phosphothioate linkage. In some embodiments, the backbone modification is a phosphoramidate linkage.

[0749] In some embodiments, the stereochemistry at each of the phosphorus intemucleotide linkages of the ASO backbone is random. In some embodiments, the stereochemistry at each of the phosphorus internucleotide linkages of the ASO backbone is controlled and is not random. For example, U.S. Pat. App. Pub. No. 2014/0194610, “Methods for the Synthesis of Functionalized Nucleic Acids,” incorporated herein by reference, describes methods for independently selecting the handedness of chirality at each phosphorous atom in a nucleic acid oligomer. In some embodiments, an ASO used in the methods of the invention, including, but not limited to, any of the ASOs set forth herein in Table 1, comprises an ASO having phosphorus internucleotide linkages that are not random. In some embodiments, a composition used in the methods of the invention comprises a pure diastereomeric ASO. In some embodiments, a composition used in the methods of the invention comprises an ASO that has diastereomeric purity of at least about 90%, at least about 91%, at least about 92%, at least about 93%, at least about 94%, at least about 95%, at least about 96%, at least about 97%, at least about 98%, at least about 99%, about 100%, about 90% to about 100%, about 91% to about 100%, about 92% to about 100%, about 93% to about 100%, about 94% to about 100%, about 95% to about 100%, about 96% to about 100%, about 97% to about 100%, about 98% to about 100%, or about 99% to about 100%.

[0750] In some embodiments, the ASO has a nonrandom mixture of Rp and Sp configurations at its phosphorus internucleotide linkages. For example, it has been suggested that a mix of Rp and Sp is required in antisense oligonucleotides to achieve a balance between good activity and nuclease stability (Wan, et al., 2014, “Synthesis, biophysical properties and biological activity of second generation antisense oligonucleotides containing chiral phosphorothioate linkages,” Nucleic Acids Research 42(22): 13456-13468, incorporated herein by reference). In some embodiments, an ASO used in the methods of the invention, including, but not limited to, any of the ASOs set forth herein in Table 1, comprises about 5-100% Rp, at least about 5% Rp, at least about 10% Rp, at least about 15% Rp, at least about 20% Rp, at least about 25% Rp, at least about 30% Rp, at least about 35% Rp, at least about 40% Rp, at least about 45% Rp, at least about 50% Rp, at least about 55% Rp, at least about 60% Rp, at least about 65% Rp, at least about 70% Rp, at least about 75% Rp, at least about 80% Rp, at least about 85% Rp, at least about 90% Rp, or at least about 95% Rp, with the remainder Sp, or about 100% Rp. In some embodiments, an ASO used in the methods of the invention, including, but not limited to, any of the ASOs set forth herein in Table 1, comprises about 10% to about 100% Rp, about 15% to about 100% Rp, about 20% to about 100% Rp, about 25% to about 100% Rp, about 30% to about 100% Rp, about 35% to about 100% Rp, about 40% to about 100% Rp, about 45% to about 100% Rp, about 50% to about 100% Rp, about 55% to about 100% Rp, about 60% to about 100% Rp, about 65% to about 100% Rp, about 70% to about 100% Rp, about 75% to about 100% Rp, about 80% to about 100% Rp, about 85% to about 100% Rp, about 90% to about 100% Rp, or about 95% to about 100% Rp, about 20% to about 80% Rp, about 25% to about 75% Rp, about 30% to about 70% Rp, about 40% to about 60% Rp, or about 45% to about 55% Rp, with the remainder Sp.

[0751] In embodiments, an ASO used in the methods of the invention, including, but not limited to, any of the ASOs set forth herein in Table 1, comprises about 5-100% Sp, at least about 5% Sp, at least about 10% Sp, at least about 15% Sp, at least about 20% Sp, at least about 25% Sp, at least about 30% Sp, at least about 35% Sp, at least about 40% Sp, at least about 45% Sp, at least about 50% Sp, at least about 55% Sp, at least about 60% Sp, at least about 65% Sp, at least about 70% Sp, at least about 75% Sp, at least about 80% Sp, at least about 85% Sp, at least about 90% Sp, or at least about 95% Sp, with the remainder Rp, or about 100% Sp. In some embodiments, an ASO used in the methods of the invention, including, but not limited to, any of the ASOs set forth herein in Table 1, comprises about 10% to about 100% Sp, about 15% to about 100% Sp, about 20% to about 100% Sp, about 25% to about 100% Sp, about 30% to about 100% Sp, about 35% to about 100% Sp, about 40% to about 100% Sp, about 45% to about 100% Sp, about 50% to about 100% Sp, about 55% to about 100% Sp, about 60% to about 100% Sp, about 65% to about 100% Sp, about 70% to about 100% Sp, about 75% to about 100% Sp, about 80% to about 100% Sp, about 85% to about 100% Sp, about 90% to about 100% Sp, or about 95% to about 100% Sp, about 20% to about 80% Sp, about 25% to about 75% Sp, about 30% to about 70% Sp, about 40% to about 60% Sp, or about 45% to about 55% Sp, with the remainder Rp.

[0752] Any of the ASOs described herein may contain a sugar moiety that comprises ribose or deoxyribose, as present in naturally occurring nucleotides, or a modified sugar moiety or sugar analog, including a morpholine ring. Non-limiting examples of modified sugar moieties include 2′ substitutions such as 2′-O-methyl (2′-O-Me), 2′-O-methoxyethyl (2′MOE), 2′-O-aminoethyl, 2′F; N3′->P5′ phosphoramidate, 2′dimethylaminooxyethoxy, 2′dimethylaminoethoxyethoxy, 2′-guanidinidium, 2′-O-guanidinium ethyl, carbamate modified sugars, and bicyclic modified sugars. In some embodiments, the sugar moiety modification is selected from 2′-O-Me, 2′F, and 2′MOE. In some embodiments, the sugar moiety modification is an extra bridge bond, such as in a locked nucleic acid (LNA). In some embodiments the sugar analog contains a morpholine ring, such as phosphorodiamidate morpholino (PMO). In some embodiments, the sugar moiety comprises a ribofuransyl or 2′deoxyribofuransyl modification. In some embodiments, the sugar moiety comprises 2′4′-constrained 2′O-methyloxyethyl (cMOE) modifications. In some embodiments, the sugar moiety comprises cEt 2′, 4′ constrained 2′-0 ethyl BNA modifications. In some embodiments, the sugar moiety comprises tricycloDNA (tcDNA) modifications. In some embodiments, the sugar moiety comprises ethylene nucleic acid (ENA) modifications. In some embodiments, the sugar moiety comprises MCE modifications. Modifications are known in the art and described in the literature, e.g., by Jarver, et al., 2014, “A Chemical View of Oligonucleotides for Exon Skipping and Related Drug Applications,” Nucleic Acid Therapeutics 24(1): 37-47, incorporated by reference for this purpose herein.

[0753] In some embodiments, each monomer of the ASO is modified in the same way, for example each linkage of the backbone of the ASO comprises a phosphorothioate linkage or each ribose sugar moiety comprises a 2′O-methyl modification. Such modifications that are present on each of the monomer components of an ASO are referred to as “uniform modifications.” In some embodiments, a combination of different modifications may be desired, for example, an ASO may comprise a combination of phosphorodiamidate linkages and sugar moieties comprising morpholine rings (morpholinos). Combinations of different modifications to an ASO are referred to as “mixed modifications” or “mixed chemistries.”

[0754] In some embodiments, the ASO comprises one or more backbone modification. In some embodiments, the ASO comprises one or more sugar moiety modification. In some embodiments, the ASO comprises one or more backbone modification and one or more sugar moiety modification. In some embodiments, the ASO comprises 2′MOE modifications and a phosphorothioate backbone. In some embodiments, the ASO comprises a phosphorodiamidate morpholino (PMO). In some embodiments, the ASO comprises a peptide nucleic acid (PNA). Any of the ASOs or any component of an ASO (e.g., a nucleobase, sugar moiety, backbone) described herein may be modified in order to achieve desired properties or activities of the ASO or reduce undesired properties or activities of the ASO. In some embodiments, an ASO or one or more component of any ASO may be modified to enhance binding affinity to a target sequence on a pre-mRNA transcript; reduce binding to any non-target sequence; reduce degradation by cellular nucleases (i.e., RNase H); improve uptake of the ASO into a cell and/or into the nucleus of a cell; alter the pharmacokinetics or pharmacodynamics of the ASO; and modulate the half-life of the ASO.

[0755] In some embodiments, the ASOs are comprised of 2′-O-(2-methoxyethyl) (MOE) phosphorothioate-modified nucleotides. ASOs comprised of such nucleotides are especially well-suited to the methods disclosed herein; oligomers having such modifications have been shown to have significantly enhanced resistance to nuclease degradation and increased bioavailability, making them suitable, for example, for oral delivery in some embodiments described herein. See e.g., Geary, et al., J Pharmacol Exp Ther. 2001; 296(3):890-7; Geary, et al., J Pharmacol Exp Ther. 2001; 296(3):898-904.

[0756] Methods of synthesizing ASOs will be known to one of skill in the art. Alternatively or in addition, ASOs may be obtained from a commercial source.

[0757] Unless specified otherwise, the left-hand end of single-stranded nucleic acid (e.g., pre-mRNA transcript, oligonucleotide, ASO, etc.) sequences is the 5′ end and the left-hand direction of single or double-stranded nucleic acid sequences is referred to as the 5′ direction. Similarly, the right-hand end or direction of a nucleic acid sequence (single or double stranded) is the 3′ end or direction. Generally, a region or sequence that is 5′ to a reference point in a nucleic acid is referred to as “upstream,” and a region or sequence that is 3′ to a reference point in a nucleic acid is referred to as “downstream.” Generally, the 5′ direction or end of an mRNA is where the initiation or start codon is located, while the 3′ end or direction is where the termination codon is located. In some embodiments, nucleotides that are upstream of a reference point in a nucleic acid may be designated by a negative number, while nucleotides that are downstream of a reference point may be designated by a positive number. For example, a reference point (e.g., an exon-exon junction in mRNA) may be designated as the “zero” site, and a nucleotide that is directly adjacent and upstream of the reference point is designated “minus one,” e.g., “−1,” while a nucleotide that is directly adjacent and downstream of the reference point is designated “plus one,” e.g., “+1.”

[0758] In some embodiments, the ASOs are complementary to (and bind to) a targeted portion of a SYNGAP1 pre-mRNA that is downstream (in the 3′ direction) of the 5′ splice site of the NSAE in a SYNGAP1 pre-mRNA (e.g., the direction designated by positive numbers relative to the 5′ splice site). In some embodiments, the ASOs are complementary to a targeted portion of the SYNGAP1 pre-mRNA that is within the region about +6 to about +500 relative to the 5′ splice site of the NSAE. In some embodiments, the ASO is not complementary to nucleotides +1 to +5 relative to the 5′ splice site (the first five nucleotides located downstream of the 5′ splice site). In some embodiments, the ASOs may be complementary to a targeted portion of a SYNGAP1 pre-mRNA that is within the region between nucleotides +6 and +100 relative to the 5′ splice site of the NSAE. In some aspects, the ASOs are complementary to a targeted portion that is within the region about +6 to about +500, about +6 to about +490, about +6 to about +480, about +6 to about +470, about +6 to about +460, about +6 to about +450, about +6 to about +440, about +6 to about +430, about +6 to about +420, about +6 to about +410, about +6 to about +400, about +6 to about +390, about +6 to about +380, about +6 to about +370, about +6 to about +360, about +6 to about +350, about +6 to about +340, about +6 to about +330, about +6 to about +320, about +6 to about +310, about +6 to about +300, about +6 to about +290, about +6 to about +280, about +6 to about +270, about +6 to about +260, about +6 to about +250, about +6 to about +240, about +6 to about +230, about +6 to about +220, about +6 to about +210, about +6 to about +200, about +6 to about +190, about +6 to about +180, about +6 to about +170, about +6 to about +160, about +6 to about +150, about +6 to about +140, about +6 to about +130, about +6 to about +120, about +6 to about +110, about +6 to about +100, about +6 to about +90, about +6 to about +80, about +6 to about +70, about +6 to about +60, about +6 to about +50, about +6 to about +40, about +6 to about +30, or about +6 to about +20 relative to 5′ splice site of the NSAE.

[0759] In some embodiments, the ASOs are complementary to (and bind to) a targeted portion of a target pre-mRNA that is downstream (in the 3′ direction) of the 5′ splice site of the NSAE in a target pre-mRNA (e.g., the direction designated by positive numbers relative to the 5′ splice site), wherein the target is any one selected from the group consisting of ABCA5, ABCA7, ABCC3, ABCC5, ABCC8, ABCD1, ABR, ACAD9, ACAP1, ACOX2, ACSF3, ACTN4, ADAM17, ADAMTS13, AKR1E2, ALAD, ALG3, ANKRD29, ANKS3, ANO4, AP3B2, AP3M1, AP5Z1, ARNTL, ASAP3, ATRX, BBS2, BBS4, BRD9, CALM3, CARS1, CASP9, CATSPER1, CCDC40, CCDC88B, CD4, CD58, CES2, CHFR, CLCN2, CNOT3, CNTROB, COL5A3, CPSF1, CSPP1, CTF1, CTH, CYP3A5, DAB2IP, DBN1, DDX51, DEAF1, DGKE, DHDDS, DMKN, DNHD1, DOCK8, DOK5, EIF2B5, ELAC2, ELP1, ENTPD4, ESRRA, ESS2, ETAA1, ETHE1, FANCA, FASTK, FASTKD3, FPGS, FREM1, GAS8, GCK, GGA1, GGA3, GGT1, GLMN, GON4L, GRB14, HDAC3, HELQ, HP1BP3, HPS1, HPS4, IDUA, IFT122, IL17RC, IMPDH1, INVS, IRF3, KCTD3, KLKB1, KYAT1, LAMC3, LDAH, LIMS2, MALT1, MAP3K7, MAPK13, MCAT, MCEE, MPI, MSTO1, NBEAL2, NLE1, NLRC5, NOM1, NOP58, NPHP1, NPR1, NUP188, OSGEP, PABPC4, PCOLCE, PHKA2, PIDD1, PKD1, PLA2G6, PLD2, PLEKHG5, PNPO, POLE, PON2, PRMT7, PRODH, PRPF3, PRPF4, PYCR1, RAD52, REXO1, RFX5, RHBDF2, RMND1, ROBO3, RPGRIP1, RTTN, RUFY3, SEMA3B, SEMA3F, SH2D3A, SIK3, SIRT3, SKIV2L, SLC2A13, SLC12A7, SLC22A3, SLC25A13, SLC25A37, SLC27A5, SLC30A9, SLC30A10, SMPD1, SMTN, SNRPB, SP140, STAMBP, STXBP2, SULF2, SYNGAP1, SYNJ2, TAZ, TBL2, TDRD7, TECPR2, TFB1M, TM6SF1, TNK2, TOE1, TOR1B, TRAPPC6B, TRIP4, TRMT2A, TRMU, TRPV4, TTC19, TYMP, UMPS, UROD, WDR11, WDR62, WIPI1, WRAP53, XPO1, YY1AP1, and ZC3H14. In some embodiments, the ASOs are complementary to a targeted portion of the target pre-mRNA that is within the region about +6 to about +500 relative to the 5′ splice site of the NSAE. In some embodiments, the ASO is not complementary to nucleotides +1 to +5 relative to the 5′ splice site (the first five nucleotides located downstream of the 5′ splice site). In some embodiments, the ASOs may be complementary to a targeted portion of a target pre-mRNA that is within the region between nucleotides +6 and +100 relative to the 5′ splice site of the NSAE. In some aspects, the ASOs are complementary to a targeted portion that is within the region about +6 to about +500, about +6 to about +490, about +6 to about +480, about +6 to about +470, about +6 to about +460, about +6 to about +450, about +6 to about +440, about +6 to about +430, about +6 to about +420, about +6 to about +410, about +6 to about +400, about +6 to about +390, about +6 to about +380, about +6 to about +370, about +6 to about +360, about +6 to about +350, about +6 to about +340, about +6 to about +330, about +6 to about +320, about +6 to about +310, about +6 to about +300, about +6 to about +290, about +6 to about +280, about +6 to about +270, about +6 to about +260, about +6 to about +250, about +6 to about +240, about +6 to about +230, about +6 to about +220, about +6 to about +210, about +6 to about +200, about +6 to about +190, about +6 to about +180, about +6 to about +170, about +6 to about +160, about +6 to about +150, about +6 to about +140, about +6 to about +130, about +6 to about +120, about +6 to about +110, about +6 to about +100, about +6 to about +90, about +6 to about +80, about +6 to about +70, about +6 to about +60, about +6 to about +50, about +6 to about +40, about +6 to about +30, or about +6 to about +20 relative to 5′ splice site of the NSAE.

[0760] In some embodiments, the ASOs are complementary to (and bind to) a targeted portion of a SYNGAP1 pre-mRNA that is upstream (in the 5′ direction) of the 3′ splice site of the NSAE in a SYNGAP1 pre-mRNA (e.g., the direction designated by negative numbers relative to the 3′ splice site). In some embodiments, the ASOs are complementary to a targeted portion of the SYNGAP1 pre-mRNA that is within the region about −16 to about −500 relative to the 3′ splice site of the NSAE. In some embodiments, the ASO is not complementary to nucleotides −1 to −15 relative to the 5′ splice site (the first five nucleotides located downstream of the 5′ splice site). In some embodiments, the ASOs may be complementary to a targeted portion of a SYNGAP1 pre-mRNA that is within the region between nucleotides −16 and −100 relative to the 3′ splice site of the NSAE. In some aspects, the ASOs are complementary to a targeted portion that is within the region about +6 to about +500, about +6 to about +490, about +6 to about +480, about +6 to about +470, about +6 to about +460, about +6 to about +450, about +6 to about +440, about +6 to about +430, about +6 to about +420, about +6 to about +410, about +6 to about +400, about +6 to about +390, about +6 to about +380, about +6 to about +370, about +6 to about +360, about +6 to about +350, about +6 to about +340, about +6 to about +330, about +6 to about +320, about +6 to about +310, about +6 to about +300, about +6 to about +290, about +6 to about +280, about +6 to about +270, about +6 to about +260, about +6 to about +250, about +6 to about +240, about +6 to about +230, about +6 to about +220, about +6 to about +210, about +6 to about +200, about +6 to about +190, about +6 to about +180, about +6 to about +170, about +6 to about +160, about +6 to about +150, about +6 to about +140, about +6 to about +130, about +6 to about +120, about +6 to about +110, about +6 to about +100, about +6 to about +90, about +6 to about +80, about +6 to about +70, about +6 to about +60, about +6 to about +50, about +6 to about +40, about +6 to about +30, or about +6 to about +20 relative to 3′ splice site of the NSAE.

[0761] In some embodiments, the ASOs are complementary to (and bind to) a targeted portion of a target pre-mRNA that is upstream (in the 5′ direction) of the 3′ splice site of the NSAE in a target pre-mRNA (e.g., the direction designated by negative numbers relative to the 3′ splice site), wherein the target is any one selected from the group consisting of ABCA5, ABCA7, ABCC3, ABCC5, ABCC8, ABCD1, ABR, ACAD9, ACAP1, ACOX2, ACSF3, ACTN4, ADAM17, ADAMTS13, AKR1E2, ALAD, ALG3, ANKRD29, ANKS3, ANO4, AP3B2, AP3M1, AP5Z1, ARNTL, ASAP3, ATRX, BBS2, BBS4, BRD9, CALM3, CARS1, CASP9, CATSPER1, CCDC40, CCDC88B, CD4, CD58, CES2, CHFR, CLCN2, CNOT3, CNTROB, COL5A3, CPSF1, CSPP1, CTF1, CTH, CYP3A5, DAB2IP, DBN1, DDX51, DEAF1, DGKE, DHDDS, DMKN, DNHD1, DOCK8, DOK5, EIF2B5, ELAC2, ELP1, ENTPD4, ESRRA, ESS2, ETAA1, ETHE1, FANCA, FASTK, FASTKD3, FPGS, FREM1, GAS8, GCK, GGA1, GGA3, GGT1, GLMN, GON4L, GRB14, HDAC3, HELQ, HP1BP3, HPS1, HPS4, IDUA, IFT122, IL17RC, IMPDH1, INVS, IRF3, KCTD3, KLKB1, KYAT1, LAMC3, LDAH, LIMS2, MALT1, MAP3K7, MAPK13, MCAT, MCEE, MPI, MSTO1, NBEAL2, NLE1, NLRC5, NOM1, NOP58, NPHP1, NPR1, NUP188, OSGEP, PABPC4, PCOLCE, PHKA2, PIDD1, PKD1, PLA2G6, PLD2, PLEKHG5, PNPO, POLE, PON2, PRMT7, PRODH, PRPF3, PRPF4, PYCR1, RAD52, REXO1, RFX5, RHBDF2, RMND1, ROBO3, RPGRIP1, RTTN, RUFY3, SEMA3B, SEMA3F, SH2D3A, SIK3, SIRT3, SKIV2L, SLC2A13, SLC12A7, SLC22A3, SLC25A13, SLC25A37, SLC27A5, SLC30A9, SLC30A10, SMPD1, SMTN, SNRPB, SP140, STAMBP, STXBP2, SULF2, SYNGAP1, SYNJ2, TAZ, TBL2, TDRD7, TECPR2, TFB1M, TM6SF1, TNK2, TOE1, TOR1B, TRAPPC6B, TRIP4, TRMT2A, TRMU, TRPV4, TTC19, TYMP, UMPS, UROD, WDR11, WDR62, WIPI1, WRAP53, XPO1, YY1AP1, and ZC3H14. In some embodiments, the ASOs are complementary to a targeted portion of the target pre-mRNA that is within the region about −16 to about −500 relative to the 3′ splice site of the NSAE. In some embodiments, the ASO is not complementary to nucleotides −1 to −15 relative to the 5′ splice site (the first five nucleotides located downstream of the 5′ splice site). In some embodiments, the ASOs may be complementary to a targeted portion of a target pre-mRNA that is within the region between nucleotides −16 and −100 relative to the 3′ splice site of the NSAE. In some aspects, the ASOs are complementary to a targeted portion that is within the region about +6 to about +500, about +6 to about +490, about +6 to about +480, about +6 to about +470, about +6 to about +460, about +6 to about +450, about +6 to about +440, about +6 to about +430, about +6 to about +420, about +6 to about +410, about +6 to about +400, about +6 to about +390, about +6 to about +380, about +6 to about +370, about +6 to about +360, about +6 to about +350, about +6 to about +340, about +6 to about +330, about +6 to about +320, about +6 to about +310, about +6 to about +300, about +6 to about +290, about +6 to about +280, about +6 to about +270, about +6 to about +260, about +6 to about +250, about +6 to about +240, about +6 to about +230, about +6 to about +220, about +6 to about +210, about +6 to about +200, about +6 to about +190, about +6 to about +180, about +6 to about +170, about +6 to about +160, about +6 to about +150, about +6 to about +140, about +6 to about +130, about +6 to about +120, about +6 to about +110, about +6 to about +100, about +6 to about +90, about +6 to about +80, about +6 to about +70, about +6 to about +60, about +6 to about +50, about +6 to about +40, about +6 to about +30, or about +6 to about +20 relative to 3′ splice site of the NSAE.

[0762] In some embodiments, the targeted portion of the SYNGAP1 pre-mRNA is within the region −4e relative to the 3′ splice site (5′ end) of the NSAE to +2e relative to the 5′ splice site (3′ end) of the NSAE.

[0763] In some embodiments, the targeted portion of the target pre-mRNA is within the region −4e relative to the 3′ splice site (5′ end) of the NSAE to +2e relative to the 5′ splice site (3′ end) of the NSAE, wherein the target is any one selected from the group consisting of ABCA5, ABCA7, ABCC3, ABCC5, ABCC8, ABCD1, ABR, ACAD9, ACAP1, ACOX2, ACSF3, ACTN4, ADAM17, ADAMTS13, AKR1E2, ALAD, ALG3, ANKRD29, ANKS3, ANO4, AP3B2, AP3M1, AP5Z1, ARNTL, ASAP3, ATRX, BBS2, BBS4, BRD9, CALM3, CARS1, CASP9, CATSPER1, CCDC40, CCDC88B, CD4, CD58, CES2, CHFR, CLCN2, CNOT3, CNTROB, COL5A3, CPSF1, CSPP1, CTF1, CTH, CYP3A5, DAB2IP, DBN1, DDX51, DEAF1, DGKE, DHDDS, DMKN, DNHD1, DOCK8, DOK5, EIF2B5, ELAC2, ELP1, ENTPD4, ESRRA, ESS2, ETAA1, ETHE1, FANCA, FASTK, FASTKD3, FPGS, FREM1, GAS8, GCK, GGA1, GGA3, GGT1, GLMN, GON4L, GRB14, HDAC3, HELQ, HP1BP3, HPS1, HPS4, IDUA, IFT122, IL17RC, IMPDH1, INVS, IRF3, KCTD3, KLKB1, KYAT1, LAMC3, LDAH, LIMS2, MALT1, MAP3K7, MAPK13, MCAT, MCEE, MPI, MSTO1, NBEAL2, NLE1, NLRC5, NOM1, NOP58, NPHP1, NPR1, NUP188, OSGEP, PABPC4, PCOLCE, PHKA2, PIDD1, PKD1, PLA2G6, PLD2, PLEKHG5, PNPO, POLE, PON2, PRMT7, PRODH, PRPF3, PRPF4, PYCR1, RAD52, REXO1, RFX5, RHBDF2, RMND1, ROBO3, RPGRIP1, RTTN, RUFY3, SEMA3B, SEMA3F, SH2D3A, SIK3, SIRT3, SKIV2L, SLC2A13, SLC12A7, SLC22A3, SLC25A13, SLC25A37, SLC27A5, SLC30A9, SLC30A10, SMPD1, SMTN, SNRPB, SP140, STAMBP, STXBP2, SULF2, SYNGAP1, SYNJ2, TAZ, TBL2, TDRD7, TECPR2, TFB1M, TM6SF1, TNK2, TOE1, TOR1B, TRAPPC6B, TRIP4, TRMT2A, TRMU, TRPV4, TTC19, TYMP, UMPS, UROD, WDR11, WDR62, WIPI1, WRAP53, XPO1, YY1AP1, and ZC3H14. The ASOs may be of any length suitable for specific binding and effective enhancement of splicing. In some embodiments, the ASOs consist of 8 to 50 nucleobases. For example, the ASO may be 8, 9, 10, 11, 12, 13, 14, 15, 16, 17, 18, 19, 20, 21, 22, 23, 24, 25, 26, 27, 28, 29, 30, 31, 32, 33, 34, 35, 40, 45, or 50 nucleobases in length. In some embodiments, the ASOs consist of more than 50 nucleobases. In some embodiments, the ASO is from 8 to 50 nucleobases, 8 to 40 nucleobases, 8 to 35 nucleobases, 8 to 30 nucleobases, 8 to 25 nucleobases, 8 to 20 nucleobases, 8 to 15 nucleobases, 9 to 50 nucleobases, 9 to 40 nucleobases, 9 to 35 nucleobases, 9 to 30 nucleobases, 9 to 25 nucleobases, 9 to 20 nucleobases, 9 to 15 nucleobases, 10 to 50 nucleobases, 10 to 40 nucleobases, 10 to 35 nucleobases, 10 to 30 nucleobases, 10 to 25 nucleobases, 10 to 20 nucleobases, 10 to 15 nucleobases, 11 to 50 nucleobases, 11 to 40 nucleobases, 11 to 35 nucleobases, 11 to 30 nucleobases, 11 to 25 nucleobases, 11 to 20 nucleobases, 11 to 15 nucleobases, 12 to 50 nucleobases, 12 to 40 nucleobases, 12 to 35 nucleobases, 12 to 30 nucleobases, 12 to 25 nucleobases, 12 to 20 nucleobases, 12 to 15 nucleobases, 13 to 50 nucleobases, 13 to 40 nucleobases, 13 to 35 nucleobases, 13 to 30 nucleobases, 13 to 25 nucleobases, 13 to 20 nucleobases, 14 to 50 nucleobases, 14 to 40 nucleobases, 14 to 35 nucleobases, 14 to 30 nucleobases, 14 to 25 nucleobases, 14 to 20 nucleobases, 15 to 50 nucleobases, 15 to 40 nucleobases, 15 to 35 nucleobases, 15 to 30 nucleobases, 15 to 25 nucleobases, 15 to 20 nucleobases, 20 to 50 nucleobases, 20 to 40 nucleobases, 20 to 35 nucleobases, 20 to 30 nucleobases, 20 to 25 nucleobases, 25 to 50 nucleobases, 25 to 40 nucleobases, 25 to 35 nucleobases, or 25 to 30 nucleobases in length. In some embodiments, the ASOs are 15 nucleotides in length. In some embodiments, the ASOs are 16 nucleotides in length. In some embodiments, the ASOs are 17 nucleotides in length. In some embodiments, the ASOs are 18 nucleotides in length. In some embodiments, the ASOs are 25 nucleotides in length.

[0764] In some embodiments, two or more ASOs with different chemistries but complementary to the same targeted portion of the NSAE pre-mRNA are used. In some embodiments, two or more ASOs that are complementary to different targeted portions of the NSAE pre-mRNA are used.

[0765] In some embodiments, the antisense oligonucleotides of the invention are chemically linked to one or more moieties or conjugates, e.g., a targeting moiety or other conjugate that enhances the activity or cellular uptake of the oligonucleotide. Such moieties include, but are not limited to, a lipid moiety, e.g., as a cholesterol moiety, a cholesteryl moiety, an aliphatic chain, e.g., dodecandiol or undecyl residues, a polyamine or a polyethylene glycol chain, or adamantane acetic acid. Oligonucleotides comprising lipophilic moieties and preparation methods have been described in the published literature. In embodiments, the antisense oligonucleotide is conjugated with a moiety including, but not limited to, an abasic nucleotide, a polyether, a polyamine, a polyamide, a peptides, a carbohydrate, e.g., N-acetylgalactosamine (GalNAc), N—Ac-Glucosamine (GluNAc), or mannose (e.g., mannose-6-phosphate), a lipid, or a polyhydrocarbon compound. Conjugates can be linked to one or more of any nucleotides comprising the antisense oligonucleotide at any of several positions on the sugar, base or phosphate group, as understood in the art and described in the literature, e.g., using a linker. Linkers can include a bivalent or trivalent branched linker. In embodiments, the conjugate is attached to the 3′ end of the antisense oligonucleotide. Methods of preparing oligonucleotide conjugates are described, e.g., in U.S. Pat. No. 8,450,467, “Carbohydrate conjugates as delivery agents for oligonucleotides,” incorporated by reference herein.

[0766] In some embodiments, the nucleic acid to be targeted by an ASO is a SYNGAP1 pre-mRNA expressed in a cell, such as a eukaryotic cell. In some embodiments, the nucleic acid to be targeted by an ASO is a pre-mRNA expressed in a cell, such as a eukaryotic cell, wherein the target is any one selected from the group consisting of ABCA5, ABCA7, ABCC3, ABCC5, ABCC8, ABCD1, ABR, ACAD9, ACAP1, ACOX2, ACSF3, ACTN4, ADAM17, ADAMTS13, AKR1E2, ALAD, ALG3, ANKRD29, ANKS3, ANO4, AP3B2, AP3M1, AP5Z1, ARNTL, ASAP3, ATRX, BBS2, BBS4, BRD9, CALM3, CARS1, CASP9, CATSPER1, CCDC40, CCDC88B, CD4, CD58, CES2, CHFR, CLCN2, CNOT3, CNTROB, COL5A3, CPSF1, CSPP1, CTF1, CTH, CYP3A5, DAB2IP, DBN1, DDX51, DEAF1, DGKE, DHDDS, DMKN, DNHD1, DOCK8, DOK5, EIF2B5, ELAC2, ELP1, ENTPD4, ESRRA, ESS2, ETAA1, ETHE1, FANCA, FASTK, FASTKD3, FPGS, FREM1, GAS8, GCK, GGA1, GGA3, GGT1, GLMN, GON4L, GRB14, HDAC3, HELQ, HP1BP3, HPS1, HPS4, IDUA, IFT122, IL17RC, IMPDH1, INVS, IRF3, KCTD3, KLKB1, KYAT1, LAMC3, LDAH, LIMS2, MALT1, MAP3K7, MAPK13, MCAT, MCEE, MPI, MSTO1, NBEAL2, NLE1, NLRC5, NOM1, NOP58, NPHP1, NPR1, NUP188, OSGEP, PABPC4, PCOLCE, PHKA2, PIDD1, PKD1, PLA2G6, PLD2, PLEKHG5, PNPO, POLE, PON2, PRMT7, PRODH, PRPF3, PRPF4, PYCR1, RAD52, REXO1, RFX5, RHBDF2, RMND1, ROBO3, RPGRIP1, RTTN, RUFY3, SEMA3B, SEMA3F, SH2D3A, SIK3, SIRT3, SKIV2L, SLC2A13, SLC12A7, SLC22A3, SLC25A13, SLC25A37, SLC27A5, SLC30A9, SLC30A10, SMPD1, SMTN, SNRPB, SP140, STAMBP, STXBP2, SULF2, SYNGAP1, SYNJ2, TAZ, TBL2, TDRD7, TECPR2, TFB1M, TM6SF1, TNK2, TOE1, TOR1B, TRAPPC6B, TRIP4, TRMT2A, TRMU, TRPV4, TTC19, TYMP, UMPS, UROD, WDR11, WDR62, WIPI1, WRAP53, XPO1, YY1AP1, and ZC3H14. In some embodiments, the term “cell” may refer to a population of cells. In some embodiments, the cell is in a subject. In some embodiments, the cell is isolated from a subject. In some embodiments, the cell is ex vivo. In some embodiments, the cell is a condition or disease-relevant cell or a cell line. In some embodiments, the cell is in vitro (e.g., in cell culture).

### Pharmaceutical Compositions

[0767] Pharmaceutical compositions or formulations comprising the agent, e.g., antisense oligonucleotide, of the described compositions and for use in any of the described methods can be prepared according to conventional techniques well known in the pharmaceutical industry and described in the published literature. In embodiments, a pharmaceutical composition or formulation for treating a subject comprises an effective amount of any antisense oligomer as described herein, or a pharmaceutically acceptable salt, solvate, hydrate or ester thereof. The pharmaceutical formulation comprising an antisense oligomer may further comprise a pharmaceutically acceptable excipient, diluent or carrier.

[0768] Pharmaceutically acceptable salts are suitable for use in contact with the tissues of humans and lower animals without undue toxicity, irritation, allergic response, etc., and are commensurate with a reasonable benefit/risk ratio. (See, e.g., S. M. Berge, et al., J. Pharmaceutical Sciences, 66: 1-19 (1977), incorporated herein by reference for this purpose. The salts can be prepared in situ during the final isolation and purification of the compounds, or separately by reaction between the free base and a suitable organic acid. Examples of pharmaceutically acceptable, nontoxic acid addition salts are salts of an amino group formed with inorganic acids such as hydrochloric acid, hydrobromic acid, phosphoric acid, sulfuric acid and perchloric acid or with organic acids such as acetic acid, oxalic acid, maleic acid, tartaric acid, citric acid, succinic acid or malonic acid or by using other documented methodologies such as ion exchange. Other pharmaceutically acceptable salts include adipate, alginate, ascorbate, aspartate, benzenesulfonate, benzoate, bisulfate, borate, butyrate, camphorate, camphorsulfonate, citrate, cyclopentanepropionate, digluconate, dodecylsulfate, ethanesulfonate, formate, fumarate, glucoheptonate, glycerophosphate, gluconate, hemisulfate, heptanoate, hexanoate, hydroiodide, 2-hydroxy-ethanesulfonate, lactobionate, lactate, laurate, lauryl sulfate, malate, maleate, malonate, methanesulfonate, 2-naphthalenesulfonate, nicotinate, nitrate, oleate, oxalate, palmitate, pamoate, pectinate, persulfate, 3-phenylpropionate, phosphate, picrate, pivalate, propionate, stearate, succinate, sulfate, tartrate, thiocyanate, p-toluenesulfonate, undecanoate, valerate salts, and the like. Representative alkali or alkaline earth metal salts include sodium, lithium, potassium, calcium, magnesium, and the like. Further pharmaceutically acceptable salts include, when appropriate, nontoxic ammonium, quaternary ammonium, and amine cations formed using counterions such as halide, hydroxide, carboxylate, sulfate, phosphate, nitrate, loweralkyl sulfonate and aryl sulfonate.

[0769] In some embodiments, the compositions are formulated into any of many possible dosage forms such as, but not limited to, tablets, capsules, gel capsules, liquid syrups, soft gels, suppositories, and enemas. In some embodiments, the compositions are formulated as suspensions in aqueous, non-aqueous or mixed media. Aqueous suspensions may further contain substances that increase the viscosity of the suspension including, for example, sodium carboxymethylcellulose, sorbitol and/or dextran. The suspension may also contain stabilizers. In some embodiments, a pharmaceutical formulation or composition of the present invention includes, but is not limited to, a solution, emulsion, microemulsion, foam or liposome-containing formulation (e.g., cationic or noncationic liposomes).

[0770] The pharmaceutical composition or formulation of the present invention may comprise one or more penetration enhancer, carrier, excipients or other active or inactive ingredients as appropriate and well known to those of skill in the art or described in the published literature. In some embodiments, liposomes also include sterically stabilized liposomes, e.g., liposomes comprising one or more specialized lipids. These specialized lipids result in liposomes with enhanced circulation lifetimes. In some embodiments, a sterically stabilized liposome comprises one or more glycolipids or is derivatized with one or more hydrophilic polymers, such as a polyethylene glycol (PEG) moiety. In some embodiments, a surfactant is included in the pharmaceutical formulation or compositions. The use of surfactants in drug products, formulations and emulsions is well known in the art. In some embodiments, the present invention employs a penetration enhancer to effect the efficient delivery of the antisense oligonucleotide, e.g., to aid diffusion across cell membranes and/or enhance the permeability of a lipophilic drug. In some embodiments, the penetration enhancers are a surfactant, fatty acid, bile salt, chelating agent, or non-chelating nonsurfactant.

[0771] In some embodiments, the pharmaceutical formulation comprises multiple antisense oligonucleotides. In some embodiments, the antisense oligonucleotide is administered in combination with another drug or therapeutic agent.

### Treatment of Subjects

[0772] Any of the compositions provided herein may be administered to an individual. “Individual” may be used interchangeably with “subject” or “patient.” An individual may be a mammal, for example a human or animal such as a non-human primate, a rodent, a rabbit, a rat, a mouse, a horse, a donkey, a goat, a cat, a dog, a cow, a pig, or a sheep. In some embodiments, the individual is a human. In some embodiments, the individual is a fetus, an embryo, or a child. In other embodiments, the individual may be another eukaryotic organism, such as a plant. In some embodiments, the compositions provided herein are administered to a cell ex vivo.

[0773] In some embodiments, the compositions provided herein are administered to an individual as a method of treating a disease or disorder. In some embodiments, the individual has a genetic disease, such as any of the diseases described herein. In some embodiments, the individual is at risk of having the disease, such as any of the diseases described herein. In some embodiments, the individual is at increased risk of having a disease or disorder caused by insufficient amount of a protein or insufficient activity of a protein. In some embodiments, if an individual is “at an increased risk” of having a disease or disorder caused by insufficient amount of a protein or insufficient activity of a protein, the method involves preventative or prophylactic treatment. For example, an individual may be at an increased risk of having such a disease or disorder because of family history of the disease. Typically, individuals at an increased risk of having such a disease or disorder benefit from prophylactic treatment (e.g., by preventing or delaying the onset or progression of the disease or disorder). In some embodiments, a fetus is treated in utero, e.g., by administering the ASO composition to the fetus directly or indirectly (e.g., via the mother).

[0774] Suitable routes for administration of ASOs of the present invention may vary depending on cell type to which delivery of the ASOs is desired. Multiple tissues and organs can be affected by autosomal dominant mental retardation. In some embodiments, the liver can be the most significantly affected tissue. The ASOs of the present invention may be administered to patients parenterally, for example, by intrathecal injection, intracerebroventricular injection, intraperitoneal injection, intramuscular injection, subcutaneous injection, or intravenous injection.

Methods of Identifying Additional ASOs that Prevent Alternative Splicing

[0775] Also within the scope of the present disclosure are methods for identifying or determining ASOs that prevent alternative splicing of a SYNGAP1 pre-mRNA. For example, a method can comprise identifying or determining ASOs that prevent alternative splicing of a SYNGAP1 pre-mRNA. Also within the scope of the present disclosure are methods for identifying or determining ASOs that prevent alternative splicing of a target pre-mRNA, wherein the target is any one selected from the group consisting of ABCA5, ABCA7, ABCC3, ABCC5, ABCC8, ABCD1, ABR, ACAD9, ACAP1, ACOX2, ACSF3, ACTN4, ADAM17, ADAMTS13, AKR1E2, ALAD, ALG3, ANKRD29, ANKS3, ANO4, AP3B2, AP3M1, AP5Z1, ARNTL, ASAP3, ATRX, BBS2, BBS4, BRD9, CALM3, CARS1, CASP9, CATSPER1, CCDC40, CCDC88B, CD4, CD58, CES2, CHFR, CLCN2, CNOT3, CNTROB, COL5A3, CPSF1, CSPP1, CTF1, CTH, CYP3A5, DAB2IP, DBN1, DDX51, DEAF1, DGKE, DHDDS, DMKN, DNHD1, DOCK8, DOK5, EIF2B5, ELAC2, ELP1, ENTPD4, ESRRA, ESS2, ETAA1, ETHE1, FANCA, FASTK, FASTKD3, FPGS, FREM1, GAS8, GCK, GGA1, GGA3, GGT1, GLMN, GON4L, GRB14, HDAC3, HELQ, HP1BP3, HPS1, HPS4, IDUA, IFT122, IL17RC, IMPDH1, INVS, IRF3, KCTD3, KLKB1, KYAT1, LAMC3, LDAH, LIMS2, MALT1, MAP3K7, MAPK13, MCAT, MCEE, MPI, MSTO1, NBEAL2, NLE1, NLRC5, NOM1, NOP58, NPHP1, NPR1, NUP188, OSGEP, PABPC4, PCOLCE, PHKA2, PIDD1, PKD1, PLA2G6, PLD2, PLEKHG5, PNPO, POLE, PON2, PRMT7, PRODH, PRPF3, PRPF4, PYCR1, RAD52, REXO1, RFX5, RHBDF2, RMND1, ROBO3, RPGRIP1, RTTN, RUFY3, SEMA3B, SEMA3F, SH2D3A, SIK3, SIRT3, SKIV2L, SLC2A13, SLC12A7, SLC22A3, SLC25A13, SLC25A37, SLC27A5, SLC30A9, SLC30A10, SMPD1, SMTN, SNRPB, SP140, STAMBP, STXBP2, SULF2, SYNGAP1, SYNJ2, TAZ, TBL2, TDRD7, TECPR2, TFB1M, TM6SF1, TNK2, TOE1, TOR1B, TRAPPC6B, TRIP4, TRMT2A, TRMU, TRPV4, TTC19, TYMP, UMPS, UROD, WDR11, WDR62, WIPI1, WRAP53, XPO1, YY1AP1, and ZC3H14. For example, a method can comprise identifying or determining ASOs that prevent alternative splicing of a target pre-mRNA. ASOs that specifically hybridize to different nucleotides within the target region of the pre-mRNA may be screened to identify or determine ASOs that improve the extent of canonical splicing. In some embodiments, the ASO may block or interfere with the binding site(s) of a splicing silencer. Any method known in the art may be used to identify (determine) an ASO that when hybridized to the target region of the NSAE results in the desired effect (e.g., exon inclusion, protein or functional RNA production). These methods also can be used for identifying ASOs that prevent alternative splicing of the NSAE by binding to a targeted region in an intron flanking the NSAE. An example of a method that may be used is provided below.

[0776] A round of screening, referred to as an ASO “walk” may be performed using ASOs that have been designed to hybridize to a target region of a pre-mRNA. For example, the ASOs used in the ASO walk can be tiled every 5 nucleotides from approximately 100 nucleotides upstream of the 3′ splice site of the NSAE (e.g., a portion of sequence of the intron located upstream of the target/NSAE) to approximately 100 nucleotides downstream of the 3′ splice site of the target/NSAE and/or from approximately 100 nucleotides upstream of the 5′ splice site of the NSAE to approximately 100 nucleotides downstream of the 5′ splice site of the target/NSAE (e.g., a portion of sequence of the intron located downstream of the target/NSAE). For example, a first ASO of 18 nucleotides in length may be designed to specifically hybridize to nucleotides +6 to +23 relative to the 5′ splice site of the target/NSAE. A second ASO is designed to specifically hybridize to nucleotides +11 to +28 relative to the 5′ splice site of the target/NSAE. ASOs are designed as such spanning the target region of the pre-mRNA. In some embodiments, the ASOs can be tiled more closely, e.g., every 1, 2, 3, or 4 nucleotides. Further, the ASOs can be tiled from 100 nucleotides downstream of the 5′ splice site, to 100 nucleotides upstream of the 3′ splice site. In some embodiments, the ASOs can be tiled from about 572 nucleotides upstream of the 3′ splice site, to about 500 nucleotides downstream of the 5′ splice site. In some embodiments, the ASOs can be tiled from about 500 nucleotides upstream of the 3′ splice site, to about 572 nucleotides downstream of the 3′ splice site.

[0777] One or more ASOs, or a control ASO (an ASO with a scrambled sequence, sequence that is not expected to hybridize to the target region) are delivered, for example by transfection, into a disease-relevant cell line that expresses the target pre-mRNA (e.g., a NSAE pre-mRNA described herein). The canonical splicing promoting effects of each of the ASOs may be assessed by any method known in the art, for example by reverse transcriptase (RT)-PCR using primers, such as primers spanning the region containing the NSAE or canonical exon. A decrease or absence of a longer or shorter RT-PCR product than a canonical exon produced using primers spanning the region containing the NSAE or canonical exon in ASO-treated cells as compared to in control ASO-treated cells indicates that exclusion of the NSAE has been increased. In some embodiments, the canonical splicing efficiency or the ratio of canonically spliced mRNA to NSAE containing mRNA may be improved using the ASOs described herein. The amount of protein or functional RNA that is encoded by the target pre-mRNA can also be assessed to determine whether each ASO achieved the desired effect (e.g., enhanced functional protein production). Any method known in the art for assessing and/or quantifying protein production, such as Western blotting, flow cytometry, immunofluorescence microscopy, and ELISA, can be used.

[0778] A second round of screening, referred to as an ASO “micro-walk” may be performed using ASOs that have been designed to hybridize to a target region of a pre-mRNA. The ASOs used in the ASO micro-walk are tiled every 1 nucleotide to further refine the nucleotide acid sequence of the pre-mRNA that when hybridized with an ASO results in modulation of NSAE exclusion.

[0779] Regions defined by ASOs that promote inclusion target NSAE are explored in greater detail by means of an ASO “micro-walk”, involving ASOs spaced in 1-nt steps, as well as longer ASOs, typically 15-25 nt.

[0780] As described for the ASO walk above, the ASO micro-walk is performed by delivering one or more ASOs, or a control ASO (an ASO with a scrambled sequence, sequence that is not expected to hybridize to the target region), for example by transfection, into a disease-relevant cell line that expresses the target pre-mRNA. The splicing-inducing effects of each of the ASOs may be assessed by any method known in the art, for example by reverse transcriptase (RT)-PCR using primers that span the NSAE, as described herein. A decrease or absence of a longer or shorter RT-PCR product than a canonical exon produced using primers spanning the region containing the NSAE or canonical exon in ASO-treated cells as compared to in control ASO-treated cells indicates that exclusion of the NSAE has been increased. In some embodiments, the canonical splicing efficiency or the ratio of canonically spliced mRNA to retained NSAE containing mRNA may be improved using the ASOs described herein. The amount of protein or functional RNA that is encoded by the target pre-mRNA can also be assessed to determine whether each ASO achieved the desired effect (e.g., enhanced functional protein production). Any method known in the art for assessing and/or quantifying protein production, such as Western blotting, flow cytometry, immunofluorescence microscopy, and ELISA, can be used.

[0781] ASOs that when hybridized to a region of a pre-mRNA result in canonical splicing and increased protein production may be tested in vivo using animal models, for example transgenic mouse models in which the full-length human gene has been knocked-in or in humanized mouse models of disease. Suitable routes for administration of ASOs may vary depending on the disease and/or the cell types to which delivery of the ASOs is desired. ASOs may be administered, for example, by intrathecal injection, intracerebroventricular injection, intraperitoneal injection, intramuscular injection, subcutaneous injection, or intravenous injection. Following administration, the cells, tissues, and/or organs of the model animals may be assessed to determine the effect of the ASO treatment by for example evaluating splicing (efficiency, rate, extent) and protein production by methods known in the art and described herein. The animal models may also be any phenotypic or behavioral indication of the disease or disease severity.

[0782] While preferred embodiments of the present invention have been shown and described herein, it will be obvious to those skilled in the art that such embodiments are provided by way of example only. Numerous variations, changes, and substitutions will now occur to those skilled in the art without departing from the invention. It should be understood that various alternatives to the embodiments of the invention described herein may be employed in practicing the invention. It is intended that the following claims define the scope of the invention and that methods and structures within the scope of these claims and their equivalents be covered thereby.

[0783] In some embodiments, the exemplary NMD-inducing Alternative 5′ splice site or 3′ splice site targets comprise the genes listed in Table 5A, Table 5B or Table 5C. In some embodiments, the compositions as provided herein comprise a NSAE-modulating agent that modulates expression of a target protein listed in Table 5A, Table 5B or Table 5C. In some embodiments, the method as provided herein are used to modulate expression of a target protein listed in Table 5A, Table 5B or Table 5C by administering a NSAE-modulating agent.

[0784] For example, in some embodiments, GRN (Gene ID: 2896) is an exemplary target of the NMD-inducing Alternative 3′ splice site event. In some embodiments, the compositions or the methods as described herein may be used to treat GRN-related frontotemporal dementia (OMIM (Online Mendelian Inheritance in Man)): 607485) related to the haploinsufficiency of GRN in the central nervous system (CNS).

[0785] For another example, in some embodiments, SHANK3 (Gene ID: 85358) is an exemplary target of the NMD-inducing Alternative 3′ splice site event. In some embodiments, the compositions or the methods as described herein may be used to treat Phelan-McDermid syndrome; Autism spectrum disorder (OMIM: 606232) related to the haploinsufficiency of SHANK3 in the CNS.

[0786] For another example, in some embodiments, PRPF3 (Gene ID: 9129) is an exemplary target of the NMD-inducing Alternative 3′ splice site event. In some embodiments, the compositions or the methods as described herein may be used to treat Retinitis pigmentosa 18 (OMIM: 601414) related to the haploinsufficiency of PRPF3 in the eye.

[0787] For another example, in some embodiments, PRPF4 (Gene ID: 9128) is an exemplary target of the NMD-inducing Alternative 5′ splice site event or the NMD-inducing Alternative 3′ splice site event. In some embodiments, the compositions or the methods as described herein may be used to treat Retinitis pigmentosa 70 (OMIM: 615922) related to the haploinsufficiency of PRPF4 in the eye.

[0788] For another example, in some embodiments, SYNGAP1 (Gene ID: 8831) is an exemplary target of the NMD-inducing Alternative 5′ splice site event or the NMD-inducing Alternative 3′ splice site event. In some embodiments, the compositions or the methods as described herein may be used to treat AD mental retardation 5 (OMIM: 612621) related to the haploinsufficiency of SYNGAP1 in the CNS.

[0789] For another example, in some embodiments, ABCA4 (Gene ID: 24) is an exemplary target of the NMD-inducing Alternative 3′ splice site event. In some embodiments, the compositions or the methods as described herein may be used to treat Stargardt disease (OMIM: 248200) related to the autosomal recessive ABCA4 in the eye.

[0790] For another example, in some embodiments, DNAJB2 (Gene ID: 3300) is an exemplary target of the NMD-inducing Alternative 5′ splice site event or the NMD-inducing Alternative 3′ splice site event. In some embodiments, the compositions or the methods as described herein may be used to modulate the pathway related to defective DNAJB2 in the eye.

[0791] For another example, in some embodiments, CLPX (Gene ID: 10845) is an exemplary target of the NMD-inducing Alternative 5′ splice site event. In some embodiments, the compositions or the methods as described herein may be used to modulate the pathway related to defective CLPX in the eye.

[0792] For another example, in some embodiments, HSPA9 (Gene ID: 3313) is an exemplary target of the NMD-inducing Alternative 3′ splice site event. In some embodiments, the compositions or the methods as described herein may be used to modulate the pathway related to defective HSPA9 in the eye.

[0793] For another example, in some embodiments, SLC4A11 (Gene ID: 83959) is an exemplary target of the NMD-inducing Alternative 3′ splice site event. In some embodiments, the compositions or the methods as described herein may be used to treat Fuch's corneal dystrophy (OMIM: 217700) related to the autosomal recessive SLC4A11 in the eye.

[0794] For another example, in some embodiments, OPTN (Gene ID: 10133) is an exemplary target of the NMD-inducing Alternative 3′ splice site event. In some embodiments, the compositions or the methods as described herein may be used to modulate the pathway related to defective OPTN in the eye or CNS.

[0795] For another example, in some embodiments, eIF2B5 (Gene ID: 8893) is an exemplary target of the NMD-inducing Alternative 5′ splice site event. In some embodiments, the compositions or the methods as described herein may be used to modulate the pathway related to defective eIF2B5 in the eye.

[0796] For another example, in some embodiments, SIRT3 (Gene ID: 23410) is an exemplary target of the NMD-inducing Alternative 3′ splice site event. In some embodiments, the compositions or the methods as described herein may be used to modulate the pathway related to defective SIRT3 in the eye.

[0797] For another example, in some embodiments, STAT3 (Gene ID: 6774) is an exemplary target of the NMD-inducing Alternative 5′ splice site event. In some embodiments, the compositions or the methods as described herein may be used to modulate the pathway related to defective STAT3 in the eye.

[0798] For another example, in some embodiments, KCNQ2 (Gene ID: 3785) is an exemplary target of the NMD-inducing Alternative 5′ splice site event or the NMD-inducing Alternative 3′ splice site event. In some embodiments, the compositions or the methods as described herein may be used to treat early-onset epileptic encephalopathy (OMIM: 613720) related to the haploinsufficiency of KCNQ2 in the CNS.

[0799] For another example, in some embodiments, CACNA1G (Gene ID: 8913) is an exemplary target of the NMD-inducing Alternative 3′ splice site event. In some embodiments, the compositions or the methods as described herein may be used to treat Spinocerebellar ataxia 42 [AD] (OMIM: 616795) related to the potential haploinsufficiency of CACNA1G in the CNS.

[0800] For another example, in some embodiments, GBA (Gene ID: 2629) is an exemplary target of the NMD-inducing Alternative 5′ splice site event or the NMD-inducing Alternative 3′ splice site event. In some embodiments, the compositions or the methods as described herein may be used to treat Parkinson disease (OMIM: 168600) related to the haploinsufficiency of GBA in the CNS.

[0801] For another example, in some embodiments, KL (Gene ID: 9365) is an exemplary target of the NMD-inducing Alternative 5′ splice site event. In some embodiments, the compositions or the methods as described herein may be used to modulate the pathway related to defective KL in the CNS.

[0802] For another example, in some embodiments, AKT2 (Gene ID: 208) is an exemplary target of the NMD-inducing Alternative 3′ splice site event. In some embodiments, the compositions or the methods as described herein may be used to modulate the pathway related to defective AKT2 in the eye.

[0803] For another example, in some embodiments, EIF2AK3 (Gene ID: 9451) is an exemplary target of the NMD-inducing Alternative 3′ splice site event. In some embodiments, the compositions or the methods as described herein may be used to modulate the pathway related to defective EIF2AK3 in the eye.

[0804] For another example, in some embodiments, SEMA4A (Gene ID: 64218) is an exemplary target of the NMD-inducing Alternative 3′ splice site event. In some embodiments, the compositions or the methods as described herein may be used to modulate the pathway related to defective SEMA4A in the eye.

[0805] For another example, in some embodiments, SEMA3B (Gene ID: 10509) is an exemplary target of the NMD-inducing Alternative 3′ splice site event. In some embodiments, the compositions or the methods as described herein may be used to modulate the pathway related to defective SEMA3B in the eye.

[0806] For another example, in some embodiments, SEMA3F (Gene ID: 10505) is an exemplary target of the NMD-inducing Alternative 5′ splice site event or the NMD-inducing Alternative 3′ splice site event. In some embodiments, the compositions or the methods as described herein may be used to modulate the pathway related to defective SEMA3F in the eye.

[0807] For another example, in some embodiments, SLC4A11 (Gene ID: 83959) is an exemplary target of the NMD-inducing Alternative 3′ splice site event. In some embodiments, the compositions or the methods as described herein may be used to treat Corneal dystrophy, Fuchs endothelial, 4 (OMIM: 613268) related to the potential haploinsufficiency of SLC4A11 in the eye.

[0808] For another example, in some embodiments, JAG1 (Gene ID: 182) is an exemplary target of the NMD-inducing Alternative 5′ splice site event. In some embodiments, the compositions or the methods as described herein may be used to treat Alagille syndrome (OMIM: 118450) related to the haploinsufficiency of JAG1 in the liver.

[0809] For another example, in some embodiments, CHD2 (Gene ID: 1106) is an exemplary target of the NMD-inducing Alternative 3′ splice site event. In some embodiments, the compositions or the methods as described herein may be used to treat Epileptic encephalopathy, childhood-onset (OMIM: 615369) related to the haploinsufficiency of CHD2 in the CNS.

[0810] For another example, in some embodiments, MCEE (Gene ID: 84693) is an exemplary target of the NMD-inducing Alternative 5′ splice site event. In some embodiments, the compositions or the methods as described herein may be used to treat Methylmalonyl-CoA epimerase deficiency (OMIM: 251120) related to the autosomal recessive MCEE in the liver.

[0811] For another example, in some embodiments, TRAPPC6B (Gene ID: 122553) is an exemplary target of the NMD-inducing Alternative 5′ splice site event. In some embodiments, the compositions or the methods as described herein may be used to treat Neurodevelopmental disorder with microcephaly, epilepsy, and brain atrophy (OMIM: 617862) related to the autosomal recessive TRAPPC6B in the CNS.

[0812] For another example, in some embodiments, AP3B2 (Gene ID: 8120) is an exemplary target of the NMD-inducing Alternative 3′ splice site event. In some embodiments, the compositions or the methods as described herein may be used to treat Epileptic encephalopathy, early infantile, 48 (OMIM: 617276) related to the autosomal recessive AP3B2 in the CNS.

[0813] For another example, in some embodiments, TTC19 (Gene ID: 54902) is an exemplary target of the NMD-inducing Alternative 5′ splice site event. In some embodiments, the compositions or the methods as described herein may be used to treat Mitochondrial complex III deficiency, nuclear type 2 (OMIM: 615157) related to the autosomal recessive TTC19 in the CNS.

[0814] For another example, in some embodiments, DMTF1 (Gene ID: 9988) is an exemplary target of the NMD-inducing Alternative 3′ splice site event. In some embodiments, the compositions or the methods as described herein may be used to modulate the tumor suppressor activity of DMTF1. In some embodiments, the compositions or the methods as described herein may be used to increase the tumor suppressor activity of DMTF1, thereby treating cancer.

[0815] For another example, in some embodiments, HDAC3 (Gene ID: 8841) is an exemplary target of the NMD-inducing Alternative 3′ splice site event. In some embodiments, the compositions or the methods as described herein may be used to modulate the tumor suppressor activity of HDAC3. In some embodiments, the compositions or the methods as described herein may be used to increase the tumor suppressor activity of HDAC3, thereby treating cancer.

[0816] For another example, in some embodiments, DAB2IP (Gene ID: 153090) is an exemplary target of the NMD-inducing Alternative 5′ splice site event. In some embodiments, the compositions or the methods as described herein may be used to modulate the tumor suppressor activity of DAB2IP. In some embodiments, the compositions or the methods as described herein may be used to increase the tumor suppressor activity of DAB2IP, thereby treating cancer.

[0817] For another example, in some embodiments, CD4 (Gene ID: 920) is an exemplary target of the NMD-inducing Alternative 5′ splice site event. In some embodiments, the compositions or the methods as described herein may be used to modulate the tumor suppressor activity of CD4. In some embodiments, the compositions or the methods as described herein may be used to increase the tumor suppressor activity of CD4, thereby treating cancer.

[0818] For another example, in some embodiments, TP53BP2 (Gene ID: 7159) is an exemplary target of the NMD-inducing Alternative 5′ splice site event. In some embodiments, the compositions or the methods as described herein may be used to modulate the tumor suppressor activity of TP53BP2. In some embodiments, the compositions or the methods as described herein may be used to increase the tumor suppressor activity of TP53BP2, thereby treating cancer.

[0819] For another example, in some embodiments, BAP1 (Gene ID: 8314) is an exemplary target of the NMD-inducing Alternative 3′ splice site event. In some embodiments, the compositions or the methods as described herein may be used to modulate the tumor suppressor activity of BAP1. In some embodiments, the compositions or the methods as described herein may be used to increase the tumor suppressor activity of BAP1, thereby treating cancer.

[0820] For another example, in some embodiments, CHFR (Gene ID: 55743) is an exemplary target of the NMD-inducing Alternative 3′ splice site event. In some embodiments, the compositions or the methods as described herein may be used to modulate the tumor suppressor activity of CHFR. In some embodiments, the compositions or the methods as described herein may be used to increase the tumor suppressor activity of CHFR, thereby treating cancer.

[0821] For another example, in some embodiments, IRF3 (Gene ID: 3661) is an exemplary target of the NMD-inducing Alternative 5′ splice site event. In some embodiments, the compositions or the methods as described herein may be used to modulate the tumor suppressor activity of IRF3. In some embodiments, the compositions or the methods as described herein may be used to increase the tumor suppressor activity of IRF3, thereby treating cancer.

[0822] For another example, in some embodiments, SIRT2 (Gene ID: 22933) is an exemplary target of the NMD-inducing Alternative 3′ splice site event. In some embodiments, the compositions or the methods as described herein may be used to modulate the tumor suppressor activity of SIRT2. In some embodiments, the compositions or the methods as described herein may be used to increase the tumor suppressor activity of SIRT2, thereby treating cancer.

[0823] For another example, in some embodiments, RBL1 (Gene ID: 5933) is an exemplary target of the NMD-inducing Alternative 5′ splice site event. In some embodiments, the compositions or the methods as described herein may be used to modulate the tumor suppressor activity of RBL1. In some embodiments, the compositions or the methods as described herein may be used to increase the tumor suppressor activity of RBL1, thereby treating cancer.

[0824] In some embodiments, the compositions or the methods as described herein are used to treat a condition or disease selected from the group consisting of dementia, GRN-related frontotemporal dementia, Phelan-McDermid syndrome; Autism spectrum disorder, Retinitis pigmentosa 18, Retinitis pigmentosa 70, autosomal dominant mental retardation-5 (MRD5; AD Mental Retardation 5), Stargardt disease, Fuch's corneal dystrophy, early-onset epileptic encephalopathy, Spinocerebellar ataxia 42 [AD], Parkinson disease, Corneal dystrophy, Fuchs endothelial 4, Alagille syndrome, Epileptic encephalopathy, childhood-onset Methylmalonyl-CoA epimerase deficiency, Neurodevelopmental disorder with microcephaly, epilepsy, and brain atrophy, Epileptic encephalopathy, early infantile, 48, Mitochondrial complex III deficiency, nuclear type 2, and tumor. In some embodiments, the compositions or the methods as described herein are used to prevent, delay the progression and/or development of a sign or a symptom, or alleviate a sign or a symptom associated with a condition or disease selected from the group consisting of dementia, GRN-related frontotemporal dementia, Phelan-McDermid syndrome; Autism spectrum disorder, Retinitis pigmentosa 18, Retinitis pigmentosa 70, autosomal dominant mental retardation-5 (MRD5; AD Mental Retardation 5), Stargardt disease, Fuch's corneal dystrophy, early-onset epileptic encephalopathy, Spinocerebellar ataxia 42 [AD], Parkinson disease, Corneal dystrophy, Fuchs endothelial 4, Alagille syndrome, Epileptic encephalopathy, childhood-onset Methylmalonyl-CoA epimerase deficiency, Neurodevelopmental disorder with microcephaly, epilepsy, and brain atrophy, Epileptic encephalopathy, early infantile, 48, Mitochondrial complex III deficiency, nuclear type 2, and tumor. In some embodiments, the compositions or the methods as described herein are used to treat a condition or disease of Table 5C. In some embodiments, the compositions or the methods as described herein are used to prevent, delay the progression and/or development of a sign or a symptom, or alleviate a sign or a symptom associated with a condition or disease of Table 5C.

TABLE 5A

| | Genomic | | | | SEQ | Event | |
|---|---|---|---|---|---|---|---|
| | sequence | Region coordinate | | | ID | coordinate | Event |
| Gene | SEQ ID NO: | chrm | start | end | NO: | exon | type* |
| ABCC3 | 1118 | chr17 | 50658497 | 50659181 | 15073 | chr17 | alt_3ss |
| | | | | | | 50659182 | |
| | | | | | | 50659236+ | |
| ABCC5 | 1119 | chr3 | 183972035 | 183977516 | 15074 | chr3 | alt_3ss |
| | | | | | | 183971920 | |
| | | | | | | 183972034− | |
| ABCC8 | 1120 | chr11 | 17407210 | 17407353 | 15075 | chr11 | alt_3ss |
| | | | | | | 17407130 | |
| | | | | | | 17407209− | |
| ACOX2 | 1125 | chr3 | 58534609 | 58534946 | 15076 | chr3 | alt_3ss |
| | | | | | | 58534523 | |
| | | | | | | 58534608− | |
| ACSF3 | 1126 | chr16 | 89133263 | 89145213 | 15077 | chr16 | alt_3ss |
| | | | | | | 89145214 | |
| | | | | | | 89145266+ | |
| ADAM17 | 1128 | chr2 | 9526265 | 9527785 | 15078 | chr2 | alt_3ss |
| | | | | | | 9526245 | |
| | | | | | | 9526264− | |
| ADAMTS13 | 1129 | chr9 | 133428772 | 133429943 | 15079 | chr9 | alt_3ss |
| | | | | | | 133429944 | |
| | | | | | | 133430031+ | |
| ALAD | 1131 | chr9 | 113392336 | 113393446 | 15080 | chr9 | alt_3ss |
| | | | | | | 113392170 | |
| | | | | | | 113392335− | |
| ANKS3 | 1134 | chr16 | 4726855 | 4726978 | 15081 | chr16 | alt_3ss |
| | | | | | | 4726781 | |
| | | | | | | 4726854− | |
| ANO4 | 1135 | chr12 | 100971407 | 100974782 | 15082 | chr12 | alt_3ss |
| | | | | | | 100974783 | |
| | | | | | | 100974844+ | |
| AP3B2 | 1136 | chr15 | 82663296 | 82663559 | 15083 | chr15 | alt_3ss |
| | | | | | | 82663234 | |
| | | | | | | 82663295− | |
| AP5Z1 | 1138 | chr7 | 4786429 | 4787595 | 15084 | chr7 | alt_3ss |
| | | | | | | 4787596 | |
| | | | | | | 4787633+ | |
| ARNTL | 1139 | chr11 | 13375763 | 13376544 | 15085 | chr11 | alt_3ss |
| | | | | | | 13376545 | |
| | | | | | | 13376639+ | |
| BBS2 | 1142 | chr16 | 56498694 | 56499777 | 15086 | chr16 | alt_3ss |
| | | | | | | 56498569 | |
| | | | | | | 56498693− | |
| BRD9 | 1144 | chr5 | 889767 | 891154 | 15087 | chr5 | alt_3ss |
| | | | | | | 889648 | |
| | | | | | | 889766− | |
| CALM3 | 1145 | chr19 | 46608328 | 46608481 | 15088 | chr19 | alt_3ss |
| | | | | | | 46608482 | |
| | | | | | | 46608923+ | |
| CARS1 | 1146 | chr11 | 3041032 | 3042164 | 15089 | chr11 | alt_3ss |
| | | | | | | 3040985 | |
| | | | | | | 3041031− | |
| CASP9 | 1147 | chr1 | 15507134 | 15507872 | 15090 | chr1 | alt_3ss |
| | | | | | | 15507076 | |
| | | | | | | 15507133− | |
| CD58 | 1152 | chr1 | 116519303 | 116521905 | 15091 | chr1 | alt_3ss |
| | | | | | | 116519268 | |
| | | | | | | 116519302− | |
| CHFR | 1154 | chr12 | 132848258 | 132848640 | 15092 | chr12 | alt_3ss |
| | | | | | | 132848156 | |
| | | | | | | 132848257− | |
| CLCN2 | 1155 | chr3 | 184354715 | 184354903 | 15093 | chr3 | alt_3ss |
| | | | | | | 184354608 | |
| | | | | | | 184354714− | |
| CLCN2 | 1155 | chr3 | 184354715 | 184354903 | 15094 | chr3 | alt_3ss |
| | | | | | | 184354659 | |
| | | | | | | 184354714− | |
| CNOT3 | 1156 | chr19 | 54144333 | 54145541 | 15095 | chr19 | alt_3ss |
| | | | | | | 54145542 | |
| | | | | | | 54145597+ | |
| CNTROB | 1157 | chr17 | 7935146 | 7936237 | 15096 | chr17 | alt_3ss |
| | | | | | | 7936238 | |
| | | | | | | 7936365+ | |
| CTF1 | 1161 | chr16 | 30896669 | 30899306 | 15097 | chr16 | alt_3ss |
| | | | | | | 30899307 | |
| | | | | | | 30899414+ | |
| CTF1 | 1161 | chr16 | 30896669 | 30899306 | 15098 | chr16 | alt_3ss |
| | | | | | | 30899307 | |
| | | | | | | 30899417+ | |
| CYP3A5 | 1163 | chr7 | 99666811 | 99666951 | 15099 | chr7 | alt_3ss |
| | | | | | | 99666690 | |
| | | | | | | 99666810− | |
| DHDDS | 1169 | chr1 | 26438285 | 26442707 | 15100 | chr1 | alt_3ss |
| | | | | | | 26442708 | |
| | | | | | | 26442730+ | |
| DNHD1 | 1171 | chr11 | 6565992 | 6566100 | 15101 | chr11 | alt_3ss |
| | | | | | | 6566101 | |
| | | | | | | 6566240+ | |
| ENTPD4 | 1177 | chr8 | 23434682 | 23435391 | 15102 | chr8 | alt_3ss |
| | | | | | | 23434479 | |
| | | | | | | 23434681− | |
| ESRRA | 1178 | chr11 | 64307505 | 64313853 | 15103 | chr11 | alt_3ss |
| | | | | | | 64313854 | |
| | | | | | | 64313950+ | |
| ESS2 | 1179 | chr22 | 19138480 | 19139158 | 15104 | chr22 | alt_3ss |
| | | | | | | 19138318 | |
| | | | | | | 19138479− | |
| ETAA1 | 1180 | chr2 | 67402975 | 67404996 | 15105 | chr2 | alt_3ss |
| | | | | | | 67404997 | |
| | | | | | | 67405235+ | |
| FASTKD3 | 1184 | chr5 | 7861774 | 7862822 | 15106 | chr5 | alt_3ss |
| | | | | | | 7861653 | |
| | | | | | | 7861773− | |
| FREM1 | 1186 | chr9 | 14776254 | 14784369 | 15107 | chr9 | alt_3ss |
| | | | | | | 14776204 | |
| | | | | | | 14776253− | |
| FREM1 | 1186 | chr9 | 14776257 | 14784369 | 15108 | chr9 | alt_3ss |
| | | | | | | 14776204 | |
| | | | | | | 14776256− | |
| GAS8 | 1187 | chr16 | 90027723 | 90031189 | 15109 | chr16 | alt_3ss |
| | | | | | | 90031190 | |
| | | | | | | 90031298+ | |
| GGA3 | 1190 | chr17 | 75243259 | 75243446 | 15110 | chr17 | alt_3ss |
| | | | | | | 75243167 | |
| | | | | | | 75243258− | |
| GGT1 | 1191 | chr22 | 24623917 | 24627409 | 15111 | chr22 | alt_3ss |
| | | | | | | 24627410 | |
| | | | | | | 24627431+ | |
| GLMN | 1192 | chr1 | 92290331 | 92291417 | 15112 | chr1 | alt_3ss |
| | | | | | | 92290307 | |
| | | | | | | 92290330− | |
| GLMN | 1192 | chr1 | 92266594 | 92266699 | 15113 | chr1 | alt_3ss |
| | | | | | | 92266493 | |
| | | | | | | 92266593− | |
| GRB14 | 1194 | chr2 | 164508604 | 164508741 | 15114 | chr2 | alt_3ss |
| | | | | | | 164508551 | |
| | | | | | | 164508603− | |
| HDAC3 | 1195 | chr5 | 141628213 | 141628558 | 15115 | chr5 | alt_3ss |
| | | | | | | 141628188 | |
| | | | | | | 141628212− | |
| HP1BP3 | 1197 | chr1 | 20749976 | 20757165 | 15116 | chr1 | alt_3ss |
| | | | | | | 20749883 | |
| | | | | | | 20749975− | |
| HPS4 | 1199 | chr22 | 26470923 | 26472301 | 15117 | chr22 | alt_3ss |
| | | | | | | 26470814 | |
| | | | | | | 26470922− | |
| IDUA | 1200 | chr4 | 1001564 | 1001650 | 15118 | chr4 | alt_3ss |
| | | | | | | 1001651 | |
| | | | | | | 1001678+ | |
| IFT122 | 1201 | chr3 | 129514555 | 129515399 | 15119 | chr3 | alt_3ss |
| | | | | | | 129515400 | |
| | | | | | | 129515487+ | |
| IMPDH1 | 1203 | chr7 | 128400205 | 128400332 | 15120 | chr7 | alt_3ss |
| | | | | | | 128400183 | |
| | | | | | | 128400204− | |
| KCTD3 | 1206 | chr1 | 215577729 | 215577928 | 15121 | chr1 | alt_3ss |
| | | | | | | 215577929 | |
| | | | | | | 215578000+ | |
| KYAT1 | 1208 | chr9 | 128836106 | 128836801 | 15122 | chr9 | alt_3ss |
| | | | | | | 128836074 | |
| | | | | | | 128836105− | |
| MAP3K7 | 1213 | chr6 | 90560235 | 90561621 | 15123 | chr6 | alt_3ss |
| | | | | | | 90560215 | |
| | | | | | | 90560234− | |
| NBEAL2 | 1219 | chr3 | 46999118 | 46999269 | 15124 | chr3 | alt_3ss |
| | | | | | | 46999270 | |
| | | | | | | 46999314+ | |
| NOP58 | 1223 | chr2 | 202290458 | 202291020 | 15125 | chr2 | alt_3ss |
| | | | | | | 202291021 | |
| | | | | | | 202291124+ | |
| NPHP1 | 1224 | chr2 | 110178936 | 110179623 | 15126 | chr2 | alt_3ss |
| | | | | | | 110178548 | |
| | | | | | | 110178935− | |
| NUP188 | 1226 | chr9 | 128987718 | 128987915 | 15127 | chr9 | alt_3ss |
| | | | | | | 128987916 | |
| | | | | | | 128988046+ | |
| PHKA2 | 1230 | chrX | 18936202 | 18938626 | 15128 | chrX | alt_3ss |
| | | | | | | 18936151 | |
| | | | | | | 18936201− | |
| PIDD1 | 1231 | chr11 | 803086 | 803173 | 15129 | chr11 | alt_3ss |
| | | | | | | 802892 | |
| | | | | | | 803085− | |
| PIDD1 | 1231 | chr11 | 803648 | 804093 | 15130 | chr11 | alt_3ss |
| | | | | | | 803588 | |
| | | | | | | 803647− | |
| PKD1 | 1232 | chr16 | 2105663 | 2105864 | 15131 | chr16 | alt_3ss |
| | | | | | | 2105475 | |
| | | | | | | 2105662− | |
| PLA2G6 | 1233 | chr22 | 38115850 | 38116074 | 15132 | chr22 | alt_3ss |
| | | | | | | 38115682 | |
| | | | | | | 38115849− | |
| PLD2 | 1234 | chr17 | 4810952 | 4814366 | 15133 | chr17 | alt_3ss |
| | | | | | | 4814367 | |
| | | | | | | 4814417+ | |
| PLD2 | 1234 | chr17 | 4815935 | 4816541 | 15134 | chr17 | alt_3ss |
| | | | | | | 4816542 | |
| | | | | | | 4816619+ | |
| PLEKHG5 | 1235 | chr1 | 6471241 | 6471487 | 15135 | chr1 | alt_3ss |
| | | | | | | 6471101 | |
| | | | | | | 6471240− | |
| PRMT7 | 1239 | chr16 | 68352410 | 68353394 | 15136 | chr16 | alt_3ss |
| | | | | | | 68353395 | |
| | | | | | | 68353491+ | |
| PRODH | 1240 | chr22 | 18919632 | 18919705 | 15137 | chr22 | alt_3ss |
| | | | | | | 18919598 | |
| | | | | | | 18919631− | |
| PRPF3 | 1241 | chr1 | 150344262 | 150344375 | 15138 | chr1 | alt_3ss |
| | | | | | | 150344376 | |
| | | | | | | 150344433+ | |
| PRPF4 | 1242 | chr9 | 113284390 | 113286192 | 15139 | chr9 | alt_3ss |
| | | | | | | 113286193 | |
| | | | | | | 113286231+ | |
| RAD52 | 1244 | chr12 | 916533 | 916638 | 15140 | chr12 | alt_3ss |
| | | | | | | 916484 | |
| | | | | | | 916532− | |
| REXO1 | 1245 | chr19 | 1817459 | 1817706 | 15141 | chr19 | alt_3ss |
| | | | | | | 1817330 | |
| | | | | | | 1817458− | |
| REXO1 | 1245 | chr19 | 1820181 | 1820263 | 15142 | chr19 | alt_3ss |
| | | | | | | 1820058 | |
| | | | | | | 1820180− | |
| RFX5 | 1246 | chr1 | 151344605 | 151344727 | 15143 | chr1 | alt_3ss |
| | | | | | | 151344537 | |
| | | | | | | 151344604− | |
| RUFY3 | 1252 | chr4 | 70789593 | 70793764 | 15144 | chr4 | alt_3ss |
| | | | | | | 70793765 | |
| | | | | | | 70793784+ | |
| SEMA3B | 1253 | chr3 | 50275054 | 50275176 | 15145 | chr3 | alt_3ss |
| | | | | | | 50275177 | |
| | | | | | | 50275301+ | |
| SEMA3F | 1254 | chr3 | 50184815 | 50185402 | 15146 | chr3 | alt_3ss |
| | | | | | | 50185403 | |
| | | | | | | 50185442+ | |
| SH2D3A | 1255 | chr19 | 6754449 | 6754615 | 15147 | chr19 | alt_3ss |
| | | | | | | 6754426 | |
| | | | | | | 6754448− | |
| SIRT3 | 1257 | chr11 | 230707 | 232982 | 15148 | chr11 | alt_3ss |
| | | | | | | 230553 | |
| | | | | | | 230706− | |
| SKIV2L | 1258 | chr6 | 31968539 | 31968622 | 15149 | chr6 | alt_3ss |
| | | | | | | 31968623 | |
| | | | | | | 31968685+ | |
| SLC25A13 | 1261 | chr7 | 96170150 | 96171471 | 15150 | chr7 | alt_3ss |
| | | | | | | 96170126 | |
| | | | | | | 96170149− | |
| SLC2A13 | 1264 | chr12 | 39830481 | 39864761 | 15898 | chr12 | alt_3ss |
| | | | | | | 39830229 | |
| | | | | | | 39830480− | |
| SLC30A10 | 1265 | chr1 | 219927144 | 219927800 | 15151 | chr1 | alt_3ss |
| | | | | | | 219927106 | |
| | | | | | | 219927143− | |
| SLC30A9 | 1266 | chr4 | 42065350 | 42066484 | 15152 | chr4 | alt_3ss |
| | | | | | | 42066485 | |
| | | | | | | 42066549+ | |
| SMTN | 1268 | chr22 | 31088114 | 31088453 | 15153 | chr22 | alt_3ss |
| | | | | | | 31088454 | |
| | | | | | | 31088512+ | |
| STXBP2 | 1272 | chr19 | 7645307 | 7645759 | 15154 | chr19 | alt_3ss |
| | | | | | | 7645760 | |
| | | | | | | 7646248+ | |
| SYNGAP1 | 1274 | chr6 | 33438920 | 33440552 | 15155 | chr6 | alt_3ss |
| | | | | | | 33440553 | |
| | | | | | | 33440728+ | |
| TBL2 | 1277 | chr7 | 73574805 | 73578419 | 15156 | chr7 | alt_3ss |
| | | | | | | 73574514 | |
| | | | | | | 73574804− | |
| TECPR2 | 1279 | chr14 | 102497121 | 102497468 | 15157 | chr14 | alt_3ss |
| | | | | | | 102497469 | |
| | | | | | | 102497569+ | |
| TNK2 | 1282 | chr3 | 195870379 | 195872275 | 15158 | chr3 | alt_3ss |
| | | | | | | 195870206 | |
| | | | | | | 195870378− | |
| TOE1 | 1283 | chr1 | 45342644 | 45342734 | 15159 | chr1 | alt_3ss |
| | | | | | | 45342735 | |
| | | | | | | 45342842+ | |
| TRMT2A | 1287 | chr22 | 20115555 | 20115671 | 15160 | chr22 | alt_3ss |
| | | | | | | 20115448 | |
| | | | | | | 20115554− | |
| TRPV4 | 1289 | chr12 | 109788743 | 109792362 | 15161 | chr12 | alt_3ss |
| | | | | | | 109788717 | |
| | | | | | | 109788742− | |
| UROD | 1293 | chr1 | 45012286 | 45012856 | 15162 | chr1 | alt_3ss |
| | | | | | | 45012857 | |
| | | | | | | 45012906+ | |
| WDR62 | 1295 | chr19 | 36066016 | 36066207 | 15163 | chr19 | alt_3ss |
| | | | | | | 36066208 | |
| | | | | | | 36066256+ | |
| WRAP53 | 1297 | chr17 | 7700830 | 7701426 | 15164 | chr17 | alt_3ss |
| | | | | | | 7701427 | |
| | | | | | | 7701458+ | |
| XPO1 | 1298 | chr2 | 61492251 | 61492324 | 15165 | chr2 | alt_3ss |
| | | | | | | 61492199 | |
| | | | | | | 61492250− | |

*alt_3ss refers to an alternative 3′ splice site of an intron, which is equivalent to the alternative 5′ splice site of the exon immediately downstream of the intron. coordinate of alternative intron. Region coordinate: coordinate of alternative intron. Event coordinate: coordinate of intronic region that is included due to alternative 3′ss or 5′ss selection. + or − refers to the strand in which the gene is located.

TABLE 5B

| | Genomic | | | | SEQ | Event | |
|---|---|---|---|---|---|---|---|
| | sequence | Region coordinate | | | ID | coordinate | Event |
| Gene | SEQ ID NO: | chrm | start | end | NO: | exon | type* |
| ABCA5 | 1116 | chr17 | 69248318 | 69249818 | 15166 | chr17 | alt_5ss |
| | | | | | | 69249819 | |
| | | | | | | 69249904− | |
| ABCA7 | 1117 | chr19 | 1063900 | 1064160 | 15167 | chr19 | alt_5ss |
| | | | | | | 1063864 | |
| | | | | | | 1063899+ | |
| ABCD1 | 1121 | chrX | 153736912 | 153737156 | 15168 | chrX | alt_5ss |
| | | | | | | 153736514 | |
| | | | | | | 153736911+ | |
| ABR | 1122 | chr17 | 1006170 | 1006774 | 15169 | chr17 | alt_5ss |
| | | | | | | 1006775 | |
| | | | | | | 1007164− | |
| ABR | 1122 | chr17 | 1006170 | 1006839 | 15170 | chr17 | alt_5ss |
| | | | | | | 1006840 | |
| | | | | | | 1007164− | |
| ABR | 1122 | chr17 | 1006170 | 1006904 | 15171 | chr17 | alt_5ss |
| | | | | | | 1006905 | |
| | | | | | | 1007164− | |
| ACAD9 | 1123 | chr3 | 128880018 | 128884652 | 15172 | chr3 | alt_5ss |
| | | | | | | 128879842 | |
| | | | | | | 128880017+ | |
| ACAP1 | 1124 | chr17 | 7350431 | 7350949 | 15173 | chr17 | alt_5ss |
| | | | | | | 7350238 | |
| | | | | | | 7350430+ | |
| ACTN4 | 1127 | chr19 | 38728382 | 38728995 | 15174 | chr19 | alt_5ss |
| | | | | | | 38728027 | |
| | | | | | | 38728381+ | |
| ADAMTS13 | 1129 | chr9 | 133430182 | 133432587 | 15175 | chr9 | alt_5ss |
| | | | | | | 133430102 | |
| | | | | | | 133430181+ | |
| AKR1E2 | 1130 | chr10 | 4847300 | 4847487 | 15176 | chr10 | alt_5ss |
| | | | | | | 4847231 | |
| | | | | | | 4847299+ | |
| ALG3 | 1132 | chr3 | 184245813 | 184248781 | 15177 | chr3 | alt_5ss |
| | | | | | | 184248782 | |
| | | | | | | 184248989− | |
| ALG3 | 1132 | chr3 | 184245813 | 184248781 | 15178 | chr3 | alt_5ss |
| | | | | | | 184248782 | |
| | | | | | | 184249225− | |
| ANKRD29 | 1133 | chr18 | 23617828 | 23619394 | 15179 | chr18 | alt_5ss |
| | | | | | | 23619395 | |
| | | | | | | 23619530− | |
| AP3M1 | 1137 | chr10 | 74124525 | 74126125 | 15180 | chr10 | alt_5ss |
| | | | | | | 74126126 | |
| | | | | | | 74126147− | |
| ASAP3 | 1140 | chr1 | 23434619 | 23435722 | 15181 | chr1 | alt_5ss |
| | | | | | | 23435723 | |
| | | | | | | 23435850− | |
| ATRX | 1141 | chrX | 77717244 | 77785844 | 15899 | chrX | alt_5ss |
| | | | | | | 77785845 | |
| | | | | | | 77785981− | |
| BBS4 | 1143 | chr15 | 72686565 | 72695176 | 15182 | chr15 | alt_5ss |
| | | | | | | 72686252 | |
| | | | | | | 72686564+ | |
| CATSPER1 | 1148 | chr11 | 66017175 | 66018787 | 15183 | chr11 | alt_5ss |
| | | | | | | 66018788 | |
| | | | | | | 66018826− | |
| CCDC40 | 1149 | chr17 | 80088190 | 80089763 | 15184 | chr17 | alt_5ss |
| | | | | | | 80088103 | |
| | | | | | | 80088189+ | |
| CCDC88B | 1150 | chr11 | 64342808 | 64343178 | 15185 | chr11 | alt_5ss |
| | | | | | | 64342681 | |
| | | | | | | 64342807+ | |
| CD4 | 1151 | chr12 | 6818651 | 6818846 | 15186 | chr12 | alt_5ss |
| | | | | | | 6818543 | |
| | | | | | | 6818650+ | |
| CES2 | 1153 | chr16 | 66935876 | 66938036 | 15187 | chr16 | alt_5ss |
| | | | | | | 66935712 | |
| | | | | | | 66935875+ | |
| CES2 | 1153 | chr16 | 66935977 | 66938036 | 15188 | chr16 | alt_5ss |
| | | | | | | 66935712 | |
| | | | | | | 66935976+ | |
| COL5A3 | 1158 | chr19 | 9992049 | 9992693 | 15189 | chr19 | alt_5ss |
| | | | | | | 9992694 | |
| | | | | | | 9992826− | |
| CPSF1 | 1159 | chr8 | 144398133 | 144398188 | 15190 | chr8 | alt_5ss |
| | | | | | | 144398189 | |
| | | | | | | 144398301− | |
| CSPP1 | 1160 | chr8 | 67064539 | 67074242 | 15191 | chr8 | alt_5ss |
| | | | | | | 67064497 | |
| | | | | | | 67064538+ | |
| CTH | 1162 | chr1 | 70411657 | 70415955 | 15192 | chr1 | alt_5ss |
| | | | | | | 70411584 | |
| | | | | | | 70411656+ | |
| DAB2IP | 1164 | chr9 | 121678918 | 121699324 | 15193 | chr9 | alt_5ss |
| | | | | | | 121678782 | |
| | | | | | | 121678917+ | |
| DBN1 | 1165 | chr5 | 177467818 | 177467995 | 15194 | chr5 | alt_5ss |
| | | | | | | 177467996 | |
| | | | | | | 177468107− | |
| DBN1 | 1165 | chr5 | 177467818 | 177468051 | 15195 | chr5 | alt_5ss |
| | | | | | | 177468052 | |
| | | | | | | 177468107− | |
| DDX51 | 1166 | chr12 | 132141021 | 132141102 | 15196 | chr12 | alt_5ss |
| | | | | | | 132141103 | |
| | | | | | | 132141274− | |
| DEAF1 | 1167 | chr11 | 691599 | 694678 | 15197 | chr11 | alt_5ss |
| | | | | | | 694679 | |
| | | | | | | 694758− | |
| DGKE | 1168 | chr17 | 56856666 | 56858593 | 15198 | chr17 | alt_5ss |
| | | | | | | 56856626 | |
| | | | | | | 56856665+ | |
| DMKN | 1170 | chr19 | 35497539 | 35498597 | 15199 | chr19 | alt_5ss |
| | | | | | | 35498598 | |
| | | | | | | 35498715− | |
| DOCK8 | 1172 | chr9 | 215417 | 271626 | 15900 | chr9 | alt_5ss |
| | | | | | | 215030 | |
| | | | | | | 215416+ | |
| DOK5 | 1173 | chr20 | 54476186 | 54554932 | 15901 | chr20 | alt_5ss |
| | | | | | | 54476013 | |
| | | | | | | 54476185+ | |
| EIF2B5 | 1174 | chr3 | 184140222 | 184140417 | 15200 | chr3 | alt_5ss |
| | | | | | | 184140158 | |
| | | | | | | 184140221+ | |
| ELAC2 | 1175 | chr17 | 13017122 | 13017566 | 15201 | chr17 | alt_5ss |
| | | | | | | 13017567 | |
| | | | | | | 13017702− | |
| ELP1 | 1176 | chr9 | 108896645 | 108896890 | 15202 | chr9 | alt_5ss |
| | | | | | | 108896891 | |
| | | | | | | 108896952− | |
| ETHE1 | 1181 | chr19 | 43526660 | 43526936 | 15203 | chr19 | alt_5ss |
| | | | | | | 43526937 | |
| | | | | | | 43527096− | |
| FANCA | 1182 | chr16 | 89739554 | 89739705 | 15204 | chr16 | alt_5ss |
| | | | | | | 89739706 | |
| | | | | | | 89739993− | |
| FASTK | 1183 | chr7 | 151079923 | 151080436 | 15205 | chr7 | alt_5ss |
| | | | | | | 151080437 | |
| | | | | | | 151080684− | |
| FASTK | 1183 | chr7 | 151079923 | 151080208 | 15206 | chr7 | alt_5ss |
| | | | | | | 151080209 | |
| | | | | | | 151080684− | |
| FPGS | 1185 | chr9 | 127807776 | 127808233 | 15207 | chr9 | alt_5ss |
| | | | | | | 127807689 | |
| | | | | | | 127807775+ | |
| GAS8 | 1187 | chr16 | 90035880 | 90036380 | 15208 | chr16 | alt_5ss |
| | | | | | | 90035688 | |
| | | | | | | 90035879+ | |
| GCK | 1188 | chr7 | 44145731 | 44146073 | 15209 | chr7 | alt_5ss |
| | | | | | | 44146074 | |
| | | | | | | 44146462− | |
| GGA1 | 1189 | chr22 | 37609155 | 37614189 | 15210 | chr22 | alt_5ss |
| | | | | | | 37608904 | |
| | | | | | | 37609154+ | |
| GON4L | 1193 | chr1 | 155773211 | 155774962 | 15211 | chr1 | alt_5ss |
| | | | | | | 155774963 | |
| | | | | | | 155775001− | |
| HELQ | 1196 | chr4 | 83453946 | 83455268 | 15212 | chr4 | alt_5ss |
| | | | | | | 83455269 | |
| | | | | | | 83455396− | |
| HPS1 | 1198 | chr10 | 98431292 | 98433939 | 15213 | chr10 | alt_5ss |
| | | | | | | 98433940 | |
| | | | | | | 98433982− | |
| IL17RC | 1202 | chr3 | 9924138 | 9924231 | 15214 | chr3 | alt_5ss |
| | | | | | | 9924021 | |
| | | | | | | 9924137+ | |
| INVS | 1204 | chr9 | 100292874 | 100292946 | 15215 | chr9 | alt_5ss |
| | | | | | | 100292437 | |
| | | | | | | 100292873+ | |
| IRF3 | 1205 | chr19 | 49660829 | 49661449 | 15216 | chr19 | alt_5ss |
| | | | | | | 49661450 | |
| | | | | | | 49661947− | |
| IRF3 | 1205 | chr19 | 49660845 | 49661449 | 15217 | chr19 | alt_5ss |
| | | | | | | 49661450 | |
| | | | | | | 49661947− | |
| KLKB1 | 1207 | chr4 | 186250434 | 186251218 | 15218 | chr4 | alt_5ss |
| | | | | | | 186250403 | |
| | | | | | | 186250433+ | |
| LAMC3 | 1209 | chr9 | 131085872 | 131087475 | 15219 | chr9 | alt_5ss |
| | | | | | | 131085724 | |
| | | | | | | 131085871+ | |
| LDAH | 1210 | chr2 | 20685658 | 20686837 | 15220 | chr2 | alt_5ss |
| | | | | | | 20686838 | |
| | | | | | | 20686906− | |
| LIMS2 | 1211 | chr2 | 127673744 | 127674620 | 15221 | chr2 | alt_5ss |
| | | | | | | 127674621 | |
| | | | | | | 127675013− | |
| MALT1 | 1212 | chr18 | 58734567 | 58735201 | 15222 | chr18 | alt_5ss |
| | | | | | | 58734382 | |
| | | | | | | 58734566+ | |
| MAPK13 | 1214 | chr6 | 36131158 | 36131270 | 15223 | chr6 | alt_5ss |
| | | | | | | 36130702 | |
| | | | | | | 36131157+ | |
| MCAT | 1215 | chr22 | 43141250 | 43142891 | 15224 | chr22 | alt_5ss |
| | | | | | | 43142892 | |
| | | | | | | 43142925− | |
| MCEE | 1216 | chr2 | 71124544 | 71129716 | 15225 | chr2 | alt_5ss |
| | | | | | | 71129717 | |
| | | | | | | 71130179− | |
| MPI | 1217 | chr15 | 74890202 | 74890526 | 15226 | chr15 | alt_5ss |
| | | | | | | 74890090 | |
| | | | | | | 74890201+ | |
| MSTO1 | 1218 | chr1 | 155611356 | 155611548 | 15227 | chr1 | alt_5ss |
| | | | | | | 155611292 | |
| | | | | | | 155611355+ | |
| NLE1 | 1220 | chr17 | 35139315 | 35139819 | 15228 | chr17 | alt_5ss |
| | | | | | | 35139820 | |
| | | | | | | 35139848− | |
| NLRC5 | 1221 | chr16 | 57028204 | 57028301 | 15229 | chr16 | alt_5ss |
| | | | | | | 57028156 | |
| | | | | | | 57028203+ | |
| NOM1 | 1222 | chr7 | 156960254 | 156962150 | 15230 | chr7 | alt_5ss |
| | | | | | | 156960175 | |
| | | | | | | 156960253+ | |
| NPR1 | 1225 | chr1 | 153682198 | 153682497 | 15231 | chr1 | alt_5ss |
| | | | | | | 153681840 | |
| | | | | | | 153682197+ | |
| OSGEP | 1227 | chr14 | 20448812 | 20448901 | 15232 | chr14 | alt_5ss |
| | | | | | | 20448902 | |
| | | | | | | 20448963− | |
| PABPC4 | 1228 | chr1 | 39570003 | 39571096 | 15233 | chr1 | alt_5ss |
| | | | | | | 39571097 | |
| | | | | | | 39571233− | |
| PCOLCE | 1229 | chr7 | 100604503 | 100605090 | 15234 | chr7 | alt_5ss |
| | | | | | | 100604218 | |
| | | | | | | 100604502+ | |
| PLD2 | 1234 | chr17 | 4818407 | 4818493 | 15235 | chr17 | alt_5ss |
| | | | | | | 4818386 | |
| | | | | | | 4818406+ | |
| PNPO | 1236 | chr17 | 47942052 | 47943305 | 15236 | chr17 | alt_5ss |
| | | | | | | 47941814 | |
| | | | | | | 47942051+ | |
| POLE | 1237 | chr12 | 132672323 | 132672579 | 15237 | chr12 | alt_5ss |
| | | | | | | 132672580 | |
| | | | | | | 132672626− | |
| PON2 | 1238 | chr7 | 95412478 | 95416171 | 15238 | chr7 | alt_5ss |
| | | | | | | 95416172 | |
| | | | | | | 95416241− | |
| PYCR1 | 1243 | chr17 | 81936862 | 81936969 | 15239 | chr17 | alt_5ss |
| | | | | | | 81936970 | |
| | | | | | | 81937179− | |
| RAD52 | 1244 | chr12 | 927264 | 929763 | 15240 | chr12 | alt_5ss |
| | | | | | | 929764 | |
| | | | | | | 929818− | |
| RAD52 | 1244 | chr12 | 914122 | 914410 | 15241 | chr12 | alt_5ss |
| | | | | | | 914411 | |
| | | | | | | 914430− | |
| RHBDF2 | 1247 | chr17 | 76474535 | 76474659 | 15242 | chr17 | alt_5ss |
| | | | | | | 76474660 | |
| | | | | | | 76474729− | |
| RMND1 | 1248 | chr6 | 151433231 | 151436419 | 15243 | chr6 | alt_5ss |
| | | | | | | 151436420 | |
| | | | | | | 151436445− | |
| ROBO3 | 1249 | chr11 | 124876933 | 124877160 | 15244 | chr11 | alt_5ss |
| | | | | | | 124876461 | |
| | | | | | | 124876932+ | |
| ROBO3 | 1249 | chr11 | 124877753 | 124877936 | 15245 | chr11 | alt_5ss |
| | | | | | | 124877659 | |
| | | | | | | 124877752+ | |
| RPGRIP1 | 1250 | chr14 | 21321630 | 21321853 | 15246 | chr14 | alt_5ss |
| | | | | | | 21321403 | |
| | | | | | | 21321629+ | |
| RTTN | 1251 | chr18 | 70060043 | 70065756 | 15247 | chr18 | alt_5ss |
| | | | | | | 70065757 | |
| | | | | | | 70065828− | |
| SIK3 | 1256 | chr11 | 116868090 | 116870140 | 15248 | chr11 | alt_5ss |
| | | | | | | 116870141 | |
| | | | | | | 116870330− | |
| SLC12A7 | 1259 | chr5 | 1075491 | 1075890 | 15249 | chr5 | alt_5ss |
| | | | | | | 1075891 | |
| | | | | | | 1076137− | |
| SLC22A3 | 1260 | chr6 | 160349059 | 160397978 | 15902 | chr6 | alt_5ss |
| | | | | | | 160348849 | |
| | | | | | | 160349058+ | |
| SLC25A37 | 1262 | chr8 | 23566814 | 23568321 | 15250 | chr8 | alt_5ss |
| | | | | | | 23566337 | |
| | | | | | | 23566813+ | |
| SLC27A5 | 1263 | chr19 | 58499221 | 58499394 | 15251 | chr19 | alt_5ss |
| | | | | | | 58499395 | |
| | | | | | | 58499491− | |
| SMPD1 | 1267 | chr11 | 6392197 | 6393215 | 15252 | chr11 | alt_5ss |
| | | | | | | 6392157 | |
| | | | | | | 6392196+ | |
| SNRPB | 1269 | chr20 | 2465820 | 2467191 | 15253 | chr20 | alt_5ss |
| | | | | | | 2467192 | |
| | | | | | | 2467606− | |
| SP140 | 1270 | chr2 | 230310212 | 230310742 | 15254 | chr2 | alt_5ss |
| | | | | | | 230310040 | |
| | | | | | | 230310211+ | |
| STAMBP | 1271 | chr2 | 73845037 | 73845166 | 15255 | chr2 | alt_5ss |
| | | | | | | 73844889 | |
| | | | | | | 73845036+ | |
| SULF2 | 1273 | chr20 | 47665954 | 47666087 | 15256 | chr20 | alt_5ss |
| | | | | | | 47666088 | |
| | | | | | | 47666259− | |
| SYNJ2 | 1275 | chr6 | 158062222 | 158063790 | 15257 | chr6 | alt_5ss |
| | | | | | | 158062165 | |
| | | | | | | 158062221+ | |
| TAZ | 1276 | chrX | 154413359 | 154413481 | 15258 | chrX | alt_5ss |
| | | | | | | 154413253 | |
| | | | | | | 154413358+ | |
| TDRD7 | 1278 | chr9 | 97478636 | 97480827 | 15259 | chr9 | alt_5ss |
| | | | | | | 97478574 | |
| | | | | | | 97478635+ | |
| TFB1M | 1280 | chr6 | 155311340 | 155314116 | 15260 | chr6 | alt_5ss |
| | | | | | | 155314117 | |
| | | | | | | 155314295− | |
| TM6SF1 | 1281 | chr15 | 83119735 | 83121920 | 15261 | chr15 | alt_5ss |
| | | | | | | 83119682 | |
| | | | | | | 83119734+ | |
| TOR1B | 1284 | chr9 | 129804480 | 129807187 | 15262 | chr9 | alt_5ss |
| | | | | | | 129804339 | |
| | | | | | | 129804479+ | |
| TRAPPC6B | 1285 | chr14 | 39158403 | 39159449 | 15263 | chr14 | alt_5ss |
| | | | | | | 39159450 | |
| | | | | | | 39159482− | |
| TRIP4 | 1286 | chr15 | 64388049 | 64393945 | 15264 | chr15 | alt_5ss |
| | | | | | | 64387965 | |
| | | | | | | 64388048+ | |
| TRMU | 1288 | chr22 | 46336107 | 46337778 | 15265 | chr22 | alt_5ss |
| | | | | | | 46335847 | |
| | | | | | | 46336106+ | |
| TTC19 | 1290 | chr17 | 16000383 | 16001914 | 15266 | chr17 | alt_5ss |
| | | | | | | 16000246 | |
| | | | | | | 16000382+ | |
| TYMP | 1291 | chr22 | 50526739 | 50526897 | 15267 | chr22 | alt_5ss |
| | | | | | | 50526898 | |
| | | | | | | 50527164− | |
| UMPS | 1292 | chr3 | 124738444 | 124740023 | 15268 | chr3 | alt_5ss |
| | | | | | | 124738240 | |
| | | | | | | 124738443+ | |
| WDR11 | 1294 | chr10 | 120851528 | 120852523 | 15269 | chr10 | alt_5ss |
| | | | | | | 120851507 | |
| | | | | | | 120851527+ | |
| WIPI1 | 1296 | chr17 | 68433576 | 68434419 | 15270 | chr17 | alt_5ss |
| | | | | | | 68434420 | |
| | | | | | | 68434555− | |
| YY1AP1 | 1299 | chr1 | 155688202 | 155688578 | 15271 | chr1 | alt_5ss |
| | | | | | | 155688579 | |
| | | | | | | 155688929− | |
| ZC3H14 | 1300 | chr14 | 88607395 | 88609266 | 15272 | chr14 | alt_5ss |
| | | | | | | 88607364 | |
| | | | | | | 88607394+ | |
| ZC3H14 | 1300 | chr14 | 88607426 | 88609266 | 15273 | chr14 | alt_5ss |
| | | | | | | 88607364 | |
| | | | | | | 88607425+ | |

*alt_5ss refers to an alternative 5′ splice site of an intron, which is equivalent to the alternative 3′ splice site of the exon immediately upstream of the intron. Region coordinate: coordinate of alternative intron. Event coordinate: coordinate of intronic region that is included due to alternative 3′ss or 5′ss selection. + or − refers to the strand in which the gene is located.

TABLE 5C

| | Genomic | | | | SEQ | | | Event |
|---|---|---|---|---|---|---|---|---|
| | sequence | | | Region | ID | Event | Event | size |
| Gene | SEQ ID NO: | Disease | Genetics | coordinate | NO: | coordinate | type* | (bp) |
| GRN | | GRN-related | Haploinsufficiency | chr17 | | chr17 | Alt | −20 |
| | | frontotemporal | | 44350228 | | 44350442 | 3′ss | |
| | | dementia | | 44350577 | | 44350461 | | |
| SHANK3 | | Phelan- | Haploinsufficiency | chr22 | | chr22 | Alt | 124 |
| | | McDermid | | 50705033 | | 50705948 | 3′ss | |
| | | syndrome; | | 50706149 | | 50706071 | | |
| | | Autism | | | | | | |
| | | spectrum | | | | | | |
| | | disorder | | | | | | |
| PRPF3 | 1241 | Retinitis | Haploinsufficiency | chr1 | | chr1 | Alt | 58 |
| | | pigmentosa | | 150344263 | | 150344376 | 3′ss | |
| | | 18 | | 150344375 | | 150344433 | | |
| PRPF4 | 1242 | Retinitis | Haploinsufficiency | chr9 | | chr9 | Alt | −49 |
| | | pigmentosa | | 113290540 | | 113290540 | 5′ss | |
| | | 70 | | 113290699 | | 113290588 | | |
| | | | | chr9 | 15274 | chr9 | Alt | 39 |
| | | | | 113284390 | | 113286193 | 3′ss | |
| | | | | 113286192 | | 113286231 | | |
| SYNG | 1274 | AD MENTAL | Haploinsufficiency | chr6 | | chr6 | Alt | −37 |
| AP1 | | RETARDATION | | 33438883 | | 33438883 | 5′ss | |
| | | 5 | | 33440728 | | 33438919 | | |
| | | | | chr6 | | chr6 | Alt | 179 |
| | | | | 33438920 | | 33440550 | 3′ss | |
| | | | | 33440549 | | 33440728 | | |
| | | | | chr6 | 15275 | chr6 | Alt | 176 |
| | | | | 33438920 | | 33440553 | 3′ss | |
| | | | | 33440552 | | 33440728 | | |
| ABCA | | Stargardt | Autosomal | chr1 | | chr1 | Alt | −41 |
| 4 | | disease | recessive | 94019669 | | 94019583 | 3′ss | |
| | | | | 94021239 | | 94019668 | | |
| DNAJ | | Pathway/EYE | N/A | chr2 | | chr2 | Alt | 77 |
| B2 | | | | 219279976 | | 219279899 | 5′ss | |
| | | | | 219280577 | | 219279975 | | |
| | | | | chr2 | | chr2 | Alt | −28 |
| | | | | 219282930 | | 219283133 | 3′ss | |
| | | | | 219283160 | | 219283160 | | |
| CLPX | | Pathway/EYE | N/A | chr15 | | chr15 | Alt | 66 |
| | | | | 65155857 | | 65156778 | 5′ss | |
| | | | | 65156777 | | 65156843 | | |
| HSPA | | Pathway/EYE | N/A | chr5 | | chr5 | Alt | 43 |
| 9 | | | | 138574170 | | 138574127 | 3′ss | |
| | | | | 138575237 | | 138574169 | | |
| SLC4 | | Fuch's corneal | Autosomal | chr20 | | chr20 | Alt | −49 |
| A11 | | dystrophy | recessive | 3229214 | | 3229214 | 3′ss | |
| | | | | 3229345 | | 3229263 | | |
| | | | | chr20 | | chr20 | Alt | −70 |
| | | | | 3229707 | | 3229707 | 3′ss | |
| | | | | 3230186 | | 3229776 | | |
| OPTN | | Pathway | N/A | chr10 | | chr10 | Alt | 94 |
| | | | | 13109289 | | 13110180 | 3′ss | |
| | | | | 13110179 | | 13110273 | | |
| eIF2B | 1174 | Pathway | N/A | chr3 | 15276 | chr3 | Alt | 64 |
| 5 | | | | 184140222 | | 184140158 | 5′ss | |
| | | | | 184140417 | | 184140221 | | |
| | | | | chr3 | | chr3 | Alt | 15 |
| | | | | 184142395 | | 184142379 | 5′ss | |
| | | | | 184142501 | | 184142394 | | |
| SIRT3 | 1257 | Pathway | N/A | chr11 | | chr11 | Alt | 89 |
| | | | | 230642 | | 230553 | 3′ss | |
| | | | | 232982 | | 230641 | | |
| | | | | chr11 | 15277 | chr11 | Alt | 154 |
| | | | | 230707 | | 230553 | 3′ss | |
| | | | | 232982 | | 230706 | | |
| STAT | | Pathway | N/A | chr17 | | chr17 | Alt | 119 |
| 3 | | | | 42323355 | | 42323453 | 5′ss | |
| | | | | 42323452 | | 42323572 | | |
| KCNQ | | early-onset | Haploinsufficiency | chr20 | | chr20 | Alt | −56 |
| 2 | | epileptic | | 63444835 | | 63445238 | 5′ss | |
| | | encephalopathy | | 63445293 | | 63445293 | | |
| CACN | | Spinocerebellar | Haploinsufficiency ? | chr17 | | chr17 | Alt | 123 |
| A1G | | ataxia 42 [AD] | | 50569804 | | 50571755 | 3′ss | |
| | | | | 50571754 | | 50571877 | | |
| | | | | chr17 | | chr17 | Alt | −49 |
| | | | | 50617930 | | 50618048 | 3′ss | |
| | | | | 50618096 | | 50618096 | | |
| GBA | | Parkinson | Haploinsufficiency | chr1 | | chr1 | Alt | −115 |
| | | disease | | 155239963 | | 155239963 | 3′ss | |
| | | | | 155240629 | | 155240077 | | |
| | | | | chr1 | | chr1 | Alt | 453 |
| | | | | 155240078 | | 155240177 | 5′ss | |
| | | | | 155240176 | | 155240629 | | |
| KL | | Pathway | N/A | chr13 | | chr13 | Alt | 50 |
| | | | | 33055366 | | 33055316 | 5′ss | |
| | | | | 33060678 | | 33055365 | | |
| AKT2 | | Pathway | N/A | chr19 | | chr19 | Alt | 117 |
| | | | | 40235468 | | 40235351 | 3′ss | |
| | | | | 40235889 | | 40235467 | | |
| EIF2A | | Pathway | N/A | chr2 | | chr2 | Alt | −44 |
| K3 | | | | 88591009 | | 88591009 | 3′ss | |
| | | | | 88593271 | | 88591052 | | |
| SEMA | | Pathway | N/A | chr1 | | chr1 | Alt | 17 |
| 4A | | | | 156158487 | | 156158702 | 3′ss | |
| | | | | 156158701 | | 156158718 | | |
| SEMA | 1253 | Pathway | N/A | chr3 | 15278 | chr3 | Alt | 125 |
| 3B | | | | 50275054 | | 50275177 | 3′ss | |
| | | | | 50275176 | | 50275301 | | |
| SEMA | 1254 | Pathway | N/A | chr3 | 15279 | chr3 | Alt | 40 |
| 3F | | | | 50184815 | | 50185403 | 3′ss | |
| | | | | 50185402 | | 50185442 | | |
| | | | | chr3 | | chr3 | Alt | -19 |
| | | | | 50184796 | | 50184796 | 5′ss | |
| | | | | 50185442 | | 50184814 | | |
| SLC4 | | Corneal | Haploinsufficiency | chr20 | | chr20 | Alt | −70 |
| A11 | | dystrophy, | | 3229707 | | 3229707 | 3′ss | |
| | | Fuchs | | 3230186 | | 3229776 | | |
| | | endothelial, | | | | | | |
| | | 4 | | | | | | |
| JAG1 | | Alagille | Haploinsufficiency | chr20 | | chr20 | Alt | 354 |
| | | syndrome | | 10647104 | | 10647606 | 5′ss | |
| | | | | 10647605 | | 10647959 | | |
| CHD2 | | Epileptic | Haploinsufficiency | chr15 | | chr15 | Alt | 86 |
| | | encephalopathy, | | 92974951 | | 92978148 | 3′ss | |
| | | childhood-onset | | 92978147 | | 92978233 | | |
| MCEE | 1216 | Methylmalonyl- | Autosomal | chr2 | 15280 | chr2 | Alt | 463 |
| | | CoA epimerase | recessive | 71124544 | | 71129717 | 5′ss | |
| | | deficiency | | 71129716 | | 71130179 | | |
| TRAP | 1285 | Neurodevelopm | Autosomal | chr14 | 15281 | chr14 | Alt | 33 |
| PC6B | | ental disorder | recessive | 39158403 | | 39159450 | 5′ss | |
| | | with microcephaly, | | 39159449 | | 39159482 | | |
| | | epilepsy, and | | | | | | |
| | | brain atrophy | | | | | | |
| AP3B | 1136 | Epileptic | Autosomal | chr15 | 15282 | chr15 | Alt | 62 |
| 2 | | encephalopathy, | recessive | 82663296 | | 82663234 | 3′ss | |
| | | early infantile, | | 82663559 | | 82663295 | | |
| | | 48 | | | | | | |
| TTC19 | 1290 | Mitochondrial | Autosomal | chr17 | 15283 | chr17 | Alt | 137 |
| | | complex III | recessive | 16000383 | | 16000246 | 5′ss | |
| | | deficiency, | | 16001914 | | 16000382 | | |
| | | nuclear type 2 | | | | | | |
| DMTF | | Tumor | N/A | chr7 | | chr7 | Alt | 172 |
| 1 | | suppressor | | 87181342 | | 87182056 | 3′ss | |
| | | | | 87182055 | | 87182227 | | |
| | | | | chr7 | | chr7 | Alt | 211 |
| | | | | 87181342 | | 87182017 | 3′ss | |
| | | | | 87182016 | | 87182227 | | |
| HDAC | 1195 | Tumor | N/A | chr5 | 15284 | chr5 | Alt | 25 |
| 3 | | suppressor | | 141628213 | | 141628188 | 3′ss | |
| | | | | 141628558 | | 141628212 | | |
| DAB2I | 1164 | Tumor | N/A | chr9 | 15285 | chr9 | Alt | 136 |
| P | | suppressor | | 121678918 | | 121678782 | 5′ss | |
| | | | | 121699324 | | 121678917 | | |
| CD4 | 1151 | Tumor | N/A | chr12 | 15286 | chr12 | Alt | 108 |
| | | suppressor | | 6818651 | | 6818543 | 5′ss | |
| | | | | 6818846 | | 6818650 | | |
| TP53B | | Tumor | N/A | chr1 | | chr1 | Alt | 302 |
| P2 | | suppressor | | 223802345 | | 223802429 | 5′ss | |
| | | | | 223802428 | | 223802730 | | |
| BAP1 | | Tumor | N/A | chr3 | | chr3 | Alt | 136 |
| | | suppressor | | 52406459 | | 52406323 | 3′ss | |
| | | | | 52406828 | | 52406458 | | |
| | | | | | | chr3 | Alt | 82 |
| | | | | | | 52406377 | 3′ss | |
| | | | | | | 52406458 | | |
| CHFR | 1154 | Tumor | N/A | chr12 | | chr12 | Alt | 68 |
| | | suppressor | | 132848224 | | 132848156 | 3′ss | |
| | | | | 132848640 | | 132848223 | | |
| IRF3 | 1205 | Tumor | N/A | chr19 | 15287 | chr19 | Alt | 498 |
| | | suppressor | | 49660829 | | 49661450 | 5′ss | |
| | | | | 49661449 | | 49661947 | | |
| SIRT2 | | Tumor | N/A | chr19 | | chr19 | Alt | 471 |
| | | suppressor | | 38880174 | | 38879703 | 3′ss | |
| | | | | 38880684 | | 38880173 | | |
| RBL1 | | Tumor | N/A | chr20 | | chr20 | Alt | 138 |
| | | suppressor | | 37061270 | | 37061946 | 5′ss | |
| | | | | 37061945 | | 37062083 | | |

*Alt 5ss refers to an alternative 5′ splice site of an intron, which is equivalent to the alternative 3′ splice site of the exon immediately upstream of the intron. Alt 3ss refers to an alternative 3′ splice site of an intron, which is equivalent to the alternative 5′ splice site of the exon immediately downstream of the intron. Region coordinate: coordinate of alternative intron. Event coordinate: coordinate of intronic region that is included due to alternative 3′ss or 5′ss selection.

[0825] In some embodiments, the ASOs disclosed herein target a NSAE pre-mRNA transcribed from a ABCA4 genomic sequence. In some embodiments, the ASO targets a NSAE pre-mRNA transcript from a ABCA4 genomic sequence comprising a NSAE exon. In some embodiments, the ASO targets a NSAE pre-mRNA transcript from a ABCA4 genomic sequence comprising an intron flanking the 3′ splice site of the NSAE exon and an intron flanking the 5′ splice site of a NSAE exon. In some embodiments, the ASO targets a NSAE pre-mRNA transcript of ABCA4. In some embodiments, the ASO targets a ABCA4 pre-mRNA sequence comprising a NSAE exon. In some embodiments, the ASO targets a ABCA4 pre-mRNA sequence comprising an intron flanking the 3′ splice site of the NSAE exon. In some embodiments, the ASO targets a ABCA4 pre-mRNA sequence comprising an intron flanking the 5′ splice site of the NSAE exon.

[0826] In some embodiments, the ABCA4 pre-mRNA transcript is encoded by a genetic sequence with at least about 80%, 85%, 90%, 95%, 96%, 97%, 98%, 99% or 100% sequence identity to the Ensembl reference number ENSG00000198691.13 or a complement thereof. In some embodiments, the ABCA4 pre-mRNA transcript comprises a sequence with at least about 80%, 85%, 90%, 95%, 96%, 97%, 98%, 99% or 100% sequence identity to a ABCA4 pre-mRNA transcript or a complement thereof described herein.

[0827] In some embodiments, the targeted portion of the ABCA4 pre-mRNA comprises a sequence with at least 80%, 85%, 90%, 95%, 97%, or 100% sequence identity to a region comprising at least 8 contiguous nucleic acids of a sequence of Table 6A or Table 6B or complements thereof. In some embodiments, the target portion of the ABCA4 pre-mRNA comprises the exemplary NMD-inducing Alternative 5′ splice site or 3′ splice site as indicated in Table 5C.

[0828] In some embodiments, the ASOs disclosed herein target a NSAE pre-mRNA transcribed from a AKT2 genomic sequence. In some embodiments, the ASO targets a NSAE pre-mRNA transcript from a AKT2 genomic sequence comprising a NSAE exon. In some embodiments, the ASO targets a NSAE pre-mRNA transcript from a AKT2 genomic sequence comprising an intron flanking the 3′ splice site of the NSAE exon and an intron flanking the 5′ splice site of a NSAE exon. In some embodiments, the ASO targets a NSAE pre-mRNA transcript of AKT2. In some embodiments, the ASO targets a AKT2 pre-mRNA sequence comprising a NSAE exon. In some embodiments, the ASO targets a AKT2 pre-mRNA sequence comprising an intron flanking the 3′ splice site of the NSAE exon. In some embodiments, the ASO targets a AKT2 pre-mRNA sequence comprising an intron flanking the 5′ splice site of the NSAE exon.

[0829] In some embodiments, the AKT2 pre-mRNA transcript is encoded by a genetic sequence with at least about 80%, 85%, 90%, 95%, 96%, 97%, 98%, 99% or 100% sequence identity to the Ensembl reference number ENSG00000105221.18 or a complement thereof. In some embodiments, the AKT2 pre-mRNA transcript comprises a sequence with at least about 80%, 85%, 90%, 95%, 96%, 97%, 98%, 99% or 100% sequence identity to a AKT2 pre-mRNA transcript or a complement thereof described herein.

[0830] In some embodiments, the targeted portion of the AKT2 pre-mRNA comprises a sequence with at least 80%, 85%, 90%, 95%, 97%, or 100% sequence identity to a region comprising at least 8 contiguous nucleic acids of a sequence of Table 6A or Table 6B or complements thereof. In some embodiments, the target portion of the AKT2 pre-mRNA comprises the exemplary NMD-inducing Alternative 5′ splice site or 3′ splice site as indicated in Table 5C.

[0831] In some embodiments, the ASOs disclosed herein target a NSAE pre-mRNA transcribed from a BAP1 genomic sequence. In some embodiments, the ASO targets a NSAE pre-mRNA transcript from a BAP1 genomic sequence comprising a NSAE exon. In some embodiments, the ASO targets a NSAE pre-mRNA transcript from a BAP1 genomic sequence comprising an intron flanking the 3′ splice site of the NSAE exon and an intron flanking the 5′ splice site of a NSAE exon. In some embodiments, the ASO targets a NSAE pre-mRNA transcript of BAP1. In some embodiments, the ASO targets a BAP1 pre-mRNA sequence comprising a NSAE exon. In some embodiments, the ASO targets a BAP1 pre-mRNA sequence comprising an intron flanking the 3′ splice site of the NSAE exon. In some embodiments, the ASO targets a BAP1 pre-mRNA sequence comprising an intron flanking the 5′ splice site of the NSAE exon.

[0832] In some embodiments, the BAP1 pre-mRNA transcript is encoded by a genetic sequence with at least about 80%, 85%, 90%, 95%, 96%, 97%, 98%, 99% or 100% sequence identity to the Ensembl reference number ENSG00000163930.10 or a complement thereof. In some embodiments, the BAP1 pre-mRNA transcript comprises a sequence with at least about 80%, 85%, 90%, 95%, 96%, 97%, 98%, 99% or 100% sequence identity to a BAP1 pre-mRNA transcript or a complement thereof described herein. In some embodiments, the targeted portion of the BAP1 pre-mRNA comprises a sequence with at least 80%, 85%, 90%, 95%, 97%, or 100% sequence identity to a region comprising at least 8 contiguous nucleic acids of a sequence of Table 6A or Table 6B or complements thereof. In some embodiments, the target portion of the BAP1 pre-mRNA comprises the exemplary NMD-inducing Alternative 5′ splice site or 3′ splice site as indicated in Table 5C.

[0833] In some embodiments, the ASOs disclosed herein target a NSAE pre-mRNA transcribed from a CACNA1G genomic sequence. In some embodiments, the ASO targets a NSAE pre-mRNA transcript from a CACNA1G genomic sequence comprising a NSAE exon. In some embodiments, the ASO targets a NSAE pre-mRNA transcript from a CACNA1G genomic sequence comprising an intron flanking the 3′ splice site of the NSAE exon and an intron flanking the 5′ splice site of a NSAE exon. In some embodiments, the ASO targets a NSAE pre-mRNA transcript of CACNA1G. In some embodiments, the ASO targets a CACNA1G pre-mRNA sequence comprising a NSAE exon. In some embodiments, the ASO targets a CACNA1G pre-mRNA sequence comprising an intron flanking the 3′ splice site of the NSAE exon. In some embodiments, the ASO targets a CACNA1G pre-mRNA sequence comprising an intron flanking the 5′ splice site of the NSAE exon.

[0834] In some embodiments, the CACNA1G pre-mRNA transcript is encoded by a genetic sequence with at least about 80%, 85%, 90%, 95%, 96%, 97%, 98%, 99% or 100% sequence identity to the Ensembl reference number ENSG00000006283.18 or a complement thereof. In some embodiments, the CACNA1G pre-mRNA transcript comprises a sequence with at least about 80%, 85%, 90%, 95%, 96%, 97%, 98%, 99% or 100% sequence identity to a CACNA1G pre-mRNA transcript or a complement thereof described herein. In some embodiments, the targeted portion of the CACNA1G pre-mRNA comprises a sequence with at least 80%, 85%, 90%, 95%, 97%, or 100% sequence identity to a region comprising at least 8 contiguous nucleic acids of a sequence of Table 6A or Table 6B or complements thereof. In some embodiments, the target portion of the CACNA1G pre-mRNA comprises the exemplary NMD-inducing Alternative 5′ splice site or 3′ splice site as indicated in Table 5C.

[0835] In some embodiments, the ASOs disclosed herein target a NSAE pre-mRNA transcribed from a CHD2 genomic sequence. In some embodiments, the ASO targets a NSAE pre-mRNA transcript from a CHD2 genomic sequence comprising a NSAE exon. In some embodiments, the ASO targets a NSAE pre-mRNA transcript from a CHD2 genomic sequence comprising an intron flanking the 3′ splice site of the NSAE exon and an intron flanking the 5′ splice site of a NSAE exon. In some embodiments, the ASO targets a NSAE pre-mRNA transcript of CHD2. In some embodiments, the ASO targets a CHD2 pre-mRNA sequence comprising a NSAE exon. In some embodiments, the ASO targets a CHD2 pre-mRNA sequence comprising an intron flanking the 3′ splice site of the NSAE exon. In some embodiments, the ASO targets a CHD2 pre-mRNA sequence comprising an intron flanking the 5′ splice site of the NSAE exon.

[0836] In some embodiments, the CHD2 pre-mRNA transcript is encoded by a genetic sequence with at least about 80%, 85%, 90%, 95%, 96%, 97%, 98%, 99% or 100% sequence identity to the Ensembl reference number ENSG00000173575.22 or a complement thereof. In some embodiments, the CHD2 pre-mRNA transcript comprises a sequence with at least about 80%, 85%, 90%, 95%, 96%, 97%, 98%, 99% or 100% sequence identity to a CHD2 pre-mRNA transcript or a complement thereof described herein. In some embodiments, the targeted portion of the CHD2 pre-mRNA comprises a sequence with at least 80%, 85%, 90%, 95%, 97%, or 100% sequence identity to a region comprising at least 8 contiguous nucleic acids of a sequence of Table 6A or Table 6B or complements thereof. In some embodiments, the target portion of the CHD2 pre-mRNA comprises the exemplary NMD-inducing Alternative 5′ splice site or 3′ splice site as indicated in Table 5C.

[0837] In some embodiments, the ASOs disclosed herein target a NSAE pre-mRNA transcribed from a CLPX genomic sequence. In some embodiments, the ASO targets a NSAE pre-mRNA transcript from a CLPX genomic sequence comprising a NSAE exon. In some embodiments, the ASO targets a NSAE pre-mRNA transcript from a CLPX genomic sequence comprising an intron flanking the 3′ splice site of the NSAE exon and an intron flanking the 5′ splice site of a NSAE exon. In some embodiments, the ASO targets a NSAE pre-mRNA transcript of CLPX. In some embodiments, the ASO targets a CLPX pre-mRNA sequence comprising a NSAE exon. In some embodiments, the ASO targets a CLPX pre-mRNA sequence comprising an intron flanking the 3′ splice site of the NSAE exon. In some embodiments, the ASO targets a CLPX pre-mRNA sequence comprising an intron flanking the 5′ splice site of the NSAE exon.

[0838] In some embodiments, the CLPX pre-mRNA transcript is encoded by a genetic sequence with at least about 80%, 85%, 90%, 95%, 96%, 97%, 98%, 99% or 100% sequence identity to the Ensembl reference number ENSG00000166855.9 or a complement thereof. In some embodiments, the CLPX pre-mRNA transcript comprises a sequence with at least about 80%, 85%, 90%, 95%, 96%, 97%, 98%, 99% or 100% sequence identity to a CLPX pre-mRNA transcript or a complement thereof described herein. In some embodiments, the targeted portion of the CLPX pre-mRNA comprises a sequence with at least 80%, 85%, 90%, 95%, 97%, or 100% sequence identity to a region comprising at least 8 contiguous nucleic acids of a sequence of Table 6A or Table 6B or complements thereof. In some embodiments, the target portion of the CLPX pre-mRNA comprises the exemplary NMD-inducing Alternative 5′ splice site or 3′ splice site as indicated in Table 5C.

[0839] In some embodiments, the ASOs disclosed herein target a NSAE pre-mRNA transcribed from a DMTF1 genomic sequence. In some embodiments, the ASO targets a NSAE pre-mRNA transcript from a DMTF1 genomic sequence comprising a NSAE exon. In some embodiments, the ASO targets a NSAE pre-mRNA transcript from a DMTF1 genomic sequence comprising an intron flanking the 3′ splice site of the NSAE exon and an intron flanking the 5′ splice site of a NSAE exon. In some embodiments, the ASO targets a NSAE pre-mRNA transcript of DMTF1. In some embodiments, the ASO targets a DMTF1 pre-mRNA sequence comprising a NSAE exon. In some embodiments, the ASO targets a DMTF1 pre-mRNA sequence comprising an intron flanking the 3′ splice site of the NSAE exon. In some embodiments, the ASO targets a DMTF1 pre-mRNA sequence comprising an intron flanking the 5′ splice site of the NSAE exon.

[0840] In some embodiments, the DMTF1 pre-mRNA transcript is encoded by a genetic sequence with at least about 80%, 85%, 90%, 95%, 96%, 97%, 98%, 99% or 100% sequence identity to the Ensembl reference number ENSG00000135164.18 or a complement thereof. In some embodiments, the DMTF1 pre-mRNA transcript comprises a sequence with at least about 80%, 85%, 90%, 95%, 96%, 97%, 98%, 99% or 100% sequence identity to a DMTF1 pre-mRNA transcript or a complement thereof described herein. In some embodiments, the targeted portion of the DMTF1 pre-mRNA comprises a sequence with at least 80%, 85%, 90%, 95%, 97%, or 100% sequence identity to a region comprising at least 8 contiguous nucleic acids of a sequence of Table 6A or Table 6B or complements thereof. In some embodiments, the target portion of the DMTF1 pre-mRNA comprises the exemplary NMD-inducing Alternative 5′ splice site or 3′ splice site as indicated in Table 5C.

[0841] In some embodiments, the ASOs disclosed herein target a NSAE pre-mRNA transcribed from a DNAJB2 genomic sequence. In some embodiments, the ASO targets a NSAE pre-mRNA transcript from a DNAJB2 genomic sequence comprising a NSAE exon. In some embodiments, the ASO targets a NSAE pre-mRNA transcript from a DNAJB2 genomic sequence comprising an intron flanking the 3′ splice site of the NSAE exon and an intron flanking the 5′ splice site of a NSAE exon. In some embodiments, the ASO targets a NSAE pre-mRNA transcript of DNAJB2. In some embodiments, the ASO targets a DNAJB2 pre-mRNA sequence comprising a NSAE exon. In some embodiments, the ASO targets a DNAJB2 pre-mRNA sequence comprising an intron flanking the 3′ splice site of the NSAE exon. In some embodiments, the ASO targets a DNAJB2 pre-mRNA sequence comprising an intron flanking the 5′ splice site of the NSAE exon.

[0842] In some embodiments, the DNAJB2 pre-mRNA transcript is encoded by a genetic sequence with at least about 80%, 85%, 90%, 95%, 96%, 97%, 98%, 99% or 100% sequence identity to the Ensembl reference number ENSG00000135924.15 or a complement thereof. In some embodiments, the DNAJB2 pre-mRNA transcript comprises a sequence with at least about 80%, 85%, 90%, 95%, 96%, 97%, 98%, 99% or 100% sequence identity to a DNAJB2 pre-mRNA transcript or a complement thereof described herein. In some embodiments, the targeted portion of the DNAJB2 pre-mRNA comprises a sequence with at least 80%, 85%, 90%, 95%, 97%, or 100% sequence identity to a region comprising at least 8 contiguous nucleic acids of a sequence of Table 6A or Table 6B or complements thereof. In some embodiments, the target portion of the DNAJB2 pre-mRNA comprises the exemplary NMD-inducing Alternative 5′ splice site or 3′ splice site as indicated in Table 5C.

[0843] In some embodiments, the ASOs disclosed herein target a NSAE pre-mRNA transcribed from a EIF2AK3 genomic sequence. In some embodiments, the ASO targets a NSAE pre-mRNA transcript from a EIF2AK3 genomic sequence comprising a NSAE exon. In some embodiments, the ASO targets a NSAE pre-mRNA transcript from a EIF2AK3 genomic sequence comprising an intron flanking the 3′ splice site of the NSAE exon and an intron flanking the 5′ splice site of a NSAE exon. In some embodiments, the ASO targets a NSAE pre-mRNA transcript of EIF2AK3. In some embodiments, the ASO targets a EIF2AK3 pre-mRNA sequence comprising a NSAE exon. In some embodiments, the ASO targets a EIF2AK3 pre-mRNA sequence comprising an intron flanking the 3′ splice site of the NSAE exon. In some embodiments, the ASO targets a EIF2AK3 pre-mRNA sequence comprising an intron flanking the 5′ splice site of the NSAE exon.

[0844] In some embodiments, the EIF2AK3 pre-mRNA transcript is encoded by a genetic sequence with at least about 80%, 85%, 90%, 95%, 96%, 97%, 98%, 99% or 100% sequence identity to the Ensembl reference number ENSG00000172071.14 or a complement thereof. In some embodiments, the EIF2AK3 pre-mRNA transcript comprises a sequence with at least about 80%, 85%, 90%, 95%, 96%, 97%, 98%, 99% or 100% sequence identity to a EIF2AK3 pre-mRNA transcript or a complement thereof described herein. In some embodiments, the targeted portion of the EIF2AK3 pre-mRNA comprises a sequence with at least 80%, 85%, 90%, 95%, 97%, or 100% sequence identity to a region comprising at least 8 contiguous nucleic acids of a sequence of Table 6A or Table 6B or complements thereof. In some embodiments, the target portion of the EIF2AK3 pre-mRNA comprises the exemplary NMD-inducing Alternative 5′ splice site or 3′ splice site as indicated in Table 5C.

[0845] In some embodiments, the ASOs disclosed herein target a NSAE pre-mRNA transcribed from a GBA genomic sequence. In some embodiments, the ASO targets a NSAE pre-mRNA transcript from a GBA genomic sequence comprising a NSAE exon. In some embodiments, the ASO targets a NSAE pre-mRNA transcript from a GBA genomic sequence comprising an intron flanking the 3′ splice site of the NSAE exon and an intron flanking the 5′ splice site of a NSAE exon. In some embodiments, the ASO targets a NSAE pre-mRNA transcript of GBA. In some embodiments, the ASO targets a GBA pre-mRNA sequence comprising a NSAE exon. In some embodiments, the ASO targets a GBA pre-mRNA sequence comprising an intron flanking the 3′ splice site of the NSAE exon. In some embodiments, the ASO targets a GBA pre-mRNA sequence comprising an intron flanking the 5′ splice site of the NSAE exon.

[0846] In some embodiments, the GBA pre-mRNA transcript is encoded by a genetic sequence with at least about 80%, 85%, 90%, 95%, 96%, 97%, 98%, 99% or 100% sequence identity to the Ensembl reference number ENSG00000177628.16 or ENSG00000262446.5 or a complement thereof. In some embodiments, the GBA pre-mRNA transcript comprises a sequence with at least about 80%, 85%, 90%, 95%, 96%, 97%, 98%, 99% or 100% sequence identity to a GBA pre-mRNA transcript or a complement thereof described herein. In some embodiments, the targeted portion of the GBA pre-mRNA comprises a sequence with at least 80%, 85%, 90%, 95%, 97%, or 100% sequence identity to a region comprising at least 8 contiguous nucleic acids of a sequence of Table 6A or Table 6B or complements thereof. In some embodiments, the target portion of the GBA pre-mRNA comprises the exemplary NMD-inducing Alternative 5′ splice site or 3′ splice site as indicated in Table 5C.

[0847] In some embodiments, the ASOs disclosed herein target a NSAE pre-mRNA transcribed from a GRN genomic sequence. In some embodiments, the ASO targets a NSAE pre-mRNA transcript from a GRN genomic sequence comprising a NSAE exon. In some embodiments, the ASO targets a NSAE pre-mRNA transcript from a GRN genomic sequence comprising an intron flanking the 3′ splice site of the NSAE exon and an intron flanking the 5′ splice site of a NSAE exon. In some embodiments, the ASO targets a NSAE pre-mRNA transcript of GRN. In some embodiments, the ASO targets a GRN pre-mRNA sequence comprising a NSAE exon. In some embodiments, the ASO targets a GRN pre-mRNA sequence comprising an intron flanking the 3′ splice site of the NSAE exon. In some embodiments, the ASO targets a GRN pre-mRNA sequence comprising an intron flanking the 5′ splice site of the NSAE exon.

[0848] In some embodiments, the GRN pre-mRNA transcript is encoded by a genetic sequence with at least about 80%, 85%, 90%, 95%, 96%, 97%, 98%, 99% or 100% sequence identity to the Ensembl reference number ENSG00000030582.18 or a complement thereof. In some embodiments, the GRN pre-mRNA transcript comprises a sequence with at least about 80%, 85%, 90%, 95%, 96%, 97%, 98%, 99% or 100% sequence identity to a GRN pre-mRNA transcript or a complement thereof described herein. In some embodiments, the targeted portion of the GRN pre-mRNA comprises a sequence with at least 80%, 85%, 90%, 95%, 97%, or 100% sequence identity to a region comprising at least 8 contiguous nucleic acids of a sequence of Table 6A or Table 6B or complements thereof. In some embodiments, the target portion of the GRN pre-mRNA comprises the exemplary NMD-inducing Alternative 5′ splice site or 3′ splice site as indicated in Table 5C.

[0849] In some embodiments, the ASOs disclosed herein target a NSAE pre-mRNA transcribed from a HSPA9 genomic sequence. In some embodiments, the ASO targets a NSAE pre-mRNA transcript from a HSPA9 genomic sequence comprising a NSAE exon. In some embodiments, the ASO targets a NSAE pre-mRNA transcript from a HSPA9 genomic sequence comprising an intron flanking the 3′ splice site of the NSAE exon and an intron flanking the 5′ splice site of a NSAE exon. In some embodiments, the ASO targets a NSAE pre-mRNA transcript of HSPA9. In some embodiments, the ASO targets a HSPA9 pre-mRNA sequence comprising a NSAE exon. In some embodiments, the ASO targets a HSPA9 pre-mRNA sequence comprising an intron flanking the 3′ splice site of the NSAE exon. In some embodiments, the ASO targets a HSPA9 pre-mRNA sequence comprising an intron flanking the 5′ splice site of the NSAE exon.

[0850] In some embodiments, the HSPA9 pre-mRNA transcript is encoded by a genetic sequence with at least about 80%, 85%, 90%, 95%, 96%, 97%, 98%, 99% or 100% sequence identity to the Ensembl reference number ENSG00000113013.15 or a complement thereof. In some embodiments, the HSPA9 pre-mRNA transcript comprises a sequence with at least about 80%, 85%, 90%, 95%, 96%, 97%, 98%, 99% or 100% sequence identity to a HSPA9 pre-mRNA transcript or a complement thereof described herein. In some embodiments, the targeted portion of the HSPA9 pre-mRNA comprises a sequence with at least 80%, 85%, 90%, 95%, 97%, or 100% sequence identity to a region comprising at least 8 contiguous nucleic acids of a sequence of Table 6A or Table 6B or complements thereof. In some embodiments, the target portion of the HSPA9 pre-mRNA comprises the exemplary NMD-inducing Alternative 5′ splice site or 3′ splice site as indicated in Table 5C.

[0851] In some embodiments, the ASOs disclosed herein target a NSAE pre-mRNA transcribed from a JAG1 genomic sequence. In some embodiments, the ASO targets a NSAE pre-mRNA transcript from a JAG1 genomic sequence comprising a NSAE exon. In some embodiments, the ASO targets a NSAE pre-mRNA transcript from a JAG1 genomic sequence comprising an intron flanking the 3′ splice site of the NSAE exon and an intron flanking the 5′ splice site of a NSAE exon. In some embodiments, the ASO targets a NSAE pre-mRNA transcript of JAG1. In some embodiments, the ASO targets a JAG1 pre-mRNA sequence comprising a NSAE exon. In some embodiments, the ASO targets a JAG1 pre-mRNA sequence comprising an intron flanking the 3′ splice site of the NSAE exon. In some embodiments, the ASO targets a JAG1 pre-mRNA sequence comprising an intron flanking the 5′ splice site of the NSAE exon.

[0852] In some embodiments, the JAG1 pre-mRNA transcript is encoded by a genetic sequence with at least about 80%, 85%, 90%, 95%, 96%, 97%, 98%, 99% or 100% sequence identity to the Ensembl reference number ENSG00000101384.12 or a complement thereof. In some embodiments, the JAG1 pre-mRNA transcript comprises a sequence with at least about 80%, 85%, 90%, 95%, 96%, 97%, 98%, 99% or 100% sequence identity to a JAG1 pre-mRNA transcript or a complement thereof described herein. In some embodiments, the targeted portion of the JAG1 pre-mRNA comprises a sequence with at least 80%, 85%, 90%, 95%, 97%, or 100% sequence identity to a region comprising at least 8 contiguous nucleic acids of a sequence of Table 6A or Table 6B or complements thereof. In some embodiments, the target portion of the JAG1 pre-mRNA comprises the exemplary NMD-inducing Alternative 5′ splice site or 3′ splice site as indicated in Table 5C.

[0853] In some embodiments, the ASOs disclosed herein target a NSAE pre-mRNA transcribed from a KCNQ2 genomic sequence. In some embodiments, the ASO targets a NSAE pre-mRNA transcript from a KCNQ2 genomic sequence comprising a NSAE exon. In some embodiments, the ASO targets a NSAE pre-mRNA transcript from a KCNQ2 genomic sequence comprising an intron flanking the 3′ splice site of the NSAE exon and an intron flanking the 5′ splice site of a NSAE exon. In some embodiments, the ASO targets a NSAE pre-mRNA transcript of KCNQ2. In some embodiments, the ASO targets a KCNQ2 pre-mRNA sequence comprising a NSAE exon. In some embodiments, the ASO targets a KCNQ2 pre-mRNA sequence comprising an intron flanking the 3′ splice site of the NSAE exon. In some embodiments, the ASO targets a KCNQ2 pre-mRNA sequence comprising an intron flanking the 5′ splice site of the NSAE exon.

[0854] In some embodiments, the KCNQ2 pre-mRNA transcript is encoded by a genetic sequence with at least about 80%, 85%, 90%, 95%, 96%, 97%, 98%, 99% or 100% sequence identity to the Ensembl reference number ENSG00000075043.18 or ENSG00000281151.2 or a complement thereof. In some embodiments, the KCNQ2 pre-mRNA transcript comprises a sequence with at least about 80%, 85%, 90%, 95%, 96%, 97%, 98%, 99% or 100% sequence identity to a KCNQ2 pre-mRNA transcript or a complement thereof described herein. In some embodiments, the targeted portion of the KCNQ2 pre-mRNA comprises a sequence with at least 80%, 85%, 90%, 95%, 97%, or 100% sequence identity to a region comprising at least 8 contiguous nucleic acids of a sequence of Table 6A or Table 6B or complements thereof. In some embodiments, the target portion of the KCNQ2 pre-mRNA comprises the exemplary NMD-inducing Alternative 5′ splice site or 3′ splice site as indicated in Table 5C.

[0855] In some embodiments, the ASOs disclosed herein target a NSAE pre-mRNA transcribed from a KL genomic sequence. In some embodiments, the ASO targets a NSAE pre-mRNA transcript from a KL genomic sequence comprising a NSAE exon. In some embodiments, the ASO targets a NSAE pre-mRNA transcript from a KL genomic sequence comprising an intron flanking the 3′ splice site of the NSAE exon and an intron flanking the 5′ splice site of a NSAE exon. In some embodiments, the ASO targets a NSAE pre-mRNA transcript of KL. In some embodiments, the ASO targets a KL pre-mRNA sequence comprising a NSAE exon. In some embodiments, the ASO targets a KL pre-mRNA sequence comprising an intron flanking the 3′ splice site of the NSAE exon. In some embodiments, the ASO targets a KL pre-mRNA sequence comprising an intron flanking the 5′ splice site of the NSAE exon.

[0856] In some embodiments, the KL pre-mRNA transcript is encoded by a genetic sequence with at least about 80%, 85%, 90%, 95%, 96%, 97%, 98%, 99% or 100% sequence identity to the Ensembl reference number ENSG00000133116.8 or a complement thereof. In some embodiments, the KL pre-mRNA transcript comprises a sequence with at least about 80%, 85%, 90%, 95%, 96%, 97%, 98%, 99% or 100% sequence identity to a KL pre-mRNA transcript or a complement thereof described herein. In some embodiments, the targeted portion of the KL pre-mRNA comprises a sequence with at least 80%, 85%, 90%, 95%, 97%, or 100% sequence identity to a region comprising at least 8 contiguous nucleic acids of a sequence of Table 6A or Table 6B or complements thereof. In some embodiments, the target portion of the KL pre-mRNA comprises the exemplary NMD-inducing Alternative 5′ splice site or 3′ splice site as indicated in Table 5C.

[0857] In some embodiments, the ASOs disclosed herein target a NSAE pre-mRNA transcribed from a OPTN genomic sequence. In some embodiments, the ASO targets a NSAE pre-mRNA transcript from a OPTN genomic sequence comprising a NSAE exon. In some embodiments, the ASO targets a NSAE pre-mRNA transcript from a OPTN genomic sequence comprising an intron flanking the 3′ splice site of the NSAE exon and an intron flanking the 5′ splice site of a NSAE exon. In some embodiments, the ASO targets a NSAE pre-mRNA transcript of OPTN. In some embodiments, the ASO targets a OPTN pre-mRNA sequence comprising a NSAE exon. In some embodiments, the ASO targets a OPTN pre-mRNA sequence comprising an intron flanking the 3′ splice site of the NSAE exon. In some embodiments, the ASO targets a OPTN pre-mRNA sequence comprising an intron flanking the 5′ splice site of the NSAE exon.

[0858] In some embodiments, the OPTN pre-mRNA transcript is encoded by a genetic sequence with at least about 80%, 85%, 90%, 95%, 96%, 97%, 98%, 99% or 100% sequence identity to the Ensembl reference number ENSG00000123240.17 or a complement thereof. In some embodiments, the OPTN pre-mRNA transcript comprises a sequence with at least about 80%, 85%, 90%, 95%, 96%, 97%, 98%, 99% or 100% sequence identity to a OPTN pre-mRNA transcript or a complement thereof described herein. In some embodiments, the targeted portion of the OPTN pre-mRNA comprises a sequence with at least 80%, 85%, 90%, 95%, 97%, or 100% sequence identity to a region comprising at least 8 contiguous nucleic acids of a sequence of Table 6A or Table 6B or complements thereof. In some embodiments, the target portion of the OPTN pre-mRNA comprises the exemplary NMD-inducing Alternative 5′ splice site or 3′ splice site as indicated in Table 5C.

[0859] In some embodiments, the ASOs disclosed herein target a NSAE pre-mRNA transcribed from a RBL1 genomic sequence. In some embodiments, the ASO targets a NSAE pre-mRNA transcript from a RBL1 genomic sequence comprising a NSAE exon. In some embodiments, the ASO targets a NSAE pre-mRNA transcript from a RBL1 genomic sequence comprising an intron flanking the 3′ splice site of the NSAE exon and an intron flanking the 5′ splice site of a NSAE exon. In some embodiments, the ASO targets a NSAE pre-mRNA transcript of RBL1. In some embodiments, the ASO targets a RBL1 pre-mRNA sequence comprising a NSAE exon. In some embodiments, the ASO targets a RBL1 pre-mRNA sequence comprising an intron flanking the 3′ splice site of the NSAE exon. In some embodiments, the ASO targets a RBL1 pre-mRNA sequence comprising an intron flanking the 5′ splice site of the NSAE exon.

[0860] In some embodiments, the RBL1 pre-mRNA transcript is encoded by a genetic sequence with at least about 80%, 85%, 90%, 95%, 96%, 97%, 98%, 99% or 100% sequence identity to the Ensembl reference number ENSG00000080839.12 or a complement thereof. In some embodiments, the RBL1 pre-mRNA transcript comprises a sequence with at least about 80%, 85%, 90%, 95%, 96%, 97%, 98%, 99% or 100% sequence identity to a RBL1 pre-mRNA transcript or a complement thereof described herein. In some embodiments, the targeted portion of the RBL1 pre-mRNA comprises a sequence with at least 80%, 85%, 90%, 95%, 97%, or 100% sequence identity to a region comprising at least 8 contiguous nucleic acids of a sequence of Table 6A or Table 6B or complements thereof. In some embodiments, the target portion of the RBL1 pre-mRNA comprises the exemplary NMD-inducing Alternative 5′ splice site or 3′ splice site as indicated in Table 5C.

[0861] In some embodiments, the ASOs disclosed herein target a NSAE pre-mRNA transcribed from a SEMA4A genomic sequence. In some embodiments, the ASO targets a NSAE pre-mRNA transcript from a SEMA4A genomic sequence comprising a NSAE exon. In some embodiments, the ASO targets a NSAE pre-mRNA transcript from a SEMA4A genomic sequence comprising an intron flanking the 3′ splice site of the NSAE exon and an intron flanking the 5′ splice site of a NSAE exon. In some embodiments, the ASO targets a NSAE pre-mRNA transcript of SEMA4A. In some embodiments, the ASO targets a SEMA4A pre-mRNA sequence comprising a NSAE exon. In some embodiments, the ASO targets a SEMA4A pre-mRNA sequence comprising an intron flanking the 3′ splice site of the NSAE exon. In some embodiments, the ASO targets a SEMA4A pre-mRNA sequence comprising an intron flanking the 5′ splice site of the NSAE exon.

[0862] In some embodiments, the SEMA4A pre-mRNA transcript is encoded by a genetic sequence with at least about 80%, 85%, 90%, 95%, 96%, 97%, 98%, 99% or 100% sequence identity to the Ensembl reference number ENSG00000196189.13 or a complement thereof. In some embodiments, the SEMA4A pre-mRNA transcript comprises a sequence with at least about 80%, 85%, 90%, 95%, 96%, 97%, 98%, 99% or 100% sequence identity to a SEMA4A pre-mRNA transcript or a complement thereof described herein. In some embodiments, the targeted portion of the SEMA4A pre-mRNA comprises a sequence with at least 80%, 85%, 90%, 95%, 97%, or 100% sequence identity to a region comprising at least 8 contiguous nucleic acids of a sequence of Table 6A or Table 6B or complements thereof. In some embodiments, the target portion of the SEMA4A pre-mRNA comprises the exemplary NMD-inducing Alternative 5′ splice site or 3′ splice site as indicated in Table 5C.

[0863] In some embodiments, the ASOs disclosed herein target a NSAE pre-mRNA transcribed from a SHANK3 genomic sequence. In some embodiments, the ASO targets a NSAE pre-mRNA transcript from a SHANK3 genomic sequence comprising a NSAE exon. In some embodiments, the ASO targets a NSAE pre-mRNA transcript from a SHANK3 genomic sequence comprising an intron flanking the 3′ splice site of the NSAE exon and an intron flanking the 5′ splice site of a NSAE exon. In some embodiments, the ASO targets a NSAE pre-mRNA transcript of SHANK3. In some embodiments, the ASO targets a SHANK3 pre-mRNA sequence comprising a NSAE exon. In some embodiments, the ASO targets a SHANK3 pre-mRNA sequence comprising an intron flanking the 3′ splice site of the NSAE exon. In some embodiments, the ASO targets a SHANK3 pre-mRNA sequence comprising an intron flanking the 5′ splice site of the NSAE exon.

[0864] In some embodiments, the SHANK3 pre-mRNA transcript is encoded by a genetic sequence with at least about 80%, 85%, 90%, 95%, 96%, 97%, 98%, 99% or 100% sequence identity to the Ensembl reference number ENSG00000251322.9 or a complement thereof. In some embodiments, the SHANK3 pre-mRNA transcript comprises a sequence with at least about 80%, 85%, 90%, 95%, 96%, 97%, 98%, 99% or 100% sequence identity to a SHANK3 pre-mRNA transcript or a complement thereof described herein. In some embodiments, the targeted portion of the SHANK3 pre-mRNA comprises a sequence with at least 80%, 85%, 90%, 95%, 97%, or 100% sequence identity to a region comprising at least 8 contiguous nucleic acids of a sequence of Table 6A or Table 6B or complements thereof. In some embodiments, the target portion of the SHANK3 pre-mRNA comprises the exemplary NMD-inducing Alternative 5′ splice site or 3′ splice site as indicated in Table 5C.

[0865] In some embodiments, the ASOs disclosed herein target a NSAE pre-mRNA transcribed from a SIRT2 genomic sequence. In some embodiments, the ASO targets a NSAE pre-mRNA transcript from a SIRT2 genomic sequence comprising a NSAE exon. In some embodiments, the ASO targets a NSAE pre-mRNA transcript from a SIRT2 genomic sequence comprising an intron flanking the 3′ splice site of the NSAE exon and an intron flanking the 5′ splice site of a NSAE exon. In some embodiments, the ASO targets a NSAE pre-mRNA transcript of SIRT2. In some embodiments, the ASO targets a SIRT2 pre-mRNA sequence comprising a NSAE exon. In some embodiments, the ASO targets a SIRT2 pre-mRNA sequence comprising an intron flanking the 3′ splice site of the NSAE exon. In some embodiments, the ASO targets a SIRT2 pre-mRNA sequence comprising an intron flanking the 5′ splice site of the NSAE exon.

[0866] In some embodiments, the SIRT2 pre-mRNA transcript is encoded by a genetic sequence with at least about 80%, 85%, 90%, 95%, 96%, 97%, 98%, 99% or 100% sequence identity to the Ensembl reference number ENSG00000068903.20 or ENSG00000283100.2 or a complement thereof. In some embodiments, the SIRT2 pre-mRNA transcript comprises a sequence with at least about 80%, 85%, 90%, 95%, 96%, 97%, 98%, 99% or 100% sequence identity to a SIRT2 pre-mRNA transcript or a complement thereof described herein. In some embodiments, the targeted portion of the SIRT2 pre-mRNA comprises a sequence with at least 80%, 85%, 90%, 95%, 97%, or 100% sequence identity to a region comprising at least 8 contiguous nucleic acids of a sequence of Table 6A or Table 6B or complements thereof. In some embodiments, the target portion of the SIRT2 pre-mRNA comprises the exemplary NMD-inducing Alternative 5′ splice site or 3′ splice site as indicated in Table 5C.

[0867] In some embodiments, the ASOs disclosed herein target a NSAE pre-mRNA transcribed from a SLC4A11 genomic sequence. In some embodiments, the ASO targets a NSAE pre-mRNA transcript from a SLC4A11 genomic sequence comprising a NSAE exon. In some embodiments, the ASO targets a NSAE pre-mRNA transcript from a SLC4A11 genomic sequence comprising an intron flanking the 3′ splice site of the NSAE exon and an intron flanking the 5′ splice site of a NSAE exon. In some embodiments, the ASO targets a NSAE pre-mRNA transcript of SLC4A11. In some embodiments, the ASO targets a SLC4A11 pre-mRNA sequence comprising a NSAE exon. In some embodiments, the ASO targets a SLC4A11 pre-mRNA sequence comprising an intron flanking the 3′ splice site of the NSAE exon. In some embodiments, the ASO targets a SLC4A11 pre-mRNA sequence comprising an intron flanking the 5′ splice site of the NSAE exon.

[0868] In some embodiments, the SLC4A11 pre-mRNA transcript is encoded by a genetic sequence with at least about 80%, 85%, 90%, 95%, 96%, 97%, 98%, 99% or 100% sequence identity to the Ensembl reference number ENSG00000088836.14 or a complement thereof. In some embodiments, the SLC4A11 pre-mRNA transcript comprises a sequence with at least about 80%, 85%, 90%, 95%, 96%, 97%, 98%, 99% or 100% sequence identity to a SLC4A1l pre-mRNA transcript or a complement thereof described herein. In some embodiments, the targeted portion of the SLC4A11 pre-mRNA comprises a sequence with at least 80%, 85%, 90%, 95%, 97%, or 100% sequence identity to a region comprising at least 8 contiguous nucleic acids of a sequence of Table 6A or Table 6B or complements thereof. In some embodiments, the target portion of the SLC4A11 pre-mRNA comprises the exemplary NMD-inducing Alternative 5′ splice site or 3′ splice site as indicated in Table 5C.

[0869] In some embodiments, the ASOs disclosed herein target a NSAE pre-mRNA transcribed from a STAT3 genomic sequence. In some embodiments, the ASO targets a NSAE pre-mRNA transcript from a STAT3 genomic sequence comprising a NSAE exon. In some embodiments, the ASO targets a NSAE pre-mRNA transcript from a STAT3 genomic sequence comprising an intron flanking the 3′ splice site of the NSAE exon and an intron flanking the 5′ splice site of a NSAE exon. In some embodiments, the ASO targets a NSAE pre-mRNA transcript of STAT3. In some embodiments, the ASO targets a STAT3 pre-mRNA sequence comprising a NSAE exon. In some embodiments, the ASO targets a STAT3 pre-mRNA sequence comprising an intron flanking the 3′ splice site of the NSAE exon. In some embodiments, the ASO targets a STAT3 pre-mRNA sequence comprising an intron flanking the 5′ splice site of the NSAE exon.

[0870] In some embodiments, the STAT3 pre-mRNA transcript is encoded by a genetic sequence with at least about 80%, 85%, 90%, 95%, 96%, 97%, 98%, 99% or 100% sequence identity to the Ensembl reference number ENSG00000168610.14 or a complement thereof. In some embodiments, the STAT3 pre-mRNA transcript comprises a sequence with at least about 80%, 85%, 90%, 95%, 96%, 97%, 98%, 99% or 100% sequence identity to a STAT3 pre-mRNA transcript or a complement thereof described herein. In some embodiments, the targeted portion of the STAT3 pre-mRNA comprises a sequence with at least 80%, 85%, 90%, 95%, 97%, or 100% sequence identity to a region comprising at least 8 contiguous nucleic acids of a sequence of Table 6A or Table 6B or complements thereof. In some embodiments, the target portion of the STAT3 pre-mRNA comprises the exemplary NMD-inducing Alternative 5′ splice site or 3′ splice site as indicated in Table 5C.

[0871] In some embodiments, the ASOs disclosed herein target a NSAE pre-mRNA transcribed from a TP53BP2 genomic sequence. In some embodiments, the ASO targets a NSAE pre-mRNA transcript from a TP53BP2 genomic sequence comprising a NSAE exon. In some embodiments, the ASO targets a NSAE pre-mRNA transcript from a TP53BP2 genomic sequence comprising an intron flanking the 3′ splice site of the NSAE exon and an intron flanking the 5′ splice site of a NSAE exon. In some embodiments, the ASO targets a NSAE pre-mRNA transcript of TP53BP2. In some embodiments, the ASO targets a TP53BP2 pre-mRNA sequence comprising a NSAE exon. In some embodiments, the ASO targets a TP53BP2 pre-mRNA sequence comprising an intron flanking the 3′ splice site of the NSAE exon. In some embodiments, the ASO targets a TP53BP2 pre-mRNA sequence comprising an intron flanking the 5′ splice site of the NSAE exon.

[0872] In some embodiments, the TP53BP2 pre-mRNA transcript is encoded by a genetic sequence with at least about 80%, 85%, 90%, 95%, 96%, 97%, 98%, 99% or 100% sequence identity to the Ensembl reference number ENSG00000143514.17 or a complement thereof. In some embodiments, the TP53BP2 pre-mRNA transcript comprises a sequence with at least about 80%, 85%, 90%, 95%, 96%, 97%, 98%, 99% or 100% sequence identity to a TP53BP2 pre-mRNA transcript or a complement thereof described herein. In some embodiments, the targeted portion of the TP53BP2 pre-mRNA comprises a sequence with at least 80%, 85%, 90%, 95%, 97%, or 100% sequence identity to a region comprising at least 8 contiguous nucleic acids of a sequence of Table 6A or Table 6B or complements thereof. In some embodiments, the target portion of the TP53BP2 pre-mRNA comprises the exemplary NMD-inducing Alternative 5′ splice site or 3′ splice site as indicated in Table 5C.

TABLE 6A
(Exemplary ASO sequences)

| Target | ASO sequences (SEQ ID NOs) |
|---|---|
| ABCC3 | SEQ ID NOs: 1301-1328 |
| ABCC5 | SEQ ID NOs: 1329-1368 |
| ABCC8 | SEQ ID NOs: 1369-1401 |
| ACOX2 | SEQ ID NOs: 1402-1436 |
| ACSF3 | SEQ ID NOs: 1437-1464 |
| ADAM17 | SEQ ID NOs: 1465-1485 |
| ADAMTS13 | SEQ ID NOs: 1486-1520 |
| ALAD | SEQ ID NOs: 1521-1571 |
| ANKS3 | SEQ ID NOs: 1572-1603 |
| ANO4 | SEQ ID NOs: 1604-1633 |
| AP3B2 | SEQ ID NOs: 1634-1663 |
| AP5Z1 | SEQ ID NOs: 1664-1688 |
| ARNTL | SEQ ID NOs: 1689-1724 |
| BBS2 | SEQ ID NOs: 1725-1766 |
| BRD9 | SEQ ID NOs: 1767-1807 |
| CALM3 | SEQ ID NOs: 1808-1913 |
| CARS1 | SEQ ID NOs: 1914-1940 |
| CASP9 | SEQ ID NOs: 1941-1969 |
| CD58 | SEQ ID NOs: 1970-1993 |
| CHFR | SEQ ID NOs: 1994-2031 |
| CLCN2 | SEQ ID NOs: 2032-2099 |
| CNOT3 | SEQ ID NOs: 2100-2128 |
| CNTROB | SEQ ID NOs: 2129-2171 |
| CTF1 | SEQ ID NOs: 2172-2250 |
| CYP3A5 | SEQ ID NOs: 2251-2292 |
| DHDDS | SEQ ID NOs: 2293-2314 |
| DNHD1 | SEQ ID NOs: 2315-2358 |
| ENTPD4 | SEQ ID NOs: 2359-2416 |
| ESRRA | SEQ ID NOs: 2417-2453 |
| ESS2 | SEQ ID NOs: 2454-2503 |
| ETAA1 | SEQ ID NOs: 2504-2568 |
| FASTKD3 | SEQ ID NOs: 2569-2610 |
| FREM1 | SEQ ID NOs: 2611-2638 |
| GAS8 | SEQ ID NOs: 2639-2677 |
| GGA3 | SEQ ID NOs: 2678-2713 |
| GGT1 | SEQ ID NOs: 2714-2735 |
| GLMN | SEQ ID NOs: 2736-2792 |
| GRB14 | SEQ ID NOs: 2793-2820 |
| HDAC3 | SEQ ID NOs: 2821-2842 |
| HP1BP3 | SEQ ID NOs: 2843-2878 |
| HPS4 | SEQ ID NOs: 2879-2917 |
| IDUA | SEQ ID NOs: 2918-2934 |
| IFT122 | SEQ ID NOs: 2935-2969 |
| IMPDH1 | SEQ ID NOs: 2970-2991 |
| KCTD3 | SEQ ID NOs: 2992-3023 |
| KYAT1 | SEQ ID NOs: 3024-3047 |
| MAP3K7 | SEQ ID NOs: 3048-3068 |
| NBEAL2 | SEQ ID NOs: 3069-3094 |
| NOP58 | SEQ ID NOs: 3095-3132 |
| NPHP1 | SEQ ID NOs: 3133-3227 |
| NUP188 | SEQ ID NOs: 3228-3271 |
| PHKA2 | SEQ ID NOs: 3272-3299 |
| PIDD1 | SEQ ID NOs: 3300-3378 |
| PKD1 | SEQ ID NOs: 3379-3433 |
| PLA2G6 | SEQ ID NOs: 3434-3484 |
| PLD2 | SEQ ID NOs: 3485-3545 |
| PLEKHG5 | SEQ ID NOs: 3546-3590 |
| PRMT7 | SEQ ID NOs: 3591-3627 |
| PRODH | SEQ ID NOs: 3628-3642 |
| PRPF3 | SEQ ID NOs: 3643-3670 |
| PRPF4 | SEQ ID NOs: 3671-3695 |
| RAD52 | SEQ ID NOs: 3696-3720 |
| REXO1 | SEQ ID NOs: 3721-3798 |
| RFX5 | SEQ ID NOs: 3799-3829 |
| RUFY3 | SEQ ID NOs: 3830-3850 |
| SEMA3B | SEQ ID NOs: 3851-3892 |
| SEMA3F | SEQ ID NOs: 3893-3917 |
| SH2D3A | SEQ ID NOs: 3918-3939 |
| SIRT3 | SEQ ID NOs: 3940-3987 |
| SKIV2L | SEQ ID NOs: 3988-4010 |
| SLC25A13 | SEQ ID NOs: 4011-4032 |
| SLC2A13 | SEQ ID NOs: 4033-4100 |
| SLC30A10 | SEQ ID NOs: 4101-4125 |
| SLC30A9 | SEQ ID NOs: 4126-4155 |
| SMTN | SEQ ID NOs: 4156-4184 |
| STXBP2 | SEQ ID NOs: 4185-4299 |
| SYNGAP1 | SEQ ID NOs: 4300-4352 |
| TBL2 | SEQ ID NOs: 4353-4428 |
| TECPR2 | SEQ ID NOs: 4429-4466 |
| TNK2 | SEQ ID NOs: 4467-4518 |
| TOE1 | SEQ ID NOs: 4519-4552 |
| TRMT2A | SEQ ID NOs: 4553-4591 |
| TRPV4 | SEQ ID NOs: 4592-4614 |
| UROD | SEQ ID NOs: 4615-4641 |
| WDR62 | SEQ ID NOs: 4642-4668 |
| WRAP53 | SEQ ID NOs: 4669-4692 |
| XPO1 | SEQ ID NOs: 4693-4711 |

[0873] In some embodiments, an ASO that targets a pre-mRNA disclosed herein is selected from the group consisting of SEQ ID NOs: 1301-4711.

[0874] In some embodiments, an ASO that targets a ABCC3 pre-mRNA is selected from the group consisting of SEQ ID NOs: 1301-1328. In some embodiments, an ASO that targets a ABCC5 pre-mRNA is selected from the group consisting of SEQ ID NOs: 1329-1368. In some embodiments, an ASO that targets a ABCC8 pre-mRNA is selected from the group consisting of SEQ ID NOs: 1369-1401. In some embodiments, an ASO that targets a ACOX2 pre-mRNA is selected from the group consisting of SEQ ID NOs: 1402-1436. In some embodiments, an ASO that targets a ACSF3 pre-mRNA is selected from the group consisting of SEQ ID NOs: 1437-1464. In some embodiments, an ASO that targets a ADAM17 pre-mRNA is selected from the group consisting of SEQ ID NOs: 1465-1485. In some embodiments, an ASO that targets a ADAMTS13 pre-mRNA is selected from the group consisting of SEQ ID NOs: 1486-1520. In some embodiments, an ASO that targets a ALAD pre-mRNA is selected from the group consisting of SEQ ID NOs: 1521-1571. In some embodiments, an ASO that targets a ANKS3 pre-mRNA is selected from the group consisting of SEQ ID NOs: 1572-1603. In some embodiments, an ASO that targets a ANO4 pre-mRNA is selected from the group consisting of SEQ ID NOs: 1604-1633. In some embodiments, an ASO that targets a AP3B2 pre-mRNA is selected from the group consisting of SEQ ID NOs: 1634-1663. In some embodiments, an ASO that targets a AP5Z1 pre-mRNA is selected from the group consisting of SEQ ID NOs: 1664-1688. In some embodiments, an ASO that targets a ARNTL pre-mRNA is selected from the group consisting of SEQ ID NOs: 1689-1724. In some embodiments, an ASO that targets a BBS2 pre-mRNA is selected from the group consisting of SEQ ID NOs: 1725-1766. In some embodiments, an ASO that targets a BRD9 pre-mRNA is selected from the group consisting of SEQ ID NOs: 1767-1807. In some embodiments, an ASO that targets a CALM3 pre-mRNA is selected from the group consisting of SEQ ID NOs: 1808-1913. In some embodiments, an ASO that targets a CARS1 pre-mRNA is selected from the group consisting of SEQ ID NOs: 1914-1940. In some embodiments, an ASO that targets a CASP9 pre-mRNA is selected from the group consisting of SEQ ID NOs: 1941-1969. In some embodiments, an ASO that targets a CD58 pre-mRNA is selected from the group consisting of SEQ ID NOs: 1970-1993. In some embodiments, an ASO that targets a CIHFR pre-mRNA is selected from the group consisting of SEQ ID NOs: 1994-2031. In some embodiments, an ASO that targets a CLCN2 pre-mRNA is selected from the group consisting of SEQ ID NOs: 2032-2099. In some embodiments, an ASO that targets a CNOT3 pre-mRNA is selected from the group consisting of SEQ ID NOs: 2100-2128. In some embodiments, an ASO that targets a CNTROB pre-mRNA is selected from the group consisting of SEQ ID NOs: 2129-2171. In some embodiments, an ASO that targets a CTF1 pre-mRNA is selected from the group consisting of SEQ ID NOs: 2172-2250. In some embodiments, an ASO that targets a CYP3A5 pre-mRNA is selected from the group consisting of SEQ ID NOs: 2251-2292. In some embodiments, an ASO that targets a DHDDS pre-mRNA is selected from the group consisting of SEQ ID NOs: 2293-2314. In some embodiments, an ASO that targets a DNHD1 pre-mRNA is selected from the group consisting of SEQ ID NOs: 2315-2358. In some embodiments, an ASO that targets a ENTPD4 pre-mRNA is selected from the group consisting of SEQ ID NOs: 2359-2416. In some embodiments, an ASO that targets a ESRRA pre-mRNA is selected from the group consisting of SEQ ID NOs: 2417-2453. In some embodiments, an ASO that targets a ESS2 pre-mRNA is selected from the group consisting of SEQ ID NOs: 2454-2503. In some embodiments, an ASO that targets a ETAA1 pre-mRNA is selected from the group consisting of SEQ ID NOs: 2504-2568. In some embodiments, an ASO that targets a FASTKD3 pre-mRNA is selected from the group consisting of SEQ ID NOs: 2569-2610. In some embodiments, an ASO that targets a FREM1 pre-mRNA is selected from the group consisting of SEQ ID NOs: 2611-2638. In some embodiments, an ASO that targets a GAS8 pre-mRNA is selected from the group consisting of SEQ ID NOs: 2639-2677. In some embodiments, an ASO that targets a GGA3 pre-mRNA is selected from the group consisting of SEQ ID NOs: 2678-2713. In some embodiments, an ASO that targets a GGT1 pre-mRNA is selected from the group consisting of SEQ ID NOs: 2714-2735. In some embodiments, an ASO that targets a GLMN pre-mRNA is selected from the group consisting of SEQ ID NOs: 2736-2792. In some embodiments, an ASO that targets a GRB14 pre-mRNA is selected from the group consisting of SEQ ID NOs: 2793-2820. In some embodiments, an ASO that targets a HDAC3 pre-mRNA is selected from the group consisting of SEQ ID NOs: 2821-2842. In some embodiments, an ASO that targets a HP1BP3 pre-mRNA is selected from the group consisting of SEQ ID NOs: 2843-2878. In some embodiments, an ASO that targets a HPS4 pre-mRNA is selected from the group consisting of SEQ ID NOs: 2879-2917. In some embodiments, an ASO that targets a IDUA pre-mRNA is selected from the group consisting of SEQ ID NOs: 2918-2934. In some embodiments, an ASO that targets a IFT122 pre-mRNA is selected from the group consisting of SEQ ID NOs: 2935-2969. In some embodiments, an ASO that targets a IMPDH1 pre-mRNA is selected from the group consisting of SEQ ID NOs: 2970-2991. In some embodiments, an ASO that targets a KCTD3 pre-mRNA is selected from the group consisting of SEQ ID NOs: 2992-3023. In some embodiments, an ASO that targets a KYAT1 pre-mRNA is selected from the group consisting of SEQ ID NOs: 3024-3047. In some embodiments, an ASO that targets a MAP3K7 pre-mRNA is selected from the group consisting of SEQ ID NOs: 3048-3068. In some embodiments, an ASO that targets a NBEAL2 pre-mRNA is selected from the group consisting of SEQ ID NOs: 3069-3094. In some embodiments, an ASO that targets a NOP58 pre-mRNA is selected from the group consisting of SEQ ID NOs: 3095-3132. In some embodiments, an ASO that targets a NPHP1 pre-mRNA is selected from the group consisting of SEQ ID NOs: 3133-3227. In some embodiments, an ASO that targets a NUP188 pre-mRNA is selected from the group consisting of SEQ ID NOs: 3228-3271. In some embodiments, an ASO that targets a PHKA2 pre-mRNA is selected from the group consisting of SEQ ID NOs: 3272-3299. In some embodiments, an ASO that targets a PIDD1 pre-mRNA is selected from the group consisting of SEQ ID NOs: 3300-3378. In some embodiments, an ASO that targets a PKD1 pre-mRNA is selected from the group consisting of SEQ ID NOs: 3379-3433. In some embodiments, an ASO that targets a PLA2G6 pre-mRNA is selected from the group consisting of SEQ ID NOs: 3434-3484. In some embodiments, an ASO that targets a PLD2 pre-mRNA is selected from the group consisting of SEQ ID NOs: 3485-3545. In some embodiments, an ASO that targets a PLEKHG5 pre-mRNA is selected from the group consisting of SEQ ID NOs: 3546-3590. In some embodiments, an ASO that targets a PRMT7 pre-mRNA is selected from the group consisting of SEQ ID NOs: 3591-3627. In some embodiments, an ASO that targets a PRODH pre-mRNA is selected from the group consisting of SEQ ID NOs: 3628-3642. In some embodiments, an ASO that targets a PRPF3 pre-mRNA is selected from the group consisting of SEQ ID NOs: 3643-3670. In some embodiments, an ASO that targets a PRPF4 pre-mRNA is selected from the group consisting of SEQ ID NOs: 3671-3695. In some embodiments, an ASO that targets a RAD52 pre-mRNA is selected from the group consisting of SEQ ID NOs: 3696-3720. In some embodiments, an ASO that targets a REXO1 pre-mRNA is selected from the group consisting of SEQ ID NOs: 3721-3798. In some embodiments, an ASO that targets a RFX5 pre-mRNA is selected from the group consisting of SEQ ID NOs: 3799-3829. In some embodiments, an ASO that targets a RUFY3 pre-mRNA is selected from the group consisting of SEQ ID NOs: 3830-3850. In some embodiments, an ASO that targets a SEMA3B pre-mRNA is selected from the group consisting of SEQ ID NOs: 3851-3892. In some embodiments, an ASO that targets a SEMA3F pre-mRNA is selected from the group consisting of SEQ ID NOs: 3893-3917. In some embodiments, an ASO that targets a SH2D3A pre-mRNA is selected from the group consisting of SEQ ID NOs: 3918-3939. In some embodiments, an ASO that targets a SIRT3 pre-mRNA is selected from the group consisting of SEQ ID NOs: 3940-3987. In some embodiments, an ASO that targets a SKIV2L pre-mRNA is selected from the group consisting of SEQ ID NOs: 3988-4010. In some embodiments, an ASO that targets a SLC25A13 pre-mRNA is selected from the group consisting of SEQ ID NOs: 4011-4032. In some embodiments, an ASO that targets a SLC2A13 pre-mRNA is selected from the group consisting of SEQ ID NOs: 4033-4100. In some embodiments, an ASO that targets a SLC30A10 pre-mRNA is selected from the group consisting of SEQ ID NOs: 4101-4125. In some embodiments, an ASO that targets a SLC30A9 pre-mRNA is selected from the group consisting of SEQ ID NOs: 4126-4155. In some embodiments, an ASO that targets a SMTN pre-mRNA is selected from the group consisting of SEQ ID NOs: 4156-4184. In some embodiments, an ASO that targets a STXBP2 pre-mRNA is selected from the group consisting of SEQ ID NOs: 4185-4299. In some embodiments, an ASO that targets a SYNGAP1 pre-mRNA is selected from the group consisting of SEQ ID NOs: 4300-4352. In some embodiments, an ASO that targets a SYNGAP1 pre-mRNA is selected from the group consisting of SEQ ID NOs: 1-165. In some embodiments, an ASO that targets a TBL2 pre-mRNA is selected from the group consisting of SEQ ID NOs: 4353-4428. In some embodiments, an ASO that targets a TECPR2 pre-mRNA is selected from the group consisting of SEQ ID NOs: 4429-4466. In some embodiments, an ASO that targets a TNK2 pre-mRNA is selected from the group consisting of SEQ ID NOs: 4467-4518. In some embodiments, an ASO that targets a TOE1 pre-mRNA is selected from the group consisting of SEQ ID NOs: 4519-4552. In some embodiments, an ASO that targets a TRMT2A pre-mRNA is selected from the group consisting of SEQ ID NOs: 4553-4591. In some embodiments, an ASO that targets a TRPV4 pre-mRNA is selected from the group consisting of SEQ ID NOs: 4592-4614. In some embodiments, an ASO that targets a UROD pre-mRNA is selected from the group consisting of SEQ ID NOs: 4615-4641. In some embodiments, an ASO that targets a WDR62 pre-mRNA is selected from the group consisting of SEQ ID NOs: 4642-4668. In some embodiments, an ASO that targets a WRAP53 pre-mRNA is selected from the group consisting of SEQ ID NOs: 4669-4692. In some embodiments, an ASO that targets a XPO1 pre-mRNA is selected from the group consisting of SEQ ID NOs: 4693-4711.

TABLE 6B
(Exemplary ASO sequences)

| Target | ASO sequences (SEQ ID NOs) |
|---|---|
| ABCA5 | SEQ ID NOs: 4712-4748 |
| ABCA7 | SEQ ID NOs: 4749-4775 |
| ABCD1 | SEQ ID NOs: 4776-4874 |
| ABR | SEQ ID NOs: 4875-4971 |
| ACAD9 | SEQ ID NOs: 4972-5026 |
| ACAP1 | SEQ ID NOs: 5027-5084 |
| ACTN4 | SEQ ID NOs: 5085-5174 |
| ADAMTS13 | SEQ ID NOs: 5175-5209 |
| AKR1E2 | SEQ ID NOs: 5210-5242 |
| ALG3 | SEQ ID NOs: 5243-5411 |
| ANKRD29 | SEQ ID NOs: 5412-5458 |
| AP3M1 | SEQ ID NOs: 5459-5482 |
| ASAP3 | SEQ ID NOs: 5483-5527 |
| ATRX | SEQ ID NOs: 5528-5574 |
| BBS4 | SEQ ID NOs: 5575-5656 |
| CATSPER1 | SEQ ID NOs: 5657-5683 |
| CCDC40 | SEQ ID NOs: 5684-5720 |
| CCDC88B | SEQ ID NOs: 5721-5765 |
| CD4 | SEQ ID NOs: 5766-5806 |
| CES2 | SEQ ID NOs: 5807-5878 |
| COL5A3 | SEQ ID NOs: 5879-5924 |
| CPSF1 | SEQ ID NOs: 5925-5954 |
| CSPP1 | SEQ ID NOs: 5955-5982 |
| CTH | SEQ ID NOs: 5983-6016 |
| DAB2IP | SEQ ID NOs: 6017-6063 |
| DBN1 | SEQ ID NOs: 6064-6105 |
| DDX51 | SEQ ID NOs: 6106-6152 |
| DEAF1 | SEQ ID NOs: 6153-6187 |
| DGKE | SEQ ID NOs: 6188-6214 |
| DMKN | SEQ ID NOs: 6215-6257 |
| DOCK8 | SEQ ID NOs: 6258-6354 |
| DOK5 | SEQ ID NOs: 6355-6408 |
| EIF2B5 | SEQ ID NOs: 6409-6440 |
| ELAC2 | SEQ ID NOs: 6441-6487 |
| ELP1 | SEQ ID NOs: 6488-6519 |
| ETHE1 | SEQ ID NOs: 6520-6570 |
| FANCA | SEQ ID NOs: 6571-6647 |
| FASTK | SEQ ID NOs: 6648-6762 |
| FPGS | SEQ ID NOs: 6763-6799 |
| GAS8 | SEQ ID NOs: 6800-6857 |
| GCK | SEQ ID NOs: 6858-6954 |
| GGA1 | SEQ ID NOs: 6955-7024 |
| GON4L | SEQ ID NOs: 7025-7051 |
| HELQ | SEQ ID NOs: 7052-7096 |
| HPS1 | SEQ ID NOs: 7097-7124 |
| IL17RC | SEQ ID NOs: 7125-7162 |
| INVS | SEQ ID NOs: 7163-7260 |
| IRF3 | SEQ ID NOs: 7261-7379 |
| KLKB1 | SEQ ID NOs: 7380-7405 |
| LAMC3 | SEQ ID NOs: 7406-7454 |
| LDAH | SEQ ID NOs: 7455-7487 |
| LIMS2 | SEQ ID NOs: 7488-7585 |
| MALT1 | SEQ ID NOs: 7586-7641 |
| MAPK13 | SEQ ID NOs: 7642-7751 |
| MCAT | SEQ ID NOs: 7752-7777 |
| MCEE | SEQ ID NOs: 7778-7889 |
| MPI | SEQ ID NOs: 7890-7931 |
| MSTO1 | SEQ ID NOs: 7932-7963 |
| NLE1 | SEQ ID NOs: 7964-7988 |
| NLRC5 | SEQ ID NOs: 7989-8013 |
| NOM1 | SEQ ID NOs: 8014-8048 |
| NPR1 | SEQ ID NOs: 8049-8139 |
| OSGEP | SEQ ID NOs: 8140-8165 |
| PABPC4 | SEQ ID NOs: 8166-8212 |
| PCOLCE | SEQ ID NOs: 8213-8288 |
| PLD2 | SEQ ID NOs: 8289-8305 |
| PNPO | SEQ ID NOs: 8306-8372 |
| POLE | SEQ ID NOs: 8373-8401 |
| PON2 | SEQ ID NOs: 8402-8434 |
| PYCR1 | SEQ ID NOs: 8435-8493 |
| RAD52 | SEQ ID NOs: 8494-8546 |
| RHBDF2 | SEQ ID NOs: 8547-8579 |
| RMND1 | SEQ ID NOs: 8580-8604 |
| ROBO3 | SEQ ID NOs: 8605-8756 |
| RPGRIP1 | SEQ ID NOs: 8757-8821 |
| RTTN | SEQ ID NOs: 8822-8855 |
| SIK3 | SEQ ID NOs: 8856-8912 |
| SLC12A7 | SEQ ID NOs: 8913-8981 |
| SLC22A3 | SEQ ID NOs: 8982-9042 |
| SLC25A37 | SEQ ID NOs: 9043-9157 |
| SLC27A5 | SEQ ID NOs: 9158-9196 |
| SMPD1 | SEQ ID NOs: 9197-9223 |
| SNRPB | SEQ ID NOs: 9224-9325 |
| SP140 | SEQ ID NOs: 9326-9379 |
| STAMBP | SEQ ID NOs: 9380-9428 |
| SULF2 | SEQ ID NOs: 9429-9482 |
| SYNJ2 | SEQ ID NOs: 9483-9513 |
| TAZ | SEQ ID NOs: 9514-9554 |
| TDRD7 | SEQ ID NOs: 9555-9586 |
| TFB1M | SEQ ID NOs: 9587-9641 |
| TM6SF1 | SEQ ID NOs: 9642-9671 |
| TOR1B | SEQ ID NOs: 9672-9719 |
| TRAPPC6B | SEQ ID NOs: 9720-9745 |
| TRIP4 | SEQ ID NOs: 9746-9781 |
| TRMU | SEQ ID NOs: 9782-9852 |
| TTC19 | SEQ ID NOs: 9853-9899 |
| TYMP | SEQ ID NOs: 9900-9972 |
| UMPS | SEQ ID NOs: 9973-10032 |
| WDR11 | SEQ ID NOs: 10033-10056 |
| WIPI1 | SEQ ID NOs: 10057-10103 |
| YY1AP1 | SEQ ID NOs: 10104-10193 |
| ZC3H14 | SEQ ID NOs: 10194-10225 |

[0875] In some embodiments, an ASO that targets a pre-mRNA disclosed herein is selected from the group consisting of SEQ ID NOs: 4712-10225.

[0876] In some embodiments, an ASO that targets a ABCA5 pre-mRNA is selected from the group consisting of SEQ ID NOs: 4712-4748. In some embodiments, an ASO that targets a ABCA7 pre-mRNA is selected from the group consisting of SEQ ID NOs: 4749-4775. In some embodiments, an ASO that targets a ABCD1 pre-mRNA is selected from the group consisting of SEQ ID NOs: 4776-4874. In some embodiments, an ASO that targets a ABR pre-mRNA is selected from the group consisting of SEQ ID NOs: 4875-4971. In some embodiments, an ASO that targets a ACAD9 pre-mRNA is selected from the group consisting of SEQ ID NOs: 4972-5026. In some embodiments, an ASO that targets a ACAP1 pre-mRNA is selected from the group consisting of SEQ ID NOs: 5027-5084. In some embodiments, an ASO that targets a ACTN4 pre-mRNA is selected from the group consisting of SEQ ID NOs: 5085-5174. In some embodiments, an ASO that targets a ADAMTS13 pre-mRNA is selected from the group consisting of SEQ ID NOs: 5175-5209. In some embodiments, an ASO that targets a AKR1E2 pre-mRNA is selected from the group consisting of SEQ ID NOs: 5210-5242. In some embodiments, an ASO that targets a ALG3 pre-mRNA is selected from the group consisting of SEQ ID NOs: 5243-5411. In some embodiments, an ASO that targets a ANKRD29 pre-mRNA is selected from the group consisting of SEQ ID NOs: 5412-5458. In some embodiments, an ASO that targets a AP3M1 pre-mRNA is selected from the group consisting of SEQ ID NOs: 5459-5482. In some embodiments, an ASO that targets a ASAP3 pre-mRNA is selected from the group consisting of SEQ ID NOs: 5483-5527. In some embodiments, an ASO that targets a ATRX pre-mRNA is selected from the group consisting of SEQ ID NOs: 5528-5574. In some embodiments, an ASO that targets a BBS4 pre-mRNA is selected from the group consisting of SEQ ID NOs: 5575-5656. In some embodiments, an ASO that targets a CATSPER1 pre-mRNA is selected from the group consisting of SEQ ID NOs: 5657-5683. In some embodiments, an ASO that targets a CCDC40 pre-mRNA is selected from the group consisting of SEQ ID NOs: 5684-5720. In some embodiments, an ASO that targets a CCDC88B pre-mRNA is selected from the group consisting of SEQ ID NOs: 5721-5765. In some embodiments, an ASO that targets a CD4 pre-mRNA is selected from the group consisting of SEQ ID NOs: 5766-5806. In some embodiments, an ASO that targets a CES2 pre-mRNA is selected from the group consisting of SEQ ID NOs: 5807-5878. In some embodiments, an ASO that targets a COL5A3 pre-mRNA is selected from the group consisting of SEQ ID NOs: 5879-5924. In some embodiments, an ASO that targets a CPSF1 pre-mRNA is selected from the group consisting of SEQ ID NOs: 5925-5954. In some embodiments, an ASO that targets a CSPP1 pre-mRNA is selected from the group consisting of SEQ ID NOs: 5955-5982. In some embodiments, an ASO that targets a CTH pre-mRNA is selected from the group consisting of SEQ ID NOs: 5983-6016. In some embodiments, an ASO that targets a DAB2IP pre-mRNA is selected from the group consisting of SEQ ID NOs: 6017-6063. In some embodiments, an ASO that targets a DBN1 pre-mRNA is selected from the group consisting of SEQ ID NOs: 6064-6105. In some embodiments, an ASO that targets a DDX51 pre-mRNA is selected from the group consisting of SEQ ID NOs: 6106-6152. In some embodiments, an ASO that targets a DEAF1 pre-mRNA is selected from the group consisting of SEQ ID NOs: 6153-6187. In some embodiments, an ASO that targets a DGKE pre-mRNA is selected from the group consisting of SEQ ID NOs: 6188-6214. In some embodiments, an ASO that targets a DMKN pre-mRNA is selected from the group consisting of SEQ ID NOs: 6215-6257. In some embodiments, an ASO that targets a DOCK8 pre-mRNA is selected from the group consisting of SEQ ID NOs: 6258-6354. In some embodiments, an ASO that targets a DOK5 pre-mRNA is selected from the group consisting of SEQ ID NOs: 6355-6408. In some embodiments, an ASO that targets a EIF2B5 pre-mRNA is selected from the group consisting of SEQ ID NOs: 6409-6440. In some embodiments, an ASO that targets a ELAC2 pre-mRNA is selected from the group consisting of SEQ ID NOs: 6441-6487. In some embodiments, an ASO that targets a ELP1 pre-mRNA is selected from the group consisting of SEQ ID NOs: 6488-6519. In some embodiments, an ASO that targets a ETHE1 pre-mRNA is selected from the group consisting of SEQ ID NOs: 6520-6570. In some embodiments, an ASO that targets a FANCA pre-mRNA is selected from the group consisting of SEQ ID NOs: 6571-6647. In some embodiments, an ASO that targets a FASTK pre-mRNA is selected from the group consisting of SEQ ID NOs: 6648-6762. In some embodiments, an ASO that targets a FPGS pre-mRNA is selected from the group consisting of SEQ ID NOs: 6763-6799. In some embodiments, an ASO that targets a GAS8 pre-mRNA is selected from the group consisting of SEQ ID NOs: 6800-6857. In some embodiments, an ASO that targets a GCK pre-mRNA is selected from the group consisting of SEQ ID NOs: 6858-6954. In some embodiments, an ASO that targets a GGA1 pre-mRNA is selected from the group consisting of SEQ ID NOs: 6955-7024. In some embodiments, an ASO that targets a GON4L pre-mRNA is selected from the group consisting of SEQ ID NOs: 7025-7051. In some embodiments, an ASO that targets a HELQ pre-mRNA is selected from the group consisting of SEQ ID NOs: 7052-7096. In some embodiments, an ASO that targets a HPS1 pre-mRNA is selected from the group consisting of SEQ ID NOs: 7097-7124. In some embodiments, an ASO that targets a IL17RC pre-mRNA is selected from the group consisting of SEQ ID NOs: 7125-7162. In some embodiments, an ASO that targets a INVS pre-mRNA is selected from the group consisting of SEQ ID NOs: 7163-7260. In some embodiments, an ASO that targets a IRF3 pre-mRNA is selected from the group consisting of SEQ ID NOs: 7261-7379. In some embodiments, an ASO that targets a KLKB1 pre-mRNA is selected from the group consisting of SEQ ID NOs: 7380-7405. In some embodiments, an ASO that targets a LAMC3 pre-mRNA is selected from the group consisting of SEQ ID NOs: 7406-7454. In some embodiments, an ASO that targets a LDAH pre-mRNA is selected from the group consisting of SEQ ID NOs: 7455-7487. In some embodiments, an ASO that targets a LIMS2 pre-mRNA is selected from the group consisting of SEQ ID NOs: 7488-7585. In some embodiments, an ASO that targets a MALT1 pre-mRNA is selected from the group consisting of SEQ ID NOs: 7586-7641. In some embodiments, an ASO that targets a MAPK13 pre-mRNA is selected from the group consisting of SEQ ID NOs: 7642-7751. In some embodiments, an ASO that targets a MCAT pre-mRNA is selected from the group consisting of SEQ ID NOs: 7752-7777. In some embodiments, an ASO that targets a MCEE pre-mRNA is selected from the group consisting of SEQ ID NOs: 7778-7889. In some embodiments, an ASO that targets a MPI pre-mRNA is selected from the group consisting of SEQ ID NOs: 7890-7931. In some embodiments, an ASO that targets a MSTO1 pre-mRNA is selected from the group consisting of SEQ ID NOs: 7932-7963. In some embodiments, an ASO that targets a NLE1 pre-mRNA is selected from the group consisting of SEQ ID NOs: 7964-7988. In some embodiments, an ASO that targets a NLRC5 pre-mRNA is selected from the group consisting of SEQ ID NOs: 7989-8013. In some embodiments, an ASO that targets a NOM1 pre-mRNA is selected from the group consisting of SEQ ID NOs: 8014-8048. In some embodiments, an ASO that targets a NPR1 pre-mRNA is selected from the group consisting of SEQ ID NOs: 8049-8139. In some embodiments, an ASO that targets a OSGEP pre-mRNA is selected from the group consisting of SEQ ID NOs: 8140-8165. In some embodiments, an ASO that targets a PABPC4 pre-mRNA is selected from the group consisting of SEQ ID NOs: 8166-8212. In some embodiments, an ASO that targets a PCOLCE pre-mRNA is selected from the group consisting of SEQ ID NOs: 8213-8288. In some embodiments, an ASO that targets a PLD2 pre-mRNA is selected from the group consisting of SEQ ID NOs: 8289-8305. In some embodiments, an ASO that targets a PNPO pre-mRNA is selected from the group consisting of SEQ ID NOs: 8306-8372. In some embodiments, an ASO that targets a POLE pre-mRNA is selected from the group consisting of SEQ ID NOs: 8373-8401. In some embodiments, an ASO that targets a PON2 pre-mRNA is selected from the group consisting of SEQ ID NOs: 8402-8434. In some embodiments, an ASO that targets a PYCR1 pre-mRNA is selected from the group consisting of SEQ ID NOs: 8435-8493. In some embodiments, an ASO that targets a RAD52 pre-mRNA is selected from the group consisting of SEQ ID NOs: 8494-8546. In some embodiments, an ASO that targets a RHBDF2 pre-mRNA is selected from the group consisting of SEQ ID NOs: 8547-8579. In some embodiments, an ASO that targets a RMND1 pre-mRNA is selected from the group consisting of SEQ ID NOs: 8580-8604. In some embodiments, an ASO that targets a ROBO3 pre-mRNA is selected from the group consisting of SEQ ID NOs: 8605-8756. In some embodiments, an ASO that targets a RPGRIP1 pre-mRNA is selected from the group consisting of SEQ ID NOs: 8757-8821. In some embodiments, an ASO that targets a RTTN pre-mRNA is selected from the group consisting of SEQ ID NOs: 8822-8855. In some embodiments, an ASO that targets a SIK3 pre-mRNA is selected from the group consisting of SEQ ID NOs: 8856-8912. In some embodiments, an ASO that targets a SLC12A7 pre-mRNA is selected from the group consisting of SEQ ID NOs: 8913-8981. In some embodiments, an ASO that targets a SLC22A3 pre-mRNA is selected from the group consisting of SEQ ID NOs: 8982-9042. In some embodiments, an ASO that targets a SLC25A37 pre-mRNA is selected from the group consisting of SEQ ID NOs: 9043-9157. In some embodiments, an ASO that targets a SLC27A5 pre-mRNA is selected from the group consisting of SEQ ID NOs: 9158-9196. In some embodiments, an ASO that targets a SMPD1 pre-mRNA is selected from the group consisting of SEQ ID NOs: 9197-9223. In some embodiments, an ASO that targets a SNRPB pre-mRNA is selected from the group consisting of SEQ ID NOs: 9224-9325. In some embodiments, an ASO that targets a SP140 pre-mRNA is selected from the group consisting of SEQ ID NOs: 9326-9379. In some embodiments, an ASO that targets a STAMBP pre-mRNA is selected from the group consisting of SEQ ID NOs: 9380-9428. In some embodiments, an ASO that targets a SULF2 pre-mRNA is selected from the group consisting of SEQ ID NOs: 9429-9482. In some embodiments, an ASO that targets a SYNJ2 pre-mRNA is selected from the group consisting of SEQ ID NOs: 9483-9513. In some embodiments, an ASO that targets a TAZ pre-mRNA is selected from the group consisting of SEQ ID NOs: 9514-9554. In some embodiments, an ASO that targets a TDRD7 pre-mRNA is selected from the group consisting of SEQ ID NOs: 9555-9586. In some embodiments, an ASO that targets a TFB1M pre-mRNA is selected from the group consisting of SEQ ID NOs: 9587-9641. In some embodiments, an ASO that targets a TM6SF1 pre-mRNA is selected from the group consisting of SEQ ID NOs: 9642-9671. In some embodiments, an ASO that targets a TOR1B pre-mRNA is selected from the group consisting of SEQ ID NOs: 9672-9719. In some embodiments, an ASO that targets a TRAPPC6B pre-mRNA is selected from the group consisting of SEQ ID NOs: 9720-9745. In some embodiments, an ASO that targets a TRIP4 pre-mRNA is selected from the group consisting of SEQ ID NOs: 9746-9781. In some embodiments, an ASO that targets a TRMU pre-mRNA is selected from the group consisting of SEQ ID NOs: 9782-9852. In some embodiments, an ASO that targets a TTC19 pre-mRNA is selected from the group consisting of SEQ ID NOs: 9853-9899. In some embodiments, an ASO that targets a TYMP pre-mRNA is selected from the group consisting of SEQ ID NOs: 9900-9972. In some embodiments, an ASO that targets a UMPS pre-mRNA is selected from the group consisting of SEQ ID NOs: 9973-10032. In some embodiments, an ASO that targets a WDR11 pre-mRNA is selected from the group consisting of SEQ ID NOs: 10033-10056. In some embodiments, an ASO that targets a WIPI1 pre-mRNA is selected from the group consisting of SEQ ID NOs: 10057-10103. In some embodiments, an ASO that targets a YY1AP1 pre-mRNA is selected from the group consisting of SEQ ID NOs: 10104-10193. In some embodiments, an ASO that targets a ZC3H14 pre-mRNA is selected from the group consisting of SEQ ID NOs: 10194-10225.

### Combinational Therapy

[0877] In some embodiments, provided herein is a composition comprising one or more NSAE-modulating agents. In some embodiments, provided herein is a composition comprising two or more NSAE-modulating agents. In some embodiments, provided herein is a composition comprising one or more ASO complementary to a targeted region of SynGAP1 pre-mRNA. In some embodiments, provided herein is a composition comprising two or more ASO complementary to a targeted region of SynGAP1 pre-mRNA. In some embodiments, provided herein is a composition comprising one or more ASO complementary to a same targeted region of SynGAP1 pre-mRNA. In some embodiments, provided herein is a composition comprising two or more ASO complementary to a same targeted region of SynGAP1 pre-mRNA. In some embodiments, provided herein is a composition comprising one or more ASO complementary to different targeted regions of SynGAP1 pre-mRNA. In some embodiments, provided herein is a composition comprising two or more ASO complementary to different targeted regions of SynGAP1 pre-mRNA. In some embodiments, provided herein is a composition comprising one or more ASOs of Table 1. In some embodiments, provided herein is a composition comprising two and more ASOs of in Table 1. In some embodiments, provided herein is a composition comprising one or more ASOs selected from SEQ ID NOs: 1301 to 10225. In some embodiments, provided herein is a composition comprising two and more ASOs selected from SEQ ID NOs: 1301 to 10225.

[0878] In some embodiments, provided herein is a composition comprising one or more ASO complementary to a targeted region of a target pre-mRNA, wherein the target is any one selected from the group consisting of ABCA5, ABCA7, ABCC3, ABCC5, ABCC8, ABCD1, ABR, ACAD9, ACAP1, ACOX2, ACSF3, ACTN4, ADAM17, ADAMTS13, AKR1E2, ALAD, ALG3, ANKRD29, ANKS3, ANO4, AP3B2, AP3M1, AP5Z1, ARNTL, ASAP3, ATRX, BBS2, BBS4, BRD9, CALM3, CARS1, CASP9, CATSPER1, CCDC40, CCDC88B, CD4, CD58, CES2, CHFR, CLCN2, CNOT3, CNTROB, COL5A3, CPSF1, CSPP1, CTF1, CTH, CYP3A5, DAB2IP, DBN1, DDX51, DEAF1, DGKE, DHDDS, DMKN, DNHD1, DOCK8, DOK5, EIF2B5, ELAC2, ELP1, ENTPD4, ESRRA, ESS2, ETAA1, ETHE1, FANCA, FASTK, FASTKD3, FPGS, FREM1, GAS8, GCK, GGA1, GGA3, GGT1, GLMN, GON4L, GRB14, HDAC3, HELQ, HP1BP3, HPS1, HPS4, IDUA, IFT122, IL17RC, IMPDH1, INVS, IRF3, KCTD3, KLKB1, KYAT1, LAMC3, LDAH, LIMS2, MALT1, MAP3K7, MAPK13, MCAT, MCEE, MPI, MSTO1, NBEAL2, NLE1, NLRC5, NOM1, NOP58, NPHP1, NPR1, NUP188, OSGEP, PABPC4, PCOLCE, PHKA2, PIDD1, PKD1, PLA2G6, PLD2, PLEKHG5, PNPO, POLE, PON2, PRMT7, PRODH, PRPF3, PRPF4, PYCR1, RAD52, REXO1, RFX5, RHBDF2, RMND1, ROBO3, RPGRIP1, RTTN, RUFY3, SEMA3B, SEMA3F, SH2D3A, SIK3, SIRT3, SKIV2L, SLC2A13, SLC12A7, SLC22A3, SLC25A13, SLC25A37, SLC27A5, SLC30A9, SLC30A10, SMPD1, SMTN, SNRPB, SP140, STAMBP, STXBP2, SULF2, SYNGAP1, SYNJ2, TAZ, TBL2, TDRD7, TECPR2, TFB1M, TM6SF1, TNK2, TOE1, TOR1B, TRAPPC6B, TRIP4, TRMT2A, TRMU, TRPV4, TTC19, TYMP, UMPS, UROD, WDR11, WDR62, WIPI1, WRAP53, XPO1, YY1AP1, and ZC3H14. In some embodiments, provided herein is a composition comprising two or more ASO complementary to a targeted region of a target pre-mRNA. In some embodiments, provided herein is a composition comprising one or more ASO complementary to a same targeted region of a target pre-mRNA. In some embodiments, provided herein is a composition comprising two or more ASO complementary to a same targeted region of a target pre-mRNA. In some embodiments, provided herein is a composition comprising one or more ASO complementary to different targeted regions of a target pre-mRNA. In some embodiments, provided herein is a composition comprising two or more ASO complementary to different targeted regions of a target pre-mRNA. In some embodiments, provided herein is a composition comprising two or more ASO complementary to a targeted region of two or more target pre-mRNAs. In some embodiments, provided herein is a composition comprising two or more ASO complementary to a targeted region of two or more different target pre-mRNAs.

[0879] In some aspects, provided herein is a method of modulating expression of a target protein by administering the compositions as described above. In some aspects, provided herein is a pharmaceutical composition comprising a therapeutic agent comprising the composition as described above; and a pharmaceutically acceptable excipient and/or a delivery vehicle. In some aspects, provided herein is a method of treating or preventing a disease or condition in a subject in need thereof, the method comprising: administering to the subject a pharmaceutical composition comprising a therapeutic agent comprising the composition as described above; and a pharmaceutically acceptable excipient and/or a delivery vehicle. In some aspects, provided herein is a method of treating or preventing a disease or condition in a subject in need thereof, the method comprising: administering to the subject the composition as described above. In some aspects, provided herein is a method of treating a disease or condition in a subject in need thereof by modulating expression of a target protein in a cell of the subject through administering to the subject a pharmaceutical composition comprising a therapeutic agent comprising the composition as described above; and a pharmaceutically acceptable excipient and/or a delivery vehicle. In some aspects, provided herein is a method of treating a disease or condition in a subject to the subject in need thereof by modulating expression of a target protein in a cell of the subject through administering to the subject the composition as described above. In some aspects, provided herein is a therapeutic agent for use in a method described herein. In some aspects, provided herein is a pharmaceutical composition comprising a therapeutic agent described herein and a pharmaceutically acceptable excipient.

[0880] The present invention will be more specifically illustrated by the following Examples. However, it should be understood that the present invention is not limited by these examples in any manner.

### EXAMPLES

### Example 1: Identification of NMD-Inducing Alternative Splicing Events in Transcripts by RNAseq Using Next Generation Sequencing

[0881] Non-productive AS events in organs known to be accessible by ASOs were identified by analyzing 83 publicly available RNA-sequencing (RNA-seq) datasets from human liver, kidney, central nervous system (CNS), and eye tissues. Computational analysis discovered 7,819 unique genes containing a total of 13,121 non-productive AS events of various types. By cross-referencing these genes with genetic disease databases such as Orphanet (www.orpha.net/), 1,265 disease-associated genes with non-productive AS events were identified. As many NMD-sensitive transcripts are efficiently degraded in the analyzed tissues and are not detectable by RNAseq, there are many more genes with non-productive AS events than have been identified to date. To prove the TANGO concept, four genes from the bioinformatic analysis representing three types of targets (haploinsufficiency, autosomal recessive and pathway associated with disease), three organs (liver, CNS, and eye), and three types of alternative splicing events (cassette exon, alternative splice site, and alternative intron) were selected.

### Example 2: Confirmation of Alternative Splicing Via Cycloheximide Treatment

[0882] To validate the in-silico predictions and to quantify the abundance of potentially targetable non-productive AS events, cells were treated with cycloheximide (CHX), a translation inhibitor known to inhibit NMD. Expectedly, reverse transcriptase (RT)-PCR analysis showed a consistent increase in the predicted non-productive SYNGAP1 splicing events in various cell lines upon CHX treatment compared to DMSO-treated cells. The increase indicates that these non-productive AS events lead to transcript degradation by NMD.

### Example 3: SYNGAP1 Exon Region ASO Walk

[0883] To identify ASOs that can prevent the non-productive AS events, an initial systematic ASO walk was performed in 5-nt steps along the AS event of interest. These ASOs have a uniform phosphorothioate backbone and methoxyethyl at the 2′ ribose position (2′MOE-PS). These modifications were previously shown to allow binding to RNA with high affinity and to confer resistance to both nucleases and RNase H cleavage of the target RNA-ASO complex. RT-PCR analysis from transfected HEK293 cells identified several ASOs that reduce AS in the SYNGAP1 mRNA and increase productive mRNA. The observed increase in SYNGAP1 productive mRNA was confirmed by TaqMan qPCR. The fold change of AS may be plotted vs the increase in productive mRNA (qPCR) to demonstrate that the ASOs are functioning on mechanism. These results strongly suggest that gene expression upregulation can be achieved by preventing non-productive AS with ASOs.

### Example 4: Use of ASO's to Increase Cellular Protein Expression in a Dose-Dependent Manner

[0884] As the desirable upregulation level varies among target genes and diseases, selected positive ASO hits from the initial walks were used to determine whether the increase in productive mRNA can be titrated across non-productive AS events. SYNGAP1 ASO-55 was transfected in cells at increasing concentrations to demonstrate dose-dependent upregulation. The concentration was selected based on the potency of the ASO. RT-PCR results showed a dose-dependent decrease of the non-productive alternative 3′ss selection in SYNGAP1 compared to a non-targeting ASO control transfected at the same respective doses. Conversely, a dose-dependent increase in productive mRNA was observed as measured by TaqMan qPCR compared to a non-targeting ASO control. To determine whether the observed upregulation in productive mRNAs translates to a dose-dependent increase in protein levels, SynGAP proteins were measured in extracts from transfected cells with increasing concentrations of targeting ASOs. First, antibodies against SynGAP were validated by short interfering (si)RNA-mediated knockdown of protein expression and western blot analysis. Immunoblotting results of extracts from cells transfected with the selected ASOs showed a dose-dependent increase in SynGAP proteins. The level of protein upregulation resulting from the highest ASO concentrations ranged between 1.6- to 2-fold. A non-targeting ASO control had no significant effect on protein levels. Altogether, the data indicate that ASOs targeting various types of non-productive AS events lead to a titratable increase in productive mRNA resulting in an increase in protein expression. The titratable nature of TANGO ASO-mediated protein upregulation suggests that one could tightly control protein levels and reduce the risk of overexpression. This aspect of the TANGO technology makes it especially suited to address autosomal dominant haploinsufficient diseases.

### Example 5: Validation of TANGO Approach In Vivo

[0885] To prove the applicability of the TANGO mechanism in vivo, one may select a positive hit from an ASO walk targeting a non-productive exon inclusion event in SCN1A. The non-productive AS event in the human SYNGAP1 gene also occurs in mice and is highly conserved at the sequence level (data not shown), allowing for testing the human targeting ASO in mice. Similar to other ASOs presented here, gymnotic (free) uptake of increasing concentrations of SYNGAP1 ASO leads to a dose-dependent decrease of AS and an inversely correlated increase in productive mRNA in cells compared to a non-targeting ASO control. To ascertain whether the observed effect of the ASO can be recapitulated in vivo, administer ASO to six mice or PBS to two mice via intracerebroventricular (ICV) injection at postnatal day 2 (P2). RNA and protein can be extracted from the brain of the treated mice 5 days post-injection. RT-PCR analysis can be done to show clear target engagement and a consistent reduction of non-productive exon inclusion in ASO-treated mice compared to the control PBS cohort. This reduction can be effectively translated to a roughly 4-fold increase in productive mRNA measured by TaqMan qPCR. Concomitantly, increases in protein by western blot can be detected using a validated antibody. These data provide in vivo proof of concept of the TANGO approach to upregulate protein expression by leveraging non-productive AS events.

### Example 6: TANGO (Targeted Augmentation of Nuclear Gene Output) for the Treatment of Genetic Diseases

[0886] TANGO (Targeted Augmentation of Nuclear Gene Output), a novel technology which exploits antisense-mediated modulation of pre-mRNA splicing was developed to increase protein expression. TANGO prevents naturally-occurring non-productive splicing events that lead to either transcript degradation by nonsense-mediated mRNA decay (NMD) or nuclear retention. By doing so, TANGO increases the generation of productive mRNA, resulting in an increase of full-length, fully-functional protein. Bioinformatic analyses of RNA sequencing (RNAseq) datasets were undertaken to identify non-productive events. Non-productive events were found in more than 50% of protein-coding genes, of which approximately 2,900 are disease-associated. To validate the in-silico predictions, targets (PCCA, SYNGAP1, CD274, and SCN1A) representing various types of NMD-inducing, non-productive alternative splicing (AS) events (cassette exons, alternative splice sites, and alternative introns) were selected and quantified their abundance by treating cells with cycloheximide (CHX), a translation inhibitor that is known to inhibit NMD. RT-PCR analyses of the selected targets was performed and an increase of the non-productive mRNA upon CHX treatment was observed compared to DMSO-treated cells. Antisense oligonucleotides (ASOs) were designed to target the three types of NMD-inducing, non-productive AS events and TANGO ASOs were able to modulate splicing to increase productive mRNA and protein in a dose-dependent manner in vitro. Consistent with the TANGO mechanism, the level of ASO-mediated upregulation was observed to be directly proportional to the abundance of the targeted NMD-inducing event. Moreover, intracerebroventricular injection in wild-type mice of a TANGO ASO targeting a non-productive AS event in SCN1A led to an increase in productive mRNA and NaV1.1 protein in the brain. As TANGO exploits naturally-occurring non-productive AS, this novel approach can be employed to upregulate gene expression from wild-type or hypomorphic alleles, providing a potentially unique strategy to treat genetic diseases. TANGO is being applied to develop treatment for autosomal dominant haploinsufficiency diseases such as genetic epilepsies. TANGO ASOs that increase expression from the wild-type alleles can be used to restore physiological levels of the deficient proteins.

### Example 7: RNA-Seq Processing Workflow

### Transcript Database and Labeling of NMD Junctions:

[0887] Annotated transcripts were downloaded from GENCODE (v. 28) and REFSEQ (via UCSC). Each annotated exon-exon junction was labeled as “coding” or “NMD”. Junctions are labeled “NMD” if and only if that junction is exclusively found in transcripts labeled “nonsense_mediated_decay” (GENCODE) or “NR” (REFSEQ).

### RNA-Seq Library Processing:

[0888] All RNA-seq samples were aligned to the hg38 genome and a combined transcript database using STAR¹ v2.6.1b to generate splice junction counts.

### Identification and Quantification of Putative NMD-Inducing Splicing Events:

[0889] All samples were run through SUPPA2² to define annotated alternative splicing events. Different approaches were then used to label and quantify each type of alternative splicing as follows: Exon inclusion (EI) and exon skipping (ES): The “skipped exon” events were parsed from SUPPA to obtain the inclusion and skipping junctions for each event. If the skipping junction was labeled “NMD”, the event was labeled “ES_NMD”. If either of the inclusion junctions were labeled as “NMD”, the event was labeled “EI_NMD”. Otherwise, the event is labeled “cassette exon.” Inclusion and skipping junction counts were retrieved from the STAR output, and these counts were summed across all events sharing the same alternatively spliced exon.

The final PSI for the inclusion was calculated as:

$$Ψ = \frac{s {j}_{inc}}{s {j}_{inc} + 2 \cdot {sj}_{skip}} .$$

For inclusion events, Ψ_{EI_NMD}=Ψ.
For skipping events, Ψ_{ES_NMD}=1−Ψ.
Alternative 3′ and 5′ splice sites (A3 and A5): The A3 and A5 events were parsed from SUPPA to obtain the junctions corresponding to each alternative event. If either the long or short junction is labeled as “NMD”, an NMD event is reported. If both junctions report NMD it is not reported because there is likely complex splicing in that region. Splice junction counts were retrieved from the STAR output. The PSI is reported as

$${Ψ}_{A \{ 3 , 5 \} \_ NMD} = \frac{s {j}_{N M D}}{s {j}_{coding}} .$$

Alternative intron events (AI): The retained intron events were parsed from SUPPA to obtain the list of alternative intron events. The AI event is labeled NMD if the event junction is labeled NMD. To calculate PSI, the expression level of the exon within which the AI is located was estimated by summing all junctions using its 3′ and 5′ splice sites (and all other parent exons containing the same AI event). Usage of the AI junction will then fall within the range

$$[ 0 , ∼ \frac{s {j}_{{3}^{′}} + s {j}_{{5}^{′}}}{2} ] ,$$

because full use of the AI junction (which results in no intron retention) is achieved with similar counts at the exon junctions and the AI junction (full intron retention has 0 reads for the junction). To calculate Ψ, the junction counts were normalized, such that this range would now be [0,1]:

$${Ψ}_{AI} ∼ \frac{min ( s {j}_{AI} , \frac{s {j}_{{3}^{′}} + s {j}_{{5}^{′}}}{2} )}{\frac{s {j}_{{3}^{′}} + s {j}_{{5}^{′}}}{2}} .$$

### Annotation of Disease Relevance:

[0890] Gene-disease association data from Orphadata (http://www.orphadata.org), the publicly available data repository of Orphanet was downloaded. The annotations were extended to cover all gene symbol aliases.

### Example 8: Treatment with Cycloheximide (CHX), Cell Culture, and Transfections

[0891] To determine the abundance of the non-productive mRNAs, cells (HEK293: PCCA, SYNGAP1; ARPE19: CD274; ReNCell VM: SCN1A) were incubated with 50 g/ml of CHX (Cell Signaling Technology) dissolved in DMSO for 3 hours.

[0892] For PCCA, HEK293 cells were grown in EMEM with 10% FBS and 1×10⁵ cells were seeded in 24-well plate and reverse-transfected with 80 nM ASOs for initial screening or 1, 5, 25 nM of selected ASO using Lipofectamine RNAiMax reagent (Invitrogen) according to manufacturer's instructions. Total RNA was extracted using RNeasy mini kit (Qiagen) 24 hrs post-transfection and cDNA was synthesized with ImProm-II reverse transcriptase (Promega). Total protein was extracted with RIPA buffer (Cell Signaling Technology) 48 hrs post transfection.

[0893] For SYNGAP1, HEK293 cells were grown in EMEM with 10% FBS and 7×10⁵ cells were seeded in 6-well plate and reverse-transfected with 30, 60, and 120 nM of antisense oligonucleotide (ASO) using Lipofectamine RNAiMax reagent (Invitrogen) according to manufacturer's instructions. Total RNA was extracted using RNeasy mini kit (Qiagen) 24 hrs post-transfection and cDNA was synthesized with ImProm-II reverse transcriptase (Promega). Total protein was extracted with RIPA buffer (Cell Signaling Technology) 48 hrs post transfection.

[0894] For CD274, Huh7 cells were grown in DMEM with 10% FBS and 1×10⁵ cells were seeded in a 12-well plate and reverse transfected with 5, 20, or 80 nM ASO using Lipofectamine RNAiMAX (Invitrogen) according to manufacturer's instructions. For RT-PCR analysis, cells were treated with 50 g/mL of CHX (Cell Signaling Technology) in DMSO for 3 hours 21 hours post transfection. Total RNA was extracted using RNeasy mini kit (Qiagen) 24 hrs post-transfection and cDNA was synthesized with ImProm-II reverse transcriptase (Promega). Total protein was extracted with RIPA buffer (Cell Signaling Technology) 48 hrs post transfection.

[0895] For SCN1A, ReNcell VM cells were grown in complete NSC medium containing 20 ng/mL of bFGF and EGF each on laminin coated flasks (2D culture) until reaching ˜90% confluency. The cells were then detached by accutase treatment, washed with PBS and cultured in complete NSC medium in ultra-low attachment surface 24-well polystyrene plate with 3, 8, 20 μM ASO for gymnotic (free) uptake. Total RNA was extracted using RNeasy mini kit (Qiagen) 72 hrs post-ASO addition to media and cDNA was synthesized with ImProm-II reverse transcriptase (Promega).

### Example 9: qPCR and RT-PCR Assays

[0896] For expression analysis of the productive mRNA, TaqMan qPCR (Thermo Fisher SC) was performed for PCCA (Hs01120555_m1), SYNGAP1 (Catalog #Hs00405348_m1), Mo-Scn1a (Mm00450583_mH), RPL32 (Hs00851655_g1), Mo-Gapdh (Mm99999915_g1), SYBR green qPCR was performed for human CD274 with forward primer 5′-AATGTGACCAGCACACTGAG-3′ (SEQ ID NO: 1099) and reverse primer 5′-GAATGTCAGTGCTACACCAAGG-3′ (SEQ ID NO: 1100), and probe-based qPCR (custom-designed, IDT) was performed for Hu-SCN1A with forward primer 5′-TGGGTTACTCAGAACTTGGA-3′ (SEQ ID NO: 1101), reverse primer 5′-GCATTCACAACCACCCTC-3′ (SEQ ID NO: 1102), and probe 5′-/56-FAM/CAAATCTCT/ZEN/CAGGACACTAAGAGCTCTGAGAC/3IABkFQ/-3′ (SEQ ID NO: 1103).

[0897] For PCCA, PCR analysis to amplify the productive and non-productive mRNAs was performed with forward primer 5′-GACCCCTACAAGTCTTTTGGTTT-3′ (SEQ ID NO: 1104) and reverse primer 5′-ATCACTTCCTGGTTGGATGC-3′ (SEQ ID NO: 1105). The cycling conditions were 30 sec at 95° C. for denaturation, 30 sec at 60° C. for annealing and 60 sec at 72° C. for extension for 30 cycles. The PCR products were separated on 5% polyacrylamide gel and quantified with Multi Gauge software Version 2.3.

[0898] For SYNGAP1, PCR analysis to amplify the productive and non-productive mRNAs was performed using forward primer 5′-GACCCTATCAAGTGCACAGC-3′ (SEQ ID NO: 1106) and reverse primer 5′-CTCCTGCATAAGCCCAAAGAG-3′ (SEQ ID NO: 1107). The cycling conditions were 30 sec at 95° C. for denaturation, 30 sec at 60° C. for annealing, and 60 sec at 72° C. for extension for 32 cycles. The PCR products were separated on a 5% polyacrylamide gel and quantified with Multi Gauge software Version 2.3.

[0899] For CD274, PCR analysis to amplify the productive and non-productive mRNAs was performed using forward primer 5′-GTCATCTGGACAAGCAGTG-3′ (SEQ ID NO: 1108) and a reverse primer 5′-GGATGCCACATTTTTTCACATC-3′ (SEQ ID NO: 1109). The cycling conditions were 30 sec at 95° C. for denaturation, 30 sec at 55° C. for annealing, and 30 sec at 72° C. for extension for 29 cycles. The PCR products were separated on a 5% polyacrylamide gel and quantified with Multi Gauge software Version 2.3.

[0900] For Hu-SCN1A, PCR analysis to amplify the productive and non-productive mRNAs was performed with forward primer 5′-ATTGTTGATGTTTCATTGGTCAGTTTAACA-3′ (SEQ ID NO: 1110) and reverse primer 5′-GAAGAAGGACCCAAAGATGATGAAAATA-3′ (SEQ ID NO: 1111). The cycling conditions were 30 sec at 95° C. for denaturation, 30 sec at 55° C. for annealing, and 75 sec at 72° C. for extension for 28 cycles. For Mo-Scn1a, PCR analysis to amplify the productive and non-productive mRNAs was performed with forward primer 5′-CAGTTTAACAGCAAATGCCTTGGGTT-3′ (SEQ ID NO: 1112) and reverse primer 5′-AAGTACAAATACATGTACAGGCTTTCCTCATACTTA-3′ (SEQ ID NO: 1113). The cycling conditions were 30 sec at 95° C. for denaturation, 30 sec at 56° C. for annealing, and 75 sec at 72° C. for extension for 28 cycles. For Mo-Gapdh, PCR was performed with forward primer 5′-AGGTCGGTGTGAACGGATTTG-3′ (SEQ ID NO: 1114) and reverse primer 5′-GGGGTCGTTGATGGCAACA-3′ (SEQ ID NO: 1115). The cycling conditions were 30 sec at 95° C. for denaturation, 30 sec at 56° C. for annealing, and 60 sec at 72° C. for extension for 24 cycles. The PCR products were separated on a 5% polyacrylamide gel and quantified with Multi Gauge software Version 2.3.

### Example 10: Western Blotting

[0901] Protein extracts were quantified by colorimetric assay using Pierce BCA protein assay kit (ThermoFisher).

[0902] For PCCA, immunoblotting was carried out with 25 μg of lysate. Anti-PCCA primary antibody (Cat #ab187686, 1:1000 dilution, overnight at 4° C.) and secondary antibody (1:2000, anti-rabbit IgG Alexa Fluror647, 1 hr at RT) were purchased from Abcam. Blots were scanned using Typhoon RLA 9000 imager (General Electric). Densitometric analysis was carried out using Multi Gauge software Version 2.3.

[0903] For SynGAP, immunoblotting was carried out with 60 μg of lysate. Anti-SynGAP primary antibody (Cat #5539, 1:1000, overnight at 4° C.) and secondary anti-rabbit HRP-conjugated (Cat #7074, 1:5000, 1 hr at RT) were purchased from Cell Signaling Technology. Blots were scanned using Typhoon RLA 9000 imager (General Electric). Densitometric analysis was carried out using Multi Gauge software Version 2.3.

[0904] For Nav1.1, immunoblotting was carried out with 120 μg of lysate. Anti-Nav1.1 primary antibody (ASC-001, 1:2000, overnight at 4° C.) was purchase from Almone. For vinculin, immunoblotting was carried out with 30 μg of lysate. Anti-vinculin primary E1E9V XP antibody (Cat #13901T, 1:2000, overnight at 4° C.) was purchased from Cell Signaling Technology. Secondary anti-rabbit HRP-conjugated antibody (Cat #sc-2004, 1:2500, overnight at 4° C.) was purchased from Santa Cruz. Blots were scanned using Typhoon RLA 9000 imager (General Electric). Densitometric analysis was carried out using Multi Gauge software Version 2.3.

### Example 11: Flow Cytometry

[0905] Cells were lifted from culture plates in FACS buffer (ThermoFisher SCIENTIFIC). Cells were stained with APC-anti-PD-L1 (1:250, BioLegend, #329708). Data from 15,000 cells were collected on a Guava Easycyte 12HT (EMD Millipore) flow cytometer. Fluorescence minus one was used to determine the positive gate.

### Example 12: Single Bolus ICV Injection in Neonate Mouse

[0906] Postnatal day 2 (P2) mice were injected with the selected 20 μg ASO or PBS. Pups were immobilized by gently holding them down on a soft tissue padded surface with two fingers. A 33-gauge needle (1-cm long, point style 4, 120 beveled) attached to a 5 L Hamilton microsyringe was used for the injection. The coordinates of the injection were approximately 1 mm lateral from the sagittal suture, halfway between the lambda and bregma, and −2 mm ventral. 2 μL of ASO or PBS was injected slowly into one cerebral lateral ventricle. Injected pups were quickly returned to their nest and were observed daily for survival and signs of stress.

[0907] While preferred embodiments of the present invention have been shown and described herein, it will be obvious to those skilled in the art that such embodiments are provided by way of example only. Numerous variations, changes, and substitutions will now occur to those skilled in the art without departing from the invention. It should be understood that various alternatives to the embodiments of the invention described herein may be employed in practicing the invention. It is intended that the following claims define the scope of the invention and that methods and structures within the scope of these claims and their equivalents be covered thereby.

The application's sequence listing, which the Patent Office published only in electronic form, follows.

SEQUENCE LISTING (15902 sequences)

SEQ ID NO: 1 - DNA, 18 bp, Artificial Sequence
  Description of Artificial Sequence: Synthetic oligonucleotide
atgggagagagatggagg

SEQ ID NO: 2 - DNA, 18 bp, Artificial Sequence
  Description of Artificial Sequence: Synthetic oligonucleotide
cagagatgggagagagat

SEQ ID NO: 3 - DNA, 18 bp, Artificial Sequence
  Description of Artificial Sequence: Synthetic oligonucleotide
agagacagagatgggaga

SEQ ID NO: 4 - DNA, 18 bp, Artificial Sequence
  Description of Artificial Sequence: Synthetic oligonucleotide
cagggagagacagagatg

SEQ ID NO: 5 - DNA, 18 bp, Artificial Sequence
  Description of Artificial Sequence: Synthetic oligonucleotide
gacaccagggagagacag

SEQ ID NO: 6 - DNA, 18 bp, Artificial Sequence
  Description of Artificial Sequence: Synthetic oligonucleotide
aaacagacaccagggaga

SEQ ID NO: 7 - DNA, 18 bp, Artificial Sequence
  Description of Artificial Sequence: Synthetic oligonucleotide
aagaaaaacagacaccag

SEQ ID NO: 8 - DNA, 18 bp, Artificial Sequence
  Description of Artificial Sequence: Synthetic oligonucleotide
aggagaagaaaaacagac

SEQ ID NO: 9 - DNA, 18 bp, Artificial Sequence
  Description of Artificial Sequence: Synthetic oligonucleotide
agaggaggagaagaaaaa

SEQ ID NO: 10 - DNA, 18 bp, Artificial Sequence
  Description of Artificial Sequence: Synthetic oligonucleotide
caaggagaggaggagaag

SEQ ID NO: 11 - DNA, 18 bp, Artificial Sequence
  Description of Artificial Sequence: Synthetic oligonucleotide
agagacaaggagaggagg

SEQ ID NO: 12 - DNA, 18 bp, Artificial Sequence
  Description of Artificial Sequence: Synthetic oligonucleotide
gggagagagacaaggaga

SEQ ID NO: 13 - DNA, 18 bp, Artificial Sequence
  Description of Artificial Sequence: Synthetic oligonucleotide
ggtgtgggagagagacaa

SEQ ID NO: 14 - DNA, 18 bp, Artificial Sequence
  Description of Artificial Sequence: Synthetic oligonucleotide
ggagggttgtgggagaga

SEQ ID NO: 15 - DNA, 18 bp, Artificial Sequence
  Description of Artificial Sequence: Synthetic oligonucleotide
gagatggatgggtgtggg

SEQ ID NO: 16 - DNA, 18 bp, Artificial Sequence
  Description of Artificial Sequence: Synthetic oligonucleotide
ggagagagatggatgggt

SEQ ID NO: 17 - DNA, 18 bp, Artificial Sequence
  Description of Artificial Sequence: Synthetic oligonucleotide
acgtgggagagagatgga

SEQ ID NO: 18 - DNA, 18 bp, Artificial Sequence
  Description of Artificial Sequence: Synthetic oligonucleotide
gagacacgtgggagagag

SEQ ID NO: 19 - DNA, 18 bp, Artificial Sequence
  Description of Artificial Sequence: Synthetic oligonucleotide
agggagagacacgtggga

SEQ ID NO: 20 - DNA, 18 bp, Artificial Sequence
  Description of Artificial Sequence: Synthetic oligonucleotide
ggtgagggaagagacacg

SEQ ID NO: 21 - DNA, 18 bp, Artificial Sequence
  Description of Artificial Sequence: Synthetic oligonucleotide
gagaaggtgaagggagag

SEQ ID NO: 22 - DNA, 18 bp, Artificial Sequence
  Description of Artificial Sequence: Synthetic oligonucleotide
agggagagaaggtgaggg

SEQ ID NO: 23 - DNA, 18 bp, Artificial Sequence
  Description of Artificial Sequence: Synthetic oligonucleotide
tggagggagagagaaggt

SEQ ID NO: 24 - DNA, 18 bp, Artificial Sequence
  Description of Artificial Sequence: Synthetic oligonucleotide
agaaatggagagggagag

SEQ ID NO: 25 - DNA, 18 bp, Artificial Sequence
  Description of Artificial Sequence: Synthetic oligonucleotide
gagagagaaatggaggga

SEQ ID NO: 26 - DNA, 18 bp, Artificial Sequence
  Description of Artificial Sequence: Synthetic oligonucleotide
ttagggagagagaaatgg

SEQ ID NO: 27 - DNA, 18 bp, Artificial Sequence
  Description of Artificial Sequence: Synthetic oligonucleotide
acagattagggagagaga

SEQ ID NO: 28 - DNA, 18 bp, Artificial Sequence
  Description of Artificial Sequence: Synthetic oligonucleotide
aacagacagattagggag

SEQ ID NO: 29 - DNA, 18 bp, Artificial Sequence
  Description of Artificial Sequence: Synthetic oligonucleotide
gagggaacagacagatta

SEQ ID NO: 30 - DNA, 18 bp, Artificial Sequence
  Description of Artificial Sequence: Synthetic oligonucleotide
tggcagagggaacagaca

SEQ ID NO: 31 - DNA, 18 bp, Artificial Sequence
  Description of Artificial Sequence: Synthetic oligonucleotide
ggccatggcagagggaac

SEQ ID NO: 32 - DNA, 18 bp, Artificial Sequence
  Description of Artificial Sequence: Synthetic oligonucleotide
aagggagccatggcagag

SEQ ID NO: 33 - DNA, 18 bp, Artificial Sequence
  Description of Artificial Sequence: Synthetic oligonucleotide
tgaagaaggaggccatgg

SEQ ID NO: 34 - DNA, 18 bp, Artificial Sequence
  Description of Artificial Sequence: Synthetic oligonucleotide
ctgcttgaagaagagggc

SEQ ID NO: 35 - DNA, 18 bp, Artificial Sequence
  Description of Artificial Sequence: Synthetic oligonucleotide
ggaggctgcttgaagaag

SEQ ID NO: 36 - DNA, 18 bp, Artificial Sequence
  Description of Artificial Sequence: Synthetic oligonucleotide
agatgggaggctgcttga

SEQ ID NO: 37 - DNA, 18 bp, Artificial Sequence
  Description of Artificial Sequence: Synthetic oligonucleotide
gagcaagatgggaggctg

SEQ ID NO: 38 - DNA, 18 bp, Artificial Sequence
  Description of Artificial Sequence: Synthetic oligonucleotide
caggagcaagatgggagg

SEQ ID NO: 39 - DNA, 18 bp, Artificial Sequence
  Description of Artificial Sequence: Synthetic oligonucleotide
gaccgcaggagcaagatg

SEQ ID NO: 40 - DNA, 18 bp, Artificial Sequence
  Description of Artificial Sequence: Synthetic oligonucleotide
ggagggaccgcaggagca

SEQ ID NO: 41 - DNA, 18 bp, Artificial Sequence
  Description of Artificial Sequence: Synthetic oligonucleotide
gggaaggagggaccgcag

SEQ ID NO: 42 - DNA, 18 bp, Artificial Sequence
  Description of Artificial Sequence: Synthetic oligonucleotide
agacagggaaggagggac

SEQ ID NO: 43 - DNA, 18 bp, Artificial Sequence
  Description of Artificial Sequence: Synthetic oligonucleotide
gagagagacagggaagga

SEQ ID NO: 44 - DNA, 18 bp, Artificial Sequence
  Description of Artificial Sequence: Synthetic oligonucleotide
agggtgagagagacaggg

SEQ ID NO: 45 - DNA, 18 bp, Artificial Sequence
  Description of Artificial Sequence: Synthetic oligonucleotide
aaacagggatgagagaga

SEQ ID NO: 46 - DNA, 18 bp, Artificial Sequence
  Description of Artificial Sequence: Synthetic oligonucleotide
tgtggaaacaagggtgag

SEQ ID NO: 47 - DNA, 18 bp, Artificial Sequence
  Description of Artificial Sequence: Synthetic oligonucleotide
gagggtgtggaaacaggg

SEQ ID NO: 48 - DNA, 18 bp, Artificial Sequence
  Description of Artificial Sequence: Synthetic oligonucleotide
gaggtgagggtgtggaaa

SEQ ID NO: 49 - DNA, 18 bp, Artificial Sequence
  Description of Artificial Sequence: Synthetic oligonucleotide
ggtaggaggtgagggtgt

SEQ ID NO: 50 - DNA, 18 bp, Artificial Sequence
  Description of Artificial Sequence: Synthetic oligonucleotide
agggtggtaggaggtgag

SEQ ID NO: 51 - DNA, 18 bp, Artificial Sequence
  Description of Artificial Sequence: Synthetic oligonucleotide
tgagggaggtggtaggag

SEQ ID NO: 52 - DNA, 18 bp, Artificial Sequence
  Description of Artificial Sequence: Synthetic oligonucleotide
catgctgaggagggtggt

SEQ ID NO: 53 - DNA, 18 bp, Artificial Sequence
  Description of Artificial Sequence: Synthetic oligonucleotide
gggaacatgctgagaggg

SEQ ID NO: 54 - DNA, 18 bp, Artificial Sequence
  Description of Artificial Sequence: Synthetic oligonucleotide
ttccagggaacatgctga

SEQ ID NO: 55 - DNA, 18 bp, Artificial Sequence
  Description of Artificial Sequence: Synthetic oligonucleotide
tcagcttccagggaacat

SEQ ID NO: 56 - DNA, 18 bp, Artificial Sequence
  Description of Artificial Sequence: Synthetic oligonucleotide
gggagagagatggatggg

SEQ ID NO: 57 - DNA, 18 bp, Artificial Sequence
  Description of Artificial Sequence: Synthetic oligonucleotide
tgggagagagatggaggg

SEQ ID NO: 58 - DNA, 18 bp, Artificial Sequence
  Description of Artificial Sequence: Synthetic oligonucleotide
gtgggagagagatggagg

SEQ ID NO: 59 - DNA, 18 bp, Artificial Sequence
  Description of Artificial Sequence: Synthetic oligonucleotide
cgtgggagagagatggag

SEQ ID NO: 60 - DNA, 18 bp, Artificial Sequence
  Description of Artificial Sequence: Synthetic oligonucleotide
cacgtgggagagagatgg

SEQ ID NO: 61 - DNA, 18 bp, Artificial Sequence
  Description of Artificial Sequence: Synthetic oligonucleotide
acacgtgggagagagatg

SEQ ID NO: 62 - DNA, 18 bp, Artificial Sequence
  Description of Artificial Sequence: Synthetic oligonucleotide
gacacgtgggagagagat

SEQ ID NO: 63 - DNA, 18 bp, Artificial Sequence
  Description of Artificial Sequence: Synthetic oligonucleotide
agacacgtgggagagaga

SEQ ID NO: 64 - DNA, 18 bp, Artificial Sequence
  Description of Artificial Sequence: Synthetic oligonucleotide
agagacacgtgggagaga

SEQ ID NO: 65 - DNA, 18 bp, Artificial Sequence
  Description of Artificial Sequence: Synthetic oligonucleotide
gagagacacgtgggagag

SEQ ID NO: 66 - DNA, 18 bp, Artificial Sequence
  Description of Artificial Sequence: Synthetic oligonucleotide
ggagagacacgtgggaga

SEQ ID NO: 67 - DNA, 18 bp, Artificial Sequence
  Description of Artificial Sequence: Synthetic oligonucleotide
gggagagacacgtgggag

SEQ ID NO: 68 - DNA, 18 bp, Artificial Sequence
  Description of Artificial Sequence: Synthetic oligonucleotide
agggaacatgctgatggg

SEQ ID NO: 69 - DNA, 18 bp, Artificial Sequence
  Description of Artificial Sequence: Synthetic oligonucleotide
cagggaacatgctgaggg

SEQ ID NO: 70 - DNA, 18 bp, Artificial Sequence
  Description of Artificial Sequence: Synthetic oligonucleotide
ccagggaacatgctgagg

SEQ ID NO: 71 - DNA, 18 bp, Artificial Sequence
  Description of Artificial Sequence: Synthetic oligonucleotide
tccagggaacatgctgag

SEQ ID NO: 72 - DNA, 18 bp, Artificial Sequence
  Description of Artificial Sequence: Synthetic oligonucleotide
cttccagggaacatgctg

SEQ ID NO: 73 - DNA, 18 bp, Artificial Sequence
  Description of Artificial Sequence: Synthetic oligonucleotide
gcttccagggaacatgct

SEQ ID NO: 74 - DNA, 18 bp, Artificial Sequence
  Description of Artificial Sequence: Synthetic oligonucleotide
agcttccagggaacatgc

SEQ ID NO: 75 - DNA, 18 bp, Artificial Sequence
  Description of Artificial Sequence: Synthetic oligonucleotide
cagcttccagggaacatg

SEQ ID NO: 76 - DNA, 16 bp, Artificial Sequence
  Description of Artificial Sequence: Synthetic oligonucleotide
gagacacgtgggagag

SEQ ID NO: 77 - DNA, 16 bp, Artificial Sequence
  Description of Artificial Sequence: Synthetic oligonucleotide
gacacgtgggagagag

SEQ ID NO: 78 - DNA, 16 bp, Artificial Sequence
  Description of Artificial Sequence: Synthetic oligonucleotide
cacgtgggagagagat

SEQ ID NO: 79 - DNA, 16 bp, Artificial Sequence
  Description of Artificial Sequence: Synthetic oligonucleotide
cgtgggagagagatgg

SEQ ID NO: 80 - DNA, 16 bp, Artificial Sequence
  Description of Artificial Sequence: Synthetic oligonucleotide
gtgggagagagatgga

SEQ ID NO: 81 - DNA, 14 bp, Artificial Sequence
  Description of Artificial Sequence: Synthetic oligonucleotide
gagacacgtgggag

SEQ ID NO: 82 - DNA, 14 bp, Artificial Sequence
  Description of Artificial Sequence: Synthetic oligonucleotide
gacacgtgggagag

SEQ ID NO: 83 - DNA, 14 bp, Artificial Sequence
  Description of Artificial Sequence: Synthetic oligonucleotide
cacgtgggagagag

SEQ ID NO: 84 - DNA, 14 bp, Artificial Sequence
  Description of Artificial Sequence: Synthetic oligonucleotide
cgtgggagagagat

SEQ ID NO: 85 - DNA, 14 bp, Artificial Sequence
  Description of Artificial Sequence: Synthetic oligonucleotide
tgggagagagatgg

SEQ ID NO: 86 - DNA, 14 bp, Artificial Sequence
  Description of Artificial Sequence: Synthetic oligonucleotide
gggagagagatgga

SEQ ID NO: 87 - DNA, 12 bp, Artificial Sequence
  Description of Artificial Sequence: Synthetic oligonucleotide
gagacacgtggg

SEQ ID NO: 88 - DNA, 12 bp, Artificial Sequence
  Description of Artificial Sequence: Synthetic oligonucleotide
gacacgtgggag

SEQ ID NO: 89 - DNA, 12 bp, Artificial Sequence
  Description of Artificial Sequence: Synthetic oligonucleotide
cacgtgggagag

SEQ ID NO: 90 - DNA, 12 bp, Artificial Sequence
  Description of Artificial Sequence: Synthetic oligonucleotide
cgtgggagagag

SEQ ID NO: 91 - DNA, 12 bp, Artificial Sequence
  Description of Artificial Sequence: Synthetic oligonucleotide
tgggagagagat

SEQ ID NO: 92 - DNA, 12 bp, Artificial Sequence
  Description of Artificial Sequence: Synthetic oligonucleotide
ggagagagatgg

SEQ ID NO: 93 - DNA, 12 bp, Artificial Sequence
  Description of Artificial Sequence: Synthetic oligonucleotide
gagagagatgga

SEQ ID NO: 94 - DNA, 18 bp, Artificial Sequence
  Description of Artificial Sequence: Synthetic oligonucleotide
ccagggagagacagagat

SEQ ID NO: 95 - DNA, 18 bp, Artificial Sequence
  Description of Artificial Sequence: Synthetic oligonucleotide
accagggagagacagaga

SEQ ID NO: 96 - DNA, 18 bp, Artificial Sequence
  Description of Artificial Sequence: Synthetic oligonucleotide
caccagggagagacagag

SEQ ID NO: 97 - DNA, 18 bp, Artificial Sequence
  Description of Artificial Sequence: Synthetic oligonucleotide
acaccagggagagacaga

SEQ ID NO: 98 - DNA, 18 bp, Artificial Sequence
  Description of Artificial Sequence: Synthetic oligonucleotide
agacaccagggagagaca

SEQ ID NO: 99 - DNA, 18 bp, Artificial Sequence
  Description of Artificial Sequence: Synthetic oligonucleotide
cagacaccagggagagac

SEQ ID NO: 100 - DNA, 18 bp, Artificial Sequence
  Description of Artificial Sequence: Synthetic oligonucleotide
acagacaccagggagaga

SEQ ID NO: 101 - DNA, 18 bp, Artificial Sequence
  Description of Artificial Sequence: Synthetic oligonucleotide
aacagacaccagggagag

SEQ ID NO: 102 - DNA, 18 bp, Artificial Sequence
  Description of Artificial Sequence: Synthetic oligonucleotide
aaaacagacaccagggag

SEQ ID NO: 103 - DNA, 18 bp, Artificial Sequence
  Description of Artificial Sequence: Synthetic oligonucleotide
aaaaacagacaccaggga

SEQ ID NO: 104 - DNA, 18 bp, Artificial Sequence
  Description of Artificial Sequence: Synthetic oligonucleotide
gaaaaacagacaccaggg

SEQ ID NO: 105 - DNA, 18 bp, Artificial Sequence
  Description of Artificial Sequence: Synthetic oligonucleotide
agaaaaacagacaccagg

SEQ ID NO: 106 - DNA, 18 bp, Artificial Sequence
  Description of Artificial Sequence: Synthetic oligonucleotide
gagacagggaaggaggga

SEQ ID NO: 107 - DNA, 18 bp, Artificial Sequence
  Description of Artificial Sequence: Synthetic oligonucleotide
agagacagggaaggaggg

SEQ ID NO: 108 - DNA, 18 bp, Artificial Sequence
  Description of Artificial Sequence: Synthetic oligonucleotide
gagagacagggaaggagg

SEQ ID NO: 109 - DNA, 18 bp, Artificial Sequence
  Description of Artificial Sequence: Synthetic oligonucleotide
agagagacagggaaggag

SEQ ID NO: 110 - DNA, 18 bp, Artificial Sequence
  Description of Artificial Sequence: Synthetic oligonucleotide
tgagagagacagggaagg

SEQ ID NO: 111 - DNA, 18 bp, Artificial Sequence
  Description of Artificial Sequence: Synthetic oligonucleotide
gtgagagagacagggaag

SEQ ID NO: 112 - DNA, 18 bp, Artificial Sequence
  Description of Artificial Sequence: Synthetic oligonucleotide
ggtgagagagacagggaa

SEQ ID NO: 113 - DNA, 18 bp, Artificial Sequence
  Description of Artificial Sequence: Synthetic oligonucleotide
gggtgagagagacaggga

SEQ ID NO: 114 - DNA, 20 bp, Artificial Sequence
  Description of Artificial Sequence: Synthetic oligonucleotide
ttccagggaacatgctgagg

SEQ ID NO: 115 - DNA, 16 bp, Artificial Sequence
  Description of Artificial Sequence: Synthetic oligonucleotide
agggaacatgctgagg

SEQ ID NO: 116 - DNA, 16 bp, Artificial Sequence
  Description of Artificial Sequence: Synthetic oligonucleotide
cagggaacatgctgag

SEQ ID NO: 117 - DNA, 16 bp, Artificial Sequence
  Description of Artificial Sequence: Synthetic oligonucleotide
ccagggaacatgctga

SEQ ID NO: 118 - DNA, 16 bp, Artificial Sequence
  Description of Artificial Sequence: Synthetic oligonucleotide
tccagggaacatgctg

SEQ ID NO: 119 - DNA, 16 bp, Artificial Sequence
  Description of Artificial Sequence: Synthetic oligonucleotide
ttccagggaacatgct

SEQ ID NO: 120 - DNA, 18 bp, Artificial Sequence
  Description of Artificial Sequence: Synthetic oligonucleotide
ccagggaacatgctgagg

SEQ ID NO: 121 - DNA, 18 bp, Artificial Sequence
  Description of Artificial Sequence: Synthetic oligonucleotide
tccagggaacatgctgag

SEQ ID NO: 122 - DNA, 18 bp, Artificial Sequence
  Description of Artificial Sequence: Synthetic oligonucleotide
ttccagggaacatgctga

SEQ ID NO: 123 - DNA, 16 bp, Artificial Sequence
  Description of Artificial Sequence: Synthetic oligonucleotide
agggaacatgctgagg

SEQ ID NO: 124 - DNA, 16 bp, Artificial Sequence
  Description of Artificial Sequence: Synthetic oligonucleotide
cagggaacatgctgag

SEQ ID NO: 125 - DNA, 16 bp, Artificial Sequence
  Description of Artificial Sequence: Synthetic oligonucleotide
ccagggaacatgctga

SEQ ID NO: 126 - DNA, 16 bp, Artificial Sequence
  Description of Artificial Sequence: Synthetic oligonucleotide
tccagggaacatgctg

SEQ ID NO: 127 - DNA, 16 bp, Artificial Sequence
  Description of Artificial Sequence: Synthetic oligonucleotide
ttccagggaacatgct

SEQ ID NO: 128 - DNA, 18 bp, Artificial Sequence
  Description of Artificial Sequence: Synthetic oligonucleotide
ccagggaacatgctgagg

SEQ ID NO: 129 - DNA, 18 bp, Artificial Sequence
  Description of Artificial Sequence: Synthetic oligonucleotide
tccagggaacatgctgag

SEQ ID NO: 130 - DNA, 18 bp, Artificial Sequence
  Description of Artificial Sequence: Synthetic oligonucleotide
ttccagggaacatgctga

SEQ ID NO: 131 - DNA, 16 bp, Artificial Sequence
  Description of Artificial Sequence: Synthetic oligonucleotide
agggaacatgctgagg

SEQ ID NO: 132 - DNA, 16 bp, Artificial Sequence
  Description of Artificial Sequence: Synthetic oligonucleotide
cagggaacatgctgag

SEQ ID NO: 133 - DNA, 16 bp, Artificial Sequence
  Description of Artificial Sequence: Synthetic oligonucleotide
ccagggaacatgctga

SEQ ID NO: 134 - DNA, 16 bp, Artificial Sequence
  Description of Artificial Sequence: Synthetic oligonucleotide
tccagggaacatgctg

SEQ ID NO: 135 - DNA, 16 bp, Artificial Sequence
  Description of Artificial Sequence: Synthetic oligonucleotide
ttccagggaacatgct

SEQ ID NO: 136 - DNA, 20 bp, Artificial Sequence
  Description of Artificial Sequence: Synthetic oligonucleotide
cagacaccagggagagacag

SEQ ID NO: 137 - DNA, 21 bp, Artificial Sequence
  Description of Artificial Sequence: Synthetic oligonucleotide
acagacaccagggagagacag

SEQ ID NO: 138 - DNA, 22 bp, Artificial Sequence
  Description of Artificial Sequence: Synthetic oligonucleotide
aacagacaccagggagagacag

SEQ ID NO: 139 - DNA, 23 bp, Artificial Sequence
  Description of Artificial Sequence: Synthetic oligonucleotide
aaacagacaccagggagagacag

SEQ ID NO: 140 - DNA, 20 bp, Artificial Sequence
  Description of Artificial Sequence: Synthetic oligonucleotide
cagacaccagggagagacag

SEQ ID NO: 141 - DNA, 21 bp, Artificial Sequence
  Description of Artificial Sequence: Synthetic oligonucleotide
acagacaccagggagagacag

SEQ ID NO: 142 - DNA, 22 bp, Artificial Sequence
  Description of Artificial Sequence: Synthetic oligonucleotide
aacagacaccagggagagacag

SEQ ID NO: 143 - DNA, 23 bp, Artificial Sequence
  Description of Artificial Sequence: Synthetic oligonucleotide
aaacagacaccagggagagacag

SEQ ID NO: 144 - DNA, 18 bp, Artificial Sequence
  Description of Artificial Sequence: Synthetic oligonucleotide
ggaggggtgtgggagaga

SEQ ID NO: 145 - DNA, 18 bp, Artificial Sequence
  Description of Artificial Sequence: Synthetic oligonucleotide
gagatggaggggtgtggg

SEQ ID NO: 146 - DNA, 18 bp, Artificial Sequence
  Description of Artificial Sequence: Synthetic oligonucleotide
ggagagagatggaggggt

SEQ ID NO: 147 - DNA, 18 bp, Artificial Sequence
  Description of Artificial Sequence: Synthetic oligonucleotide
ggggagagacacgtggga

SEQ ID NO: 148 - DNA, 18 bp, Artificial Sequence
  Description of Artificial Sequence: Synthetic oligonucleotide
ggtgaggggagagacacg

SEQ ID NO: 149 - DNA, 18 bp, Artificial Sequence
  Description of Artificial Sequence: Synthetic oligonucleotide
gagaaggtgaggggagag

SEQ ID NO: 150 - DNA, 18 bp, Artificial Sequence
  Description of Artificial Sequence: Synthetic oligonucleotide
ggggagagaaggtgaggg

SEQ ID NO: 151 - DNA, 18 bp, Artificial Sequence
  Description of Artificial Sequence: Synthetic oligonucleotide
tggagggggagagaaggt

SEQ ID NO: 152 - DNA, 18 bp, Artificial Sequence
  Description of Artificial Sequence: Synthetic oligonucleotide
agaaatggagggggagag

SEQ ID NO: 153 - DNA, 18 bp, Artificial Sequence
  Description of Artificial Sequence: Synthetic oligonucleotide
gagagagaaatggagggg

SEQ ID NO: 154 - DNA, 18 bp, Artificial Sequence
  Description of Artificial Sequence: Synthetic oligonucleotide
aagggggccatggcagag

SEQ ID NO: 155 - DNA, 18 bp, Artificial Sequence
  Description of Artificial Sequence: Synthetic oligonucleotide
tgaagaagggggccatgg

SEQ ID NO: 156 - DNA, 18 bp, Artificial Sequence
  Description of Artificial Sequence: Synthetic oligonucleotide
ctgcttgaagaagggggc

SEQ ID NO: 157 - DNA, 18 bp, Artificial Sequence
  Description of Artificial Sequence: Synthetic oligonucleotide
ggggtgagagagacaggg

SEQ ID NO: 158 - DNA, 18 bp, Artificial Sequence
  Description of Artificial Sequence: Synthetic oligonucleotide
aaacaggggtgagagaga

SEQ ID NO: 159 - DNA, 18 bp, Artificial Sequence
  Description of Artificial Sequence: Synthetic oligonucleotide
tgtggaaacaggggtgag

SEQ ID NO: 160 - DNA, 18 bp, Artificial Sequence
  Description of Artificial Sequence: Synthetic oligonucleotide
ggggtggtaggaggtgag

SEQ ID NO: 161 - DNA, 18 bp, Artificial Sequence
  Description of Artificial Sequence: Synthetic oligonucleotide
tgaggggggtggtaggag

SEQ ID NO: 162 - DNA, 18 bp, Artificial Sequence
  Description of Artificial Sequence: Synthetic oligonucleotide
catgctgaggggggtggt

SEQ ID NO: 163 - DNA, 18 bp, Artificial Sequence
  Description of Artificial Sequence: Synthetic oligonucleotide
gggaacatgctgaggggg

SEQ ID NO: 164 - DNA, 18 bp, Artificial Sequence
  Description of Artificial Sequence: Synthetic oligonucleotide
gggagagagatggagggg

SEQ ID NO: 165 - DNA, 18 bp, Artificial Sequence
  Description of Artificial Sequence: Synthetic oligonucleotide
agggaacatgctgagggg

SEQ ID NO: 166 - DNA, 1809 bp, Homo sapiens
gtgagactgggaacgctgggctggggggccagggtcgggggaattatgtgttcatctgttcatctatctgtccatcctcaaagaggactgagcaccatttatgggcaaagcattgttctaggcgctatagagcaaacaggtgaaagaggcctggtccctgccctcagagggcctccaccagaatggggacaaattagaagaaaaaaaaaaaaagccacagagccataatggtgtgtaagtgctgagtaagggtccccccaacctctgtgtgacataaggtcagagagaaggcagagctttgagataagtggggaagaggtgcccccttgggtaggctttgaagactggtttaggttctgatatatggacatagttggcaagaaagacatttcagaagaaggctgtgagaaaggcacatgtgtgatggtgaaaaggcccaggagttttcaggggacattaaagtaggttagtagcaattacatcaggtttagtggagcatgtgcctcataatggggagtggcgggagagatgtctgggcaggaagattagctttagaaactggaaggcctcaaggagtctgaggtcattggtaggccttgggatgccattaaaggtgtcagaaatattgtgatttagaagattaatccataggctgggcacggtggctcacacctgtaataccagcactttgggaggctgaggcgggcagaccacctgaggtcaggagtttgagaccaggctgaccaacatggagaaaccctgtctctactaaaaatacaaaattagccagatgtggtggcacatgcctgtaatcccagctattcgggaggctaaggcaggagaatcacttgaatctgggaggtggaggttgtagtgagccgagatcacacgattgcactctagcctgggcaacaagagtgaaactccatctcaaaaaaaaaaaattaatccataagtagagtgtatgtagtagagtagagggatgtatgttgggggatgactggaatagagccagctgggggctcggaggcatgaaagtcagatcctgaatcagaacagtgacagaagttaggaaggagctactggaaggaccctctcgggaaaggatcagtaggaattgtcagcttattggaaaggagggagcatgtctgtggggagtcacggatgactcaagaggccatgaggctggtggttgggagaccggtggcctcattgacaaccaggaaagtcaggaggaggagccagttggaggtgtgggggcgatggtgagctctgctttacaccagccgagtttaaggtgtcagtgggacattgaagtggaactgggaggtgcggggagtgagctctgagccattccagggactggggatcatgcctggggcacctccatccccatttccctggaatccagaagagttggggggtccgagctccctgtacctcaagtgaccctccatctctctcccatctctgtctctccctggtgtctgtttttcttctcctcctctccttgtctctctcccacacccctccatctctctcccacgtgtctctcccctcaccttctctccccctccatttctctctccctaatctgtctgttccctctgccatggcccccttcttcaagcagcctcccatcttgctcctgcggtccctccttccctgtctctctcacccctgtttccacaccctcacctcctaccacccccctcagcatgttccctggaagctgagggtctctggggctcagtcccggtctctctctttctctctctctctctctgtctccccgacccttccccccag

SEQ ID NO: 167 - DNA, 1633 bp, Homo sapiens
gtgagactgggaacgctgggctggggggccagggtcgggggaattatgtgttcatctgttcatctatctgtccatcctcaaagaggactgagcaccatttatgggcaaagcattgttctaggcgctatagagcaaacaggtgaaagaggcctggtccctgccctcagagggcctccaccagaatggggacaaattagaagaaaaaaaaaaaaagccacagagccataatggtgtgtaagtgctgagtaagggtccccccaacctctgtgtgacataaggtcagagagaaggcagagctttgagataagtggggaagaggtgcccccttgggtaggctttgaagactggtttaggttctgatatatggacatagttggcaagaaagacatttcagaagaaggctgtgagaaaggcacatgtgtgatggtgaaaaggcccaggagttttcaggggacattaaagtaggttagtagcaattacatcaggtttagtggagcatgtgcctcataatggggagtggcgggagagatgtctgggcaggaagattagctttagaaactggaaggcctcaaggagtctgaggtcattggtaggccttgggatgccattaaaggtgtcagaaatattgtgatttagaagattaatccataggctgggcacggtggctcacacctgtaataccagcactttgggaggctgaggcgggcagaccacctgaggtcaggagtttgagaccaggctgaccaacatggagaaaccctgtctctactaaaaatacaaaattagccagatgtggtggcacatgcctgtaatcccagctattcgggaggctaaggcaggagaatcacttgaatctgggaggtggaggttgtagtgagccgagatcacacgattgcactctagcctgggcaacaagagtgaaactccatctcaaaaaaaaaaaattaatccataagtagagtgtatgtagtagagtagagggatgtatgttgggggatgactggaatagagccagctgggggctcggaggcatgaaagtcagatcctgaatcagaacagtgacagaagttaggaaggagctactggaaggaccctctcgggaaaggatcagtaggaattgtcagcttattggaaaggagggagcatgtctgtggggagtcacggatgactcaagaggccatgaggctggtggttgggagaccggtggcctcattgacaaccaggaaagtcaggaggaggagccagttggaggtgtgggggcgatggtgagctctgctttacaccagccgagtttaaggtgtcagtgggacattgaagtggaactgggaggtgcggggagtgagctctgagccattccagggactggggatcatgcctggggcacctccatccccatttccctggaatccagaagagttggggggtccgagctccctgtacctcaagtgaccctccatctctctcccatctctgtctctccctggtgtctgtttttcttctcctcctctccttgtctctctcccacacccctccatctctctcccacgtgtctctcccctcaccttctctccccctccatttctctctccctaatctgtctgttccctctgccatggcccccttcttcaagcag

SEQ ID NO: 168 - DNA, 237 bp, Homo sapiens
cgtgttcccgagggagctgaaggaggtgtttgcttcgtggcggctgcgctgcgcagagcgaggccgggaggacatcgcagacaggcttatcagcgcctcactcttcctgcgcttcctctgcccagcgattatgtcgcccagtctctttgggcttatgcaggagtacccagatgagcagacctcacgaaccctcaccctcattgccaaggtcatccagaacctggccaacttttccaa

SEQ ID NO: 169 - DNA, 413 bp, Homo sapiens
cctcccatcttgctcctgcggtccctccttccctgtctctctcacccctgtttccacaccctcacctcctaccacccccctcagcatgttccctggaagctgagggtctctggggctcagtcccggtctctctctttctctctctctctctctgtctccccgacccttccccccagcgtgttcccgagggagctgaaggaggtgtttgcttcgtggcggctgcgctgcgcagagcgaggccgggaggacatcgcagacaggcttatcagcgcctcactcttcctgcgcttcctctgcccagcgattatgtcgcccagtctctttgggcttatgcaggagtacccagatgagcagacctcacgaaccctcaccctcattgccaaggtcatccagaacctggccaacttttccaa

SEQ ID NO: 170 - DNA, 132 bp, Homo sapiens
gatggccatctatggctaccggcatcccctggaggagaaggacctctggtccctaaaggaagaggacagatcccagatggtggtgcagcagctgctggaggcatggaggaagcaggaaaagcagacggcacg

SEQ ID NO: 171 - DNA, 187 bp, Homo sapiens
gctgctaaaccctgaccctctgcggggctgcctgccgggcttcacctccccccaggatggccatctatggctaccggcatcccctggaggagaaggacctctggtccctaaaggaagaggacagatcccagatggtggtgcagcagctgctggaggcatggaggaagcaggaaaagcagacggcacg

SEQ ID NO: 172 - DNA, 740 bp, Homo sapiens
gtgagttggctcttccaccagccaggccagagggaggggagggatggaaggtgagatggagaaaggggagcagggcagcagtttagggaccgggctggccacctatcccaccccccaccgcagtgggcacagggcagatgagggtagggaagtggtctgggagggggaccaaatgcagaggcctggcctggcccagtgccgcccccaggctacaggccagccctgcatctggcaggctgtggggacaggcccaggaggctggaagaagactgtcattagttctgagctcctctgtttgtgataaacttgcagcctgtcatctccttggctgcgcctcagagcggcttgagcaggataactgtgtctgtgacctgggtgacagctcattaaccccacagcactgaggaagcacccgaggctggggccaaattgcccaggcctcgtcctcacccagggccccaggcagcgtggattccatcaccagggcctggggtggggaggagatgggacacctggggaggaggaggagaagggggtagtggtaggaacttcggagggagagccagtgacctcaagcctattcactgaggaaatgaaggagacacctttcatggtcacagtgcccgagggagaccctcctttctggagaccctggggccctggagacactgacccttggctccaggctgctaaaccctgaccctctgcggggctgcctgccgggcttcacctccccccag

SEQ ID NO: 173 - DNA, 685 bp, Homo sapiens
gtgagttggctcttccaccagccaggccagagggaggggagggatggaaggtgagatggagaaaggggagcagggcagcagtttagggaccgggctggccacctatcccaccccccaccgcagtgggcacagggcagatgagggtagggaagtggtctgggagggggaccaaatgcagaggcctggcctggcccagtgccgcccccaggctacaggccagccctgcatctggcaggctgtggggacaggcccaggaggctggaagaagactgtcattagttctgagctcctctgtttgtgataaacttgcagcctgtcatctccttggctgcgcctcagagcggcttgagcaggataactgtgtctgtgacctgggtgacagctcattaaccccacagcactgaggaagcacccgaggctggggccaaattgcccaggcctcgtcctcacccagggccccaggcagcgtggattccatcaccagggcctggggtggggaggagatgggacacctggggaggaggaggagaagggggtagtggtaggaacttcggagggagagccagtgacctcaagcctattcactgaggaaatgaaggagacacctttcatggtcacagtgcccgagggagaccctcctttctggagaccctggggccctggagacactgacccttggctccag

SEQ ID NO: 174 - DNA, 104 bp, Homo sapiens
gacgagccgaccacaggcatggaccccagcgcgcggcgcttcctttggaacagccttttggccgtggtgcgggagggccgttcagtgatgctcacctcccatag

SEQ ID NO: 175 - DNA, 140 bp, Homo sapiens
gacgagccgaccacaggcatggaccccagcgcgcggcgcttcctttggaacagccttttggccgtggtgcgggagggccgttcagtgatgctcacctcccataggtgggccgggctctgatgccctgggctgtggttaag

SEQ ID NO: 176 - DNA, 297 bp, Homo sapiens
gtgggccgggctctgatgccctgggctgtggttaaggtgatccaggcctggagagagagccccaaagcacaaggccacaggggatggggggtcctggccctagtggggcgagggcgccaggccccggggtgtaaggacacacagaggtgggacgcggcgccgggatcagaacggtctggggaagagtggggagatgtccacaccagaagggtggcccaggccgggggaagcaggcagtgtggcgccaggcacaggtggccccggcctcacggagctcgtggtgccgggtcccgacag

SEQ ID NO: 177 - DNA, 261 bp, Homo sapiens
gtgatccaggcctggagagagagccccaaagcacaaggccacaggggatggggggtcctggccctagtggggcgagggcgccaggccccggggtgtaaggacacacagaggtgggacgcggcgccgggatcagaacggtctggggaagagtggggagatgtccacaccagaagggtggcccaggccgggggaagcaggcagtgtggcgccaggcacaggtggccccggcctcacggagctcgtggtgccgggtcccgacag

SEQ ID NO: 178 - DNA, 132 bp, Homo sapiens; identical to SEQ ID NO: 170

SEQ ID NO: 179 - DNA, 187 bp, Homo sapiens; identical to SEQ ID NO: 171

SEQ ID NO: 180 - DNA, 740 bp, Homo sapiens; identical to SEQ ID NO: 172

SEQ ID NO: 181 - DNA, 685 bp, Homo sapiens; identical to SEQ ID NO: 173

SEQ ID NO: 182 - DNA, 357 bp, Homo sapiens
agtttgtttctaatggaagaggttcacatgataaagaacaaaccagccagtcctcacatcaagatagagatgaaaaatgccaccttggcatgggactcctcccactccagtatccagaactcgcccaagctgacccccaaaatgaaaaaagacaagagggcttccaggggcaagaaagagaaggtgaggcagctgcagcgcactgagcatcaggcggtgctggcagagcagaaaggccacctcctcctggacagtgacgagcggcccagtcccgaagaggaagaaggcaagcacatccacctgggccacctgcgcttacagaggacactgcacagcatcgatctggagatccaagag

SEQ ID NO: 183 - DNA, 472 bp, Homo sapiens
cttccttccactgtatagcctgatgtgttttgctacgtgagtgtacgccctaggcttgtctccctggtcttgatccagtgtctcatctttgcacctctctcacaactcctatcagagtttgtttctaatggaagaggttcacatgataaagaacaaaccagccagtcctcacatcaagatagagatgaaaaatgccaccttggcatgggactcctcccactccagtatccagaactcgcccaagctgacccccaaaatgaaaaaagacaagagggcttccaggggcaagaaagagaaggtgaggcagctgcagcgcactgagcatcaggcggtgctggcagagcagaaaggccacctcctcctggacagtgacgagcggcccagtcccgaagaggaagaaggcaagcacatccacctgggccacctgcgcttacagaggacactgcacagcatcgatctggagatccaagag

SEQ ID NO: 184 - DNA, 5597 bp, Homo sapiens
gtaagtggctccttcccctgcccccgtgtcaggagccctccccacacaactaactgctggctctgttcaaggggccacccaggctggcctcactgggcttaagcttggctttggccttttggcaagttggtaagaaaaagggggcagtggaggagactgaattgagggatgagacttgtcaccttttttaattaatgtgaatttttaccttttgtgaacggccatgatctgggctcccaggattgcagagttcccctttagagctagccccttccacctgggcctgacatggatgtgtcgcaactcactgggccttgaagtggcttaaacctagaagaccagcactgtggggcatcttccccttgatctttgctactgtcactttgattgattgacatgctgaatcctttttgatactttctttttcctgccctgtggtgctactcacgatgcagggaaagcagttacatggaaatagtcataaaactaggtcatgttgagaagtgcagttaagtaagtctcagcttcttttcttgcaggtggttagttgatcataccttggctgtgttctttgttccttcagaatactacacatacatgatacaaaagggagtatatttgggagggtggagagaaatagatatttgatagtggttaatacttaacaaaaaaagggatgccatgtgggctggaattccttgatgttgccactgcatagattagctcctatgtccctgcttgtctttattggccagtgagaggaataagaaagcaattttggtgatgtgaaggcttgaagctcacatgtttgagggatgaatataatcatcttggaggttcaggagaaaacaaattggattttcttcttaagaaacatggaaactcagttcccgagatttgtttgtattctacttgtttacagttgaccgggtgacttttatttggtcaagaaagctagtcctggctgggtgtggtggctcacacctgtaatcccagctctttgggaggctgaggcaggtggctcacttgagcccaggagttcaagaccagcctgggcaacacagcaagaccccgtctctacaaaaaaataaaaaaatagccaggtgcagtggtgtgcgcccacagtcctagctacccggggggctgaggtgggaagattgcttgagcccaggaggtcgagcctgcagtgagttatgatcatggcactgcactccagcctgggcaacagaatgagactcttatctgtgtttttgtttttttttgttgttgtttgtttgtttcttacaaaaagagaagaaagaaaaaggaagggagggagggaagagagagaaggaaggaaggagagaagagagaaaggaagaaagctagtcttcgaatgtgcccctcccccaccccaacgtggccacttcttagaaaaccaagagctgagtcatatgaaaaaaaatggcctaatgggactcagagctttattttgctgaatccgcaataaccagtcgtggatgaaagcaaatgtttgaccataagttctccctgctgttcatttctatattcttgttagtgaatggatttggtagcactttggataaagtaagggcatgtagtgtaggttggtcctccccttgtttttcgagggctctcatctcctgcttattagtgaggacttggattagcaggtggctttcacatcataggtccctcctctctccaggaagcctcagaattaatagtagaagcagcaccacccacagctctatttgatgccccatgagactttagaccccttctatcttacttctcttggtggtctcagtctctttttttccttgttattctttttttaattagatgcttggcacaagataacaagtatttatggccagccttggtggctcacgcctgtaatcccaacactttgggaggctgaggtggttggatcacttgaggtcaggagttcaagaccagcctggccaacatggtaaaaccctgtctctactaaaaatccaaaaaattagccaggtgtggtggtgtgtgcctgtagtcccagctactcgggaggctgaggcaggagaatcgcttgaacctgggaggtaggggttgccatgagtcgagatcgcgccactgcactccagcctgggcaacacagcgagactctgtctcagaaaaaaaaagataacgagtgtttattacttaattcctcccgaactctaagccggttctttcttcttatcttcagatgtctattaattagaattacattgactttatgagggttggggggctgttttttaggtgtaaggcaactgtttattatgtttctgagtacgttaaaggaagtttgcctcaatcttgggggaccatctaaggcagccttttgaaaacaacagaactgttcctgggattgtatctccccaaaagcatctgccctctcatcatttttagaagatggaatatagaataacaaggatgagacttgcttctttgattcattttacagaccttgaaactcactgacgatgttgcagagccctgcttttcaccctgtgtcttgttttacatcattttctttctttcttttttaaattggagttggagatctgacagatttgcaagtatagtcttttctctatttcacctaccctgcaagtgcatatggcaggagaacttgttgcttcctgttgggtagtatgcataaagaataggaaaagagatataaaatttatttatgtaacctgtaatttattgatttgataacctgtagaaaggcagtgtgaagctgcactgattgtcaccagtggaatagggtggcttgctctagcaaatacagacacaggacacccagtgaaatactgcatggaatatacttatactgaaaaattattattgtttttctggaattaaatttaacgggggcccggcatggtggctcacgcctgtaatcctaagcactttgggaggctgagcaggtggatctcttgaggccaggagttcgagaccagcctggccaacattatgaaaccccgtctctactaaaaatacaaaaattagctgggtgtggtggtgggcacctgtaatcccagctactcaggagggctgacacaggagaatggcatgaacctgggaggcagaggttgcagtgagctgagattgcgccactgcattccagcctgggtgacagagtgagatcctgtctcaaaaaataaataaatacattaattaattaatttaactgggcatcttatatttatctggcaaccctgtgagtagtcccctcttctgttctcaacagattcattctgatttgattcttctagtgaatgaatagtgttttcatggtcagtgtcctgtgataaagttgaggcttatggtttataggtttatatggttataggtttatgttatatctaagattctgttgttctgacaggtgcaaattcaagtagatacaagttcaagtatggggaggcccttctctgcctcttagcacgtcagggcagagtgatctgaagccgaaactctcctggtagaagggagggtaaggctgcggggagtaggaaggaaacatggggctggagctgtgaaaaccagtaggtactggcatgtttcttaatagttcattgaggcctaaaagaccttcatcctttgaataactctttaagggagagaaatgatggaaattctgtcggcatgtggttttactctgtgaaggtgatcaaaatgtttggcatgttactcttagttcaatctctcaggaaggctttgaacaaatgaaagcagcagccatttcagcaagcgggggccacacctaaggttactcgagagtgaagattatctcagaagtttagaatcatgacacttcggggaagataggatcagggatgaatgggagacgggggcttaagggagagcttagaagtttagaatctaagagagaaagggtttgtttttggggagagggattatgtatgatatttaatagcacctgcaaactttaagatagctggggggttctcagtaactaaggagggtcctgaccctaaaagctatcttttctctaaagattttgtaatgtttaaaatttttttaaattaagataaatatattttaaatcatactgtgaatccaactggtatagcattctgtagagaagatcactggcttaagaggattgttagaaggtggctcacacctgtaatcccagcactttgggaggctgaggcgggtggatcacgaggtcaggagatctagacatcctggctaatatagtgaaaccctgtctctactaaaaatacaaaaaattagccaggcgtggtggcgggcacctgtagtcccagctactcgggaagctgaggcaggaaaatggcgtgaactcaggaggcggagcttgcaatgagccgagattgcaccactgcactccagcctgggcgacacagcgagactccatctcaccaaaaaaaaaaaaaaaaaaaagtggattcaaagtcttacgggaaaatcctgggctgtgatttattgtgatcagtgttttacatcttaatttcagaaacatttccctcttcaagagttcattcttcagctgggtgcggtggctcacgcctgtaatcccagcactttgggaggctgaggcaggcagatcacttgagcccaggagctcaagaccagcctggccaacatagtgaaaccccatctctacaaaaaaatacaaaaattagccgggcatggtggcacgtgcctgtaatttcagctacttgggaggctgaggcatcagaatctcttgaacctgggaggtggaggttgcagtgagtcgagatcgtgccactgcactcctatctgggcaacagagcgagactccatctcaaaaaaaaaattatttttcttttaacataactcaggggtctctgggaatgagtgggaggaaagtgtcttgttctcttcccaagggttgtttctcagggagatacccttcacttccatgcaagcctgttcctttggttgtttgaactctcaagttccaaggcaaggctttgaagacatgagagtttcttggcaagaagatgttctctgcggtagatgaaactttagatactcttttctgacggtagcaatgtaagcctgtgacagtctctactcctagatacatgcggcgctgtgagtgtgggaagtgggcaggctttggcattctgcaggaggggtctggaaggaaaacacgtagtgagcatctgtactggaggtcagcatgccctttgcttttcctacctgctttttactactccttagaacaaggggctacgtgccagtcagttaaatgtcattaggtccgctttaggctggctgagggggaaaggcagtttagcatgtaatttgtcatgtggaatattgggtcattgataaggcccctggacctcttgaggttgccccacactcccgtgaccccttgatgggcctgagattgggctgcactaatgagctaccttttgcccttcagcttccttccactgtatagcctgatgtgttttgctacgtgagtgtacgccctaggcttgtctccctggtcttgatccagtgtctcatctttgcacctctctcacaactcctatcag

SEQ ID NO: 185 - DNA, 5482 bp, Homo sapiens
gtaagtggctccttcccctgcccccgtgtcaggagccctccccacacaactaactgctggctctgttcaaggggccacccaggctggcctcactgggcttaagcttggctttggccttttggcaagttggtaagaaaaagggggcagtggaggagactgaattgagggatgagacttgtcaccttttttaattaatgtgaatttttaccttttgtgaacggccatgatctgggctcccaggattgcagagttcccctttagagctagccccttccacctgggcctgacatggatgtgtcgcaactcactgggccttgaagtggcttaaacctagaagaccagcactgtggggcatcttccccttgatctttgctactgtcactttgattgattgacatgctgaatcctttttgatactttctttttcctgccctgtggtgctactcacgatgcagggaaagcagttacatggaaatagtcataaaactaggtcatgttgagaagtgcagttaagtaagtctcagcttcttttcttgcaggtggttagttgatcataccttggctgtgttctttgttccttcagaatactacacatacatgatacaaaagggagtatatttgggagggtggagagaaatagatatttgatagtggttaatacttaacaaaaaaagggatgccatgtgggctggaattccttgatgttgccactgcatagattagctcctatgtccctgcttgtctttattggccagtgagaggaataagaaagcaattttggtgatgtgaaggcttgaagctcacatgtttgagggatgaatataatcatcttggaggttcaggagaaaacaaattggattttcttcttaagaaacatggaaactcagttcccgagatttgtttgtattctacttgtttacagttgaccgggtgacttttatttggtcaagaaagctagtcctggctgggtgtggtggctcacacctgtaatcccagctctttgggaggctgaggcaggtggctcacttgagcccaggagttcaagaccagcctgggcaacacagcaagaccccgtctctacaaaaaaataaaaaaatagccaggtgcagtggtgtgcgcccacagtcctagctacccggggggctgaggtgggaagattgcttgagcccaggaggtcgagcctgcagtgagttatgatcatggcactgcactccagcctgggcaacagaatgagactcttatctgtgtttttgtttttttttgttgttgtttgtttgtttcttacaaaaagagaagaaagaaaaaggaagggagggagggaagagagagaaggaaggaaggagagaagagagaaaggaagaaagctagtcttcgaatgtgcccctcccccaccccaacgtggccacttcttagaaaaccaagagctgagtcatatgaaaaaaaatggcctaatgggactcagagctttattttgctgaatccgcaataaccagtcgtggatgaaagcaaatgtttgaccataagttctccctgctgttcatttctatattcttgttagtgaatggatttggtagcactttggataaagtaagggcatgtagtgtaggttggtcctccccttgtttttcgagggctctcatctcctgcttattagtgaggacttggattagcaggtggctttcacatcataggtccctcctctctccaggaagcctcagaattaatagtagaagcagcaccacccacagctctatttgatgccccatgagactttagaccccttctatcttacttctcttggtggtctcagtctctttttttccttgttattctttttttaattagatgcttggcacaagataacaagtatttatggccagccttggtggctcacgcctgtaatcccaacactttgggaggctgaggtggttggatcacttgaggtcaggagttcaagaccagcctggccaacatggtaaaaccctgtctctactaaaaatccaaaaaattagccaggtgtggtggtgtgtgcctgtagtcccagctactcgggaggctgaggcaggagaatcgcttgaacctgggaggtaggggttgccatgagtcgagatcgcgccactgcactccagcctgggcaacacagcgagactctgtctcagaaaaaaaaagataacgagtgtttattacttaattcctcccgaactctaagccggttctttcttcttatcttcagatgtctattaattagaattacattgactttatgagggttggggggctgttttttaggtgtaaggcaactgtttattatgtttctgagtacgttaaaggaagtttgcctcaatcttgggggaccatctaaggcagccttttgaaaacaacagaactgttcctgggattgtatctccccaaaagcatctgccctctcatcatttttagaagatggaatatagaataacaaggatgagacttgcttctttgattcattttacagaccttgaaactcactgacgatgttgcagagccctgcttttcaccctgtgtcttgttttacatcattttctttctttcttttttaaattggagttggagatctgacagatttgcaagtatagtcttttctctatttcacctaccctgcaagtgcatatggcaggagaacttgttgcttcctgttgggtagtatgcataaagaataggaaaagagatataaaatttatttatgtaacctgtaatttattgatttgataacctgtagaaaggcagtgtgaagctgcactgattgtcaccagtggaatagggtggcttgctctagcaaatacagacacaggacacccagtgaaatactgcatggaatatacttatactgaaaaattattattgtttttctggaattaaatttaacgggggcccggcatggtggctcacgcctgtaatcctaagcactttgggaggctgagcaggtggatctcttgaggccaggagttcgagaccagcctggccaacattatgaaaccccgtctctactaaaaatacaaaaattagctgggtgtggtggtgggcacctgtaatcccagctactcaggagggctgacacaggagaatggcatgaacctgggaggcagaggttgcagtgagctgagattgcgccactgcattccagcctgggtgacagagtgagatcctgtctcaaaaaataaataaatacattaattaattaatttaactgggcatcttatatttatctggcaaccctgtgagtagtcccctcttctgttctcaacagattcattctgatttgattcttctagtgaatgaatagtgttttcatggtcagtgtcctgtgataaagttgaggcttatggtttataggtttatatggttataggtttatgttatatctaagattctgttgttctgacaggtgcaaattcaagtagatacaagttcaagtatggggaggcccttctctgcctcttagcacgtcagggcagagtgatctgaagccgaaactctcctggtagaagggagggtaaggctgcggggagtaggaaggaaacatggggctggagctgtgaaaaccagtaggtactggcatgtttcttaatagttcattgaggcctaaaagaccttcatcctttgaataactctttaagggagagaaatgatggaaattctgtcggcatgtggttttactctgtgaaggtgatcaaaatgtttggcatgttactcttagttcaatctctcaggaaggctttgaacaaatgaaagcagcagccatttcagcaagcgggggccacacctaaggttactcgagagtgaagattatctcagaagtttagaatcatgacacttcggggaagataggatcagggatgaatgggagacgggggcttaagggagagcttagaagtttagaatctaagagagaaagggtttgtttttggggagagggattatgtatgatatttaatagcacctgcaaactttaagatagctggggggttctcagtaactaaggagggtcctgaccctaaaagctatcttttctctaaagattttgtaatgtttaaaatttttttaaattaagataaatatattttaaatcatactgtgaatccaactggtatagcattctgtagagaagatcactggcttaagaggattgttagaaggtggctcacacctgtaatcccagcactttgggaggctgaggcgggtggatcacgaggtcaggagatctagacatcctggctaatatagtgaaaccctgtctctactaaaaatacaaaaaattagccaggcgtggtggcgggcacctgtagtcccagctactcgggaagctgaggcaggaaaatggcgtgaactcaggaggcggagcttgcaatgagccgagattgcaccactgcactccagcctgggcgacacagcgagactccatctcaccaaaaaaaaaaaaaaaaaaaagtggattcaaagtcttacgggaaaatcctgggctgtgatttattgtgatcagtgttttacatcttaatttcagaaacatttccctcttcaagagttcattcttcagctgggtgcggtggctcacgcctgtaatcccagcactttgggaggctgaggcaggcagatcacttgagcccaggagctcaagaccagcctggccaacatagtgaaaccccatctctacaaaaaaatacaaaaattagccgggcatggtggcacgtgcctgtaatttcagctacttgggaggctgaggcatcagaatctcttgaacctgggaggtggaggttgcagtgagtcgagatcgtgccactgcactcctatctgggcaacagagcgagactccatctcaaaaaaaaaattatttttcttttaacataactcaggggtctctgggaatgagtgggaggaaagtgtcttgttctcttcccaagggttgtttctcagggagatacccttcacttccatgcaagcctgttcctttggttgtttgaactctcaagttccaaggcaaggctttgaagacatgagagtttcttggcaagaagatgttctctgcggtagatgaaactttagatactcttttctgacggtagcaatgtaagcctgtgacagtctctactcctagatacatgcggcgctgtgagtgtgggaagtgggcaggctttggcattctgcaggaggggtctggaaggaaaacacgtagtgagcatctgtactggaggtcagcatgccctttgcttttcctacctgctttttactactccttagaacaaggggctacgtgccagtcagttaaatgtcattaggtccgctttaggctggctgagggggaaaggcagtttagcatgtaatttgtcatgtggaatattgggtcattgataaggcccctggacctcttgaggttgccccacactcccgtgaccccttgatgggcctgagattgggctgcactaatgagctaccttttgcccttcag

SEQ ID NO: 186 - DNA, 242 bp, Homo sapiens
aggaggcagctgagagcgaggaggatgacaacctgtcgtccatgctgcaccagcgtgctgagatcccatggcgagcctgcgccaagtacctgtcctccgccggcatcctgctcctgtcgttgctggtcttctcacagctgctcaagcacatggtcctggtggccatcgactactggctggccaagtggaccgacagcgccctgaccctgacccctgcagccaggaactgctccctcagccag

SEQ ID NO: 187 - DNA, 322 bp, Homo sapiens
taagtggggataaaatgccctgattcaccctcagagggatggaaatgtgtagccacagagtgggttcttgcggcctgcagaggaggcagctgagagcgaggaggatgacaacctgtcgtccatgctgcaccagcgtgctgagatcccatggcgagcctgcgccaagtacctgtcctccgccggcatcctgctcctgtcgttgctggtcttctcacagctgctcaagcacatggtcctggtggccatcgactactggctggccaagtggaccgacagcgccctgaccctgacccctgcagccaggaactgctccctcagccag

SEQ ID NO: 188 - DNA, 224 bp, Homo sapiens
gtacaggcaatgggactgggagtgaaattatggcctgaggtctgatcagccacagagaggctaaggtttggggttctgggtgtggtgcagtagtgtgcctttgattaaatggcttccctctgtgtgcccccgttgtcccctcagtaagtggggataaaatgccctgattcaccctcagagggatggaaatgtgtagccacagagtgggttcttgcggcctgcag

SEQ ID NO: 189 - DNA, 144 bp, Homo sapiens
gtacaggcaatgggactgggagtgaaattatggcctgaggtctgatcagccacagagaggctaaggtttggggttctgggtgtggtgcagtagtgtgcctttgattaaatggcttccctctgtgtgcccccgttgtcccctcag

SEQ ID NO: 190 - DNA, 169 bp, Homo sapiens
gtgacggagctggctggctacacagcccgggtgcacgagatgttccaggtatttgaagatgttcagcgctgtcacttcaagaggcccagggagctagaggacgctcaggcggggtctgggaccataggccggtctggtgtccgtgtggagggccccctgaagatccgag

SEQ ID NO: 191 - DNA, 567 bp, Homo sapiens
gtgacggagctggctggctacacagcccgggtgcacgagatgttccaggtatttgaagatgttcagcgctgtcacttcaagaggcccagggagctagaggacgctcaggcggggtctgggaccataggccggtctggtgtccgtgtggagggccccctgaagatccgaggtaaggctgtcccctccctatgagtgaccccgcccctgctgctgctgcaggtgctgacctgctgccccagctcctcctattcccgctccctcactcagggacctccatgtgcttctggcccatcccagtccacccaggacgggagggctgccgggcagggtctttgaggacttcggcctggtcgagctgggcccctggagggtttcctgcagagaggtgctggtccgcccgccttccttcccagacagtagctgccggccaccgtactgactcgccctttgagggcctcagcctggattattcattcaaaacaagggggatgtggtcccctcacccatgcaggacagcaagagaaagttccagtcagtgtgccagctgctggctgccacgggaggcag

SEQ ID NO: 192 - DNA, 643 bp, Homo sapiens
gtaaggctgtcccctccctatgagtgaccccgcccctgctgctgctgcaggtgctgacctgctgccccagctcctcctattcccgctccctcactcagggacctccatgtgcttctggcccatcccagtccacccaggacgggagggctgccgggcagggtctttgaggacttcggcctggtcgagctgggcccctggagggtttcctgcagagaggtgctggtccgcccgccttccttcccagacagtagctgccggccaccgtactgactcgccctttgagggcctcagcctggattattcattcaaaacaagggggatgtggtcccctcacccatgcaggacagcaagagaaagttccagtcagtgtgccagctgctggctgccacgggaggcaggtgctgcagaagggagtggcggcccagggcactgtattagacactgggggaagagttcagcttgttggaagacctggctgtgttccctagggaccctggaccacaggctgctggtcaggaaccagctggcatgctgccagggatgggaatgagggcgtgcagccaggggcacgcagactccccagaatgcagaggggtcgccaccactccctctccaccccagccccgctgtgctgtctctgcag

SEQ ID NO: 193 - DNA, 245 bp, Homo sapiens
gtgctgcagaagggagtggcggcccagggcactgtattagacactgggggaagagttcagcttgttggaagacctggctgtgttccctagggaccctggaccacaggctgctggtcaggaaccagctggcatgctgccagggatgggaatgagggcgtgcagccaggggcacgcagactccccagaatgcagaggggtcgccaccactccctctccaccccagccccgctgtgctgtctctgcag

SEQ ID NO: 194 - DNA, 148 bp, Homo sapiens
ggttgccgagaaggagcccatcaacaaaatgtcacttcacaacctggctaccgtgtttggacccacgttactgagaccctcagaagtggagagcaaagcacacctcacctcggctgcggacatctggtcccatgacgtcatggcgcag

SEQ ID NO: 195 - DNA, 538 bp, Homo sapiens
ggttgccgagaaggagcccatcaacaaaatgtcacttcacaacctggctaccgtgtttggacccacgttactgagaccctcagaagtggagagcaaagcacacctcacctcggctgcggacatctggtcccatgacgtcatggcgcaggtaccctggcaccgcccgggcccgtggctggcggagggtgacggtcccatgacgtcatggcgcaggtaccctggcaccgcccgggcccgtggctggcggagggtgacggtcccatgacgtcatggcgcaggtaccctggcaccgcccgggcccgtggctggcggagggtgacggtcccatgacgtcatggcgtaggtaccctggcaccgcccgggcccgtggctggcggagggtgacggtcccatgacgtcatggcgcaggtaccctggcaccgcccgggcccgtggctggcggagggtgacggtcccatgacgtcatggcgcaggtaccctggcaccgcccgggcccgtggctggcggagggtgacggtcccatgacgtcatggcgcag

SEQ ID NO: 196 - DNA, 473 bp, Homo sapiens
ggttgccgagaaggagcccatcaacaaaatgtcacttcacaacctggctaccgtgtttggacccacgttactgagaccctcagaagtggagagcaaagcacacctcacctcggctgcggacatctggtcccatgacgtcatggcgcaggtaccctggcaccgcccgggcccgtggctggcggagggtgacggtcccatgacgtcatggcgcaggtaccctggcaccgcccgggcccgtggctggcggagggtgacggtcccatgacgtcatggcgcaggtaccctggcaccgcccgggcccgtggctggcggagggtgacggtcccatgacgtcatggcgtaggtaccctggcaccgcccgggcccgtggctggcggagggtgacggtcccatgacgtcatggcgcaggtaccctggcaccgcccgggcccgtggctggcggagggtgacggtcccatgacgtcatggcgcag

SEQ ID NO: 197 - DNA, 408 bp, Homo sapiens
ggttgccgagaaggagcccatcaacaaaatgtcacttcacaacctggctaccgtgtttggacccacgttactgagaccctcagaagtggagagcaaagcacacctcacctcggctgcggacatctggtcccatgacgtcatggcgcaggtaccctggcaccgcccgggcccgtggctggcggagggtgacggtcccatgacgtcatggcgcaggtaccctggcaccgcccgggcccgtggctggcggagggtgacggtcccatgacgtcatggcgcaggtaccctggcaccgcccgggcccgtggctggcggagggtgacggtcccatgacgtcatggcgtaggtaccctggcaccgcccgggcccgtggctggcggagggtgacggtcccatgacgtcatggcgcag

SEQ ID NO: 198 - DNA, 995 bp, Homo sapiens
gtaccctggcaccgcccgggcccgtggctggcggagggtgacggtcccatgacgtcatggcgcaggtaccctggcaccgcccgggcccgtggctggcggagggtgacggtcccatgacgtcatggcgcaggtaccctggcaccgcccgggcccgtggctggcggagggtgacggtcccatgacgtcatggcgtaggtaccctggcaccgcccgggcccgtggctggcggagggtgacggtcccatgacgtcatggcgcaggtaccctggcaccgcccgggcccgtggctggcggagggtgacggtcccatgacgtcatggcgcaggtaccctggcaccgcccgggcccgtggctggcggagggtgacggtcccatgacgtcatggcgcaggtaccctggcaccgcccgggcccgtggctggcggagggtgagaccagccccttaggaggagagagaacagctcagagtccccacacctcttccctcgtgggaagctgggttgatgggctatggggtgtcaccagggaggcaggactgtagacacttctgcccctcccaggccaaaacaaacatgtgagcctagaccagggcccagagatgctggctgcattctcaggagggcctcagtctcagaaagcaagcccaggggtggggagatgctgggcccttgtcctcatgggtggaagctctgaggttgcttccaagggcgggaggcttccctgggattcctgcaagacccagagcaggggccggactgtggccgcctcaggacagagcagaagcttatggccaggttggggaagtggccctaggcccccgaccctctgccccgtagcaccttccacggctgcagaaaggcaaacacacctgggctccccaggaaggggcggtggccggagccagtctagggagtgggaggggcaacacaggctggagtcagcaaggacgaggcctaggacagggagcccagcctccgccttcctgtctccccacag

SEQ ID NO: 199 - DNA, 605 bp, Homo sapiens
gtaccctggcaccgcccgggcccgtggctggcggagggtgagaccagccccttaggaggagagagaacagctcagagtccccacacctcttccctcgtgggaagctgggttgatgggctatggggtgtcaccagggaggcaggactgtagacacttctgcccctcccaggccaaaacaaacatgtgagcctagaccagggcccagagatgctggctgcattctcaggagggcctcagtctcagaaagcaagcccaggggtggggagatgctgggcccttgtcctcatgggtggaagctctgaggttgcttccaagggcgggaggcttccctgggattcctgcaagacccagagcaggggccggactgtggccgcctcaggacagagcagaagcttatggccaggttggggaagtggccctaggcccccgaccctctgccccgtagcaccttccacggctgcagaaaggcaaacacacctgggctccccaggaaggggcggtggccggagccagtctagggagtgggaggggcaacacaggctggagtcagcaaggacgaggcctaggacagggagcccagcctccgccttcctgtctccccacag

SEQ ID NO: 200 - DNA, 670 bp, Homo sapiens
gtaccctggcaccgcccgggcccgtggctggcggagggtgacggtcccatgacgtcatggcgcaggtaccctggcaccgcccgggcccgtggctggcggagggtgagaccagccccttaggaggagagagaacagctcagagtccccacacctcttccctcgtgggaagctgggttgatgggctatggggtgtcaccagggaggcaggactgtagacacttctgcccctcccaggccaaaacaaacatgtgagcctagaccagggcccagagatgctggctgcattctcaggagggcctcagtctcagaaagcaagcccaggggtggggagatgctgggcccttgtcctcatgggtggaagctctgaggttgcttccaagggcgggaggcttccctgggattcctgcaagacccagagcaggggccggactgtggccgcctcaggacagagcagaagcttatggccaggttggggaagtggccctaggcccccgaccctctgccccgtagcaccttccacggctgcagaaaggcaaacacacctgggctccccaggaaggggcggtggccggagccagtctagggagtgggaggggcaacacaggctggagtcagcaaggacgaggcctaggacagggagcccagcctccgccttcctgtctccccacag

SEQ ID NO: 201 - DNA, 735 bp, Homo sapiens
gtaccctggcaccgcccgggcccgtggctggcggagggtgacggtcccatgacgtcatggcgcaggtaccctggcaccgcccgggcccgtggctggcggagggtgacggtcccatgacgtcatggcgcaggtaccctggcaccgcccgggcccgtggctggcggagggtgagaccagccccttaggaggagagagaacagctcagagtccccacacctcttccctcgtgggaagctgggttgatgggctatggggtgtcaccagggaggcaggactgtagacacttctgcccctcccaggccaaaacaaacatgtgagcctagaccagggcccagagatgctggctgcattctcaggagggcctcagtctcagaaagcaagcccaggggtggggagatgctgggcccttgtcctcatgggtggaagctctgaggttgcttccaagggcgggaggcttccctgggattcctgcaagacccagagcaggggccggactgtggccgcctcaggacagagcagaagcttatggccaggttggggaagtggccctaggcccccgaccctctgccccgtagcaccttccacggctgcagaaaggcaaacacacctgggctccccaggaaggggcggtggccggagccagtctagggagtgggaggggcaacacaggctggagtcagcaaggacgaggcctaggacagggagcccagcctccgccttcctgtctccccacag

SEQ ID NO: 202 - DNA, 222 bp, Homo sapiens
atcagacgtgtgtgtgtccctgcggcgctaagaaggggagactgaggctgaggctggggaacatcgggcagcatgagcggctgcgggctcttcctgcgcaccacggctgcggctcgtgcctgccggggtctggtggtctctaccgcgaaccggcggctactgcgcaccagcccgcctgtacgagctttcgccaaagagcttttcctaggcaaaatcaagaag

SEQ ID NO: 203 - DNA, 213 bp, Homo sapiens
gtgtgtgtccctgcggcgctaagaaggggagactgaggctgaggctggggaacatcgggcagcatgagcggctgcgggctcttcctgcgcaccacggctgcggctcgtgcctgccggggtctggtggtctctaccgcgaaccggcggctactgcgcaccagcccgcctgtacgagctttcgccaaagagcttttcctaggcaaaatcaagaag

SEQ ID NO: 204 - DNA, 398 bp, Homo sapiens
atcagacgtgtgtgtgtccctgcggcgctaagaaggggagactgaggctgaggctggggaacatcgggcagcatgagcggctgcgggctcttcctgcgcaccacggctgcggctcgtgcctgccggggtctggtggtctctaccgcgaaccggcggctactgcgcaccagcccgcctgtacgagctttcgccaaagagcttttcctaggcaaaatcaagaaggtaacgcgagccctgggcgaacccttgctgtctggctcccgcttttcaccctcagctgcaagactggtgttgaactttgtgagattccccaaacctgccagagagatacaccctgcggccgaggcgtgttaacactccggattcctgagttccaggaaaaccttcccagagaaagg

SEQ ID NO: 205 - DNA, 389 bp, Homo sapiens
gtgtgtgtccctgcggcgctaagaaggggagactgaggctgaggctggggaacatcgggcagcatgagcggctgcgggctcttcctgcgcaccacggctgcggctcgtgcctgccggggtctggtggtctctaccgcgaaccggcggctactgcgcaccagcccgcctgtacgagctttcgccaaagagcttttcctaggcaaaatcaagaaggtaacgcgagccctgggcgaacccttgctgtctggctcccgcttttcaccctcagctgcaagactggtgttgaactttgtgagattccccaaacctgccagagagatacaccctgcggccgaggcgtgttaacactccggattcctgagttccaggaaaaccttcccagagaaagg

SEQ ID NO: 206 - DNA, 4811 bp, Homo sapiens
gtaacgcgagccctgggcgaacccttgctgtctggctcccgcttttcaccctcagctgcaagactggtgttgaactttgtgagattccccaaacctgccagagagatacaccctgcggccgaggcgtgttaacactccggattcctgagttccaggaaaaccttcccagagaaagggtgagacatttccaagacgggggacccttggaaatgtggtggtgacgtgttccagctaaattttgtcaggggaattcggaaaactctaggctaggtaattaacaaagcagccttcatctcagctggtctggtctggaaatgtgcggggcttcctctctgattcctaaacagcttacaccatgtccctcctcagtcaccttccagcgccctggggcttccttccccaggtgagcccagcgcctctccctgccattgaggttcctcagaaatctggctccaagatgcttcccaagggtggcacaacccagccaatagtaacagtttggttataaaacactcattgtcttcttagagttggaagacttgggtttggtcttggctcgttgactttgaaactcagttgttttttttgagacagagtcgcgctcttgtcgcccaggctggagtgctcactgcaacctccctcctgggttcaagcgattctcctgcctcagcctccggagtagctgggattacaggcgcctgcccggctttttttttttttgtatttttagcagagacggggtttcaccatgttggccaagctggtctagaactgacctcgggtgatccgcccacctcggcctcccacagtgctgggattacaggggtgagccaccgcgcccggccaagactcagttctttcagccttaaaatggagatagtgttgtgtctccttcacagatgtgttgtagagccccagtgagataaacggtgcatggagagtcttcttaaactgtagagtactgtgcagcagaagagagagctggcttcaacacttagtcttgtgaccttggagctgacggctgcacctccctgtgcctcagtgcattcatctacaaaataggaataaacacatttcttgctctttcctttgtatttcattttatcttctaaggaaaccaacagtatacttgctatttcgtcgaggtgccctactttgaacttggctgaatgttggctgatcctgtatcacagaagttattccctggcttctctttggaacgttcctctgaggttgtcaggctgatacctttatagcaagcaactttacagatgaagaagctaagactcagactaaaagcagtttgcccagctagaaagtgcggagctatgtcttgaacatattggaaaaccttttacccaggacctggggcagtgtggtgctctatcctgggacttcctgctatccagcagcatggtgaagaaagaacacagatctttcagatctgtttccatctttaaacctctggcactacctgccctgccctgcctttactctcagctgtcagctttgcttcccattccactgggaaaatccatgcagtcggatgagaagttcacaggcacagttaccccctcccgctgcatatgtgccggtattatctacattctgttactgtgaactgtctgctcctggcaaaaccaacctctcattagactccaggtcttctcacctactcaagggtaattctttcctttctctgcatcattaactgttctctctactggatcttgagcccttaccattcaggcatttgtccctaatggccatagaagtcagtaatgacctctctgttatcaaattgtgtgatctgttctcagacctcatcctacttgacccatcattggcatctgacaccgttcatccttccaccctgttgacgcactttcgtctctggtttctgaatcactgttctcgccattctctgaatgttctaaatacttcactggctgatacttctctgtgtccattgctggttcttattcagctccttgaccgctaaacagtgaccagtgtttccaactagccaagttggaatttactaaggctgggtctcgtttcatctacagccatctgctgggtgaccttatttagtgtcctggctttaaatatcatcaatatcctgatgcctcaagtttctttcttcagttcagatttctccctgaactccagattccttttgctttttcagagttgggggctttctctgtcacctgtgctggagtgcagtggtgccatcatagctcactgcaaccttgaactcctaaggctcaatagatcctcccacttcagcatccccagtagctgggactacaggcacgccctgccacacccagccaagattctttttttaatctacctttgtactcaaaagctgtactaagaggtctaacaggcatttgagattaatagatcccaaactgagttcctggttcccacccaatcctgctccttccaccagccttctttatcatagataatggtggctctgttgttccacctgttcaaacagaacacctggagtcaccttgtactcttattctcctagtccacttctaattccacagaagatctggttttctctacttttaggttcttagaatctgaccacttttaggcccttctgctgctactttggatcaggccagtgtcatctctcacagccttactgggattagagcagaaacatgggacatgatgcttagaatctcagattgtgtaggccagtggttgtcaccctgccctaagctggacccaagctattcatggagtgtcctggaactgctgcagggatgggtgggaagttgagtgggtgggatttgggtgcctgttttccctatcagcagtctcagtcagagccgcctgcttctgtctgttttacatatttggtttctgcactagatttctttgaataacaggttccacttttttagataatttacaaactgtttattgcaattgaactctcctcccctaaggcattgacctgatttgataacatcaggatctttctcccacgcccctgcaatctctcctgtgtggcaggttttctgtggttgtacctgaaggccaattagttgccaggcagtcttatctggcctgcccactggtaccagaatgatctctaacacagcccattgcacaagacccaagtgtcagtgagcctctgtgttcagtgaaggagactgagctttgatataaaaggctgcagagtgatggagccatcagcttgtttttttttttttttcttgttttttttttccttgagacagtgtcttactctgttgcccaccctggagtgcagtggtgcaatcacagctcactgcagcctcaacctccccaggctcaggggatcctcccacctcagcctcctgagtagctggaactacaggcgtgtgcaaccacgcccaggctggttttgaactcctgggctttaagcaatccccctgcgtcagcttcccaaaggactaggattacaggcagtagccactgcaaccagctaagcttgtttttttctttttcttttcttttttttttatggagtctcactctgtcacctaggctggagtgcaatggcgcaatctcggctcactgcaacctccacctcccgggttcaagcaattctcctgcctcagcctcctgagtagctgggattacaggcgcgtgctaccaagcccgtgtaatttttgtatttttagtagaaacggggtttcaccatgttggtcaggctggtctcaaactcctgacctcgtgatccgcccgcctcggcctcccaaagtgctgggattacaggcgtgagccaccgtgcctggcctccaacctttttttttttctataccaccttcagggtggttttggaatggatggaggcagggattcctttaagttggctgtcacttttagttagggactcacctataagcctgtggtcctgggcccagagaggagaaagcagtgcgagcatattgatagagtagagaaatctgttggctgattagctgtacaaggtctgaggagaaggttgaggtctccccaagacttctctagaacacttggtgagaggcgccatgaggacaggtgatgcttgggcttatagctctgactcaggacatcactgctcaacagcctgaagcccacatccaaagctcatgtcatgctggcaattgaaggggtagcagagcccaaaagtccagaggggctcagcacagggagcagatgtctgtgagcaggagagacagcggctgtagggatcgatgagacttggtaagcatgatgtgctcttgtcagcatagcatctttgagctcacacaataattgatgtagaattgtccatttcagtaaggagtttccacatccactatcttccacgattctcacaagggccttgagtaaatattacctgcatgttatgggtgagaaaggggtagtttagagagctgaagggatttggtgaaggccacataatgagtaagcctgaaatcaaggaccagacccccaggcttctaaatgttagtcttgggctccttgtttcatgggactattatcatcccttgtactgagaaggaaaactgatgaaaatcgggaagaacctatttgaacaggggagggagatggatgtgggtggtggagcctgcacatagtttctgtatctcaggaaccttgtgaggtttgctttccagttccttcagtacgtcatgtcccgctggccagggtggagtggagcacatgtttttccttcccttttaactgatatttccgtgatgggagtgtgctaaaaattaaattttttagaaaatatttactatttttag

SEQ ID NO: 207 - DNA, 4635 bp, Homo sapiens
gtgagacatttccaagacgggggacccttggaaatgtggtggtgacgtgttccagctaaattttgtcaggggaattcggaaaactctaggctaggtaattaacaaagcagccttcatctcagctggtctggtctggaaatgtgcggggcttcctctctgattcctaaacagcttacaccatgtccctcctcagtcaccttccagcgccctggggcttccttccccaggtgagcccagcgcctctccctgccattgaggttcctcagaaatctggctccaagatgcttcccaagggtggcacaacccagccaatagtaacagtttggttataaaacactcattgtcttcttagagttggaagacttgggtttggtcttggctcgttgactttgaaactcagttgttttttttgagacagagtcgcgctcttgtcgcccaggctggagtgctcactgcaacctccctcctgggttcaagcgattctcctgcctcagcctccggagtagctgggattacaggcgcctgcccggctttttttttttttgtatttttagcagagacggggtttcaccatgttggccaagctggtctagaactgacctcgggtgatccgcccacctcggcctcccacagtgctgggattacaggggtgagccaccgcgcccggccaagactcagttctttcagccttaaaatggagatagtgttgtgtctccttcacagatgtgttgtagagccccagtgagataaacggtgcatggagagtcttcttaaactgtagagtactgtgcagcagaagagagagctggcttcaacacttagtcttgtgaccttggagctgacggctgcacctccctgtgcctcagtgcattcatctacaaaataggaataaacacatttcttgctctttcctttgtatttcattttatcttctaaggaaaccaacagtatacttgctatttcgtcgaggtgccctactttgaacttggctgaatgttggctgatcctgtatcacagaagttattccctggcttctctttggaacgttcctctgaggttgtcaggctgatacctttatagcaagcaactttacagatgaagaagctaagactcagactaaaagcagtttgcccagctagaaagtgcggagctatgtcttgaacatattggaaaaccttttacccaggacctggggcagtgtggtgctctatcctgggacttcctgctatccagcagcatggtgaagaaagaacacagatctttcagatctgtttccatctttaaacctctggcactacctgccctgccctgcctttactctcagctgtcagctttgcttcccattccactgggaaaatccatgcagtcggatgagaagttcacaggcacagttaccccctcccgctgcatatgtgccggtattatctacattctgttactgtgaactgtctgctcctggcaaaaccaacctctcattagactccaggtcttctcacctactcaagggtaattctttcctttctctgcatcattaactgttctctctactggatcttgagcccttaccattcaggcatttgtccctaatggccatagaagtcagtaatgacctctctgttatcaaattgtgtgatctgttctcagacctcatcctacttgacccatcattggcatctgacaccgttcatccttccaccctgttgacgcactttcgtctctggtttctgaatcactgttctcgccattctctgaatgttctaaatacttcactggctgatacttctctgtgtccattgctggttcttattcagctccttgaccgctaaacagtgaccagtgtttccaactagccaagttggaatttactaaggctgggtctcgtttcatctacagccatctgctgggtgaccttatttagtgtcctggctttaaatatcatcaatatcctgatgcctcaagtttctttcttcagttcagatttctccctgaactccagattccttttgctttttcagagttgggggctttctctgtcacctgtgctggagtgcagtggtgccatcatagctcactgcaaccttgaactcctaaggctcaatagatcctcccacttcagcatccccagtagctgggactacaggcacgccctgccacacccagccaagattctttttttaatctacctttgtactcaaaagctgtactaagaggtctaacaggcatttgagattaatagatcccaaactgagttcctggttcccacccaatcctgctccttccaccagccttctttatcatagataatggtggctctgttgttccacctgttcaaacagaacacctggagtcaccttgtactcttattctcctagtccacttctaattccacagaagatctggttttctctacttttaggttcttagaatctgaccacttttaggcccttctgctgctactttggatcaggccagtgtcatctctcacagccttactgggattagagcagaaacatgggacatgatgcttagaatctcagattgtgtaggccagtggttgtcaccctgccctaagctggacccaagctattcatggagtgtcctggaactgctgcagggatgggtgggaagttgagtgggtgggatttgggtgcctgttttccctatcagcagtctcagtcagagccgcctgcttctgtctgttttacatatttggtttctgcactagatttctttgaataacaggttccacttttttagataatttacaaactgtttattgcaattgaactctcctcccctaaggcattgacctgatttgataacatcaggatctttctcccacgcccctgcaatctctcctgtgtggcaggttttctgtggttgtacctgaaggccaattagttgccaggcagtcttatctggcctgcccactggtaccagaatgatctctaacacagcccattgcacaagacccaagtgtcagtgagcctctgtgttcagtgaaggagactgagctttgatataaaaggctgcagagtgatggagccatcagcttgtttttttttttttttcttgttttttttttccttgagacagtgtcttactctgttgcccaccctggagtgcagtggtgcaatcacagctcactgcagcctcaacctccccaggctcaggggatcctcccacctcagcctcctgagtagctggaactacaggcgtgtgcaaccacgcccaggctggttttgaactcctgggctttaagcaatccccctgcgtcagcttcccaaaggactaggattacaggcagtagccactgcaaccagctaagcttgtttttttctttttcttttcttttttttttatggagtctcactctgtcacctaggctggagtgcaatggcgcaatctcggctcactgcaacctccacctcccgggttcaagcaattctcctgcctcagcctcctgagtagctgggattacaggcgcgtgctaccaagcccgtgtaatttttgtatttttagtagaaacggggtttcaccatgttggtcaggctggtctcaaactcctgacctcgtgatccgcccgcctcggcctcccaaagtgctgggattacaggcgtgagccaccgtgcctggcctccaacctttttttttttctataccaccttcagggtggttttggaatggatggaggcagggattcctttaagttggctgtcacttttagttagggactcacctataagcctgtggtcctgggcccagagaggagaaagcagtgcgagcatattgatagagtagagaaatctgttggctgattagctgtacaaggtctgaggagaaggttgaggtctccccaagacttctctagaacacttggtgagaggcgccatgaggacaggtgatgcttgggcttatagctctgactcaggacatcactgctcaacagcctgaagcccacatccaaagctcatgtcatgctggcaattgaaggggtagcagagcccaaaagtccagaggggctcagcacagggagcagatgtctgtgagcaggagagacagcggctgtagggatcgatgagacttggtaagcatgatgtgctcttgtcagcatagcatctttgagctcacacaataattgatgtagaattgtccatttcagtaaggagtttccacatccactatcttccacgattctcacaagggccttgagtaaatattacctgcatgttatgggtgagaaaggggtagtttagagagctgaagggatttggtgaaggccacataatgagtaagcctgaaatcaaggaccagacccccaggcttctaaatgttagtcttgggctccttgtttcatgggactattatcatcccttgtactgagaaggaaaactgatgaaaatcgggaagaacctatttgaacaggggagggagatggatgtgggtggtggagcctgcacatagtttctgtatctcaggaaccttgtgaggtttgctttccagttccttcagtacgtcatgtcccgctggccagggtggagtggagcacatgtttttccttcccttttaactgatatttccgtgatgggagtgtgctaaaaattaaattttttagaaaatatttactatttttag

SEQ ID NO: 208 - DNA, 111 bp, Homo sapiens
gctcgcctgcctgttcctgaaacggggagctgatctgggggctcgagactctgaaggcagggaccctctgaccatcgccatggaaacagccaacgctgacatcgtcaccct

SEQ ID NO: 209 - DNA, 712 bp, Homo sapiens
gtaagaatgcctgaaggggcggggctggcgctgggactccccccacccccgcccacccacgttcgggcgggcgggcggggctgacgccgaaacagaagcctgtgctgtggggcctcggaaaggggctgggccagcgccggggccaggctcgagaaaggctgcgcgaagtgtgcactgggacgtggagtagaaggcaggcgggagggcgggcagggtgcaaggatgcttggcccaccctgagaggcgtaattcgcccatcaacattgctgtcaggcatctttttagcactagacgtgaccccgggggtgggggcagatgaacggaacgcaacccagctcaaaggatgggaagttgtgggggaggtgaggatagtctttttttttttttttgagacggagtctcactctgtcgcccaggctagagtgcaggggcgcgatctcggctcactgcaacccccgcctcccgggttcaagcgattctcctgtctcagcctcccctgagtagctgggactacaggcgtgcgccaccacccccggctaattttttgtatttttagtagagacggggtttcaccatgttggccaggacggtctcgatctcctgacctcgtgatccgcctgcctcggcctcccaaagtgttgggattacaggcgtgagccaccgcgcccggccaaagatagtgtcgttcatttcttaattccctcctcttcag

SEQ ID NO: 210 - DNA, 304 bp, Homo sapiens
gctcgcctgcctgttcctgaaacggggagctgatctgggggctcgagactctgaaggcagggaccctctgaccatcgccatggaaacagccaacgctgacatcgtcaccctgtaagaatgcctgaaggggcggggctggcgctgggactccccccacccccgcccacccacgttcgggcgggcgggcggggctgacgccgaaacagaagcctgtgctgtggggcctcggaaaggggctgggccagcgccggggccaggctcgagaaaggctgcgcgaagtgtgcactgggacgtggagtagaag

SEQ ID NO: 211 - DNA, 519 bp, Homo sapiens
gcaggcgggagggcgggcagggtgcaaggatgcttggcccaccctgagaggcgtaattcgcccatcaacattgctgtcaggcatctttttagcactagacgtgaccccgggggtgggggcagatgaacggaacgcaacccagctcaaaggatgggaagttgtgggggaggtgaggatagtctttttttttttttttgagacggagtctcactctgtcgcccaggctagagtgcaggggcgcgatctcggctcactgcaacccccgcctcccgggttcaagcgattctcctgtctcagcctcccctgagtagctgggactacaggcgtgcgccaccacccccggctaattttttgtatttttagtagagacggggtttcaccatgttggccaggacggtctcgatctcctgacctcgtgatccgcctgcctcggcctcccaaagtgttgggattacaggcgtgagccaccgcgcccggccaaagatagtgtcgttcatttcttaattccctcctcttcag

SEQ ID NO: 212 - DNA, 163 bp, Homo sapiens
agagcatcatccacagttacccggagtttagctgtaaggacaattatttcatgacccagaatgagcgttataaggctgccatgcggagggcattccacatccggttgatagctcggcgcctgggttggttagaagatggtcgtgaattaggctacgcttacag

SEQ ID NO: 213 - DNA, 249 bp, Homo sapiens
atccatgaagcaagtgggtgagaagatttcaaggtgccagaaacctcacccaggtccctaagccctctgttctctgtcctctgcagagagcatcatccacagttacccggagtttagctgtaaggacaattatttcatgacccagaatgagcgttataaggctgccatgcggagggcattccacatccggttgatagctcggcgcctgggttggttagaagatggtcgtgaattaggctacgcttacag

SEQ ID NO: 214 - DNA, 424 bp, Homo sapiens
gtaaggggaagctggggaatgggacatctgttttatgccccatgcttctcttgtaagaagagtccttcattagcagttctgcttccaaataacaaactttgcccttgaaattccactgttagagattcattccttcgaactgtaaagacaatcttcacatgtcaatattgcctgagcccacctaggggatagaagagtcctaggcagcagaagacctggattctggtcctaaaattctgccactgcatagctttgtaaccttgggcaattcactttcccaccttggtcctcagttttgtcatctgtaaaataacaataatgtctgacttcctttccagatccatgaagcaagtgggtgagaagatttcaaggtgccagaaacctcacccaggtccctaagccctctgttctctgtcctctgcag

SEQ ID NO: 215 - DNA, 338 bp, Homo sapiens
gtaaggggaagctggggaatgggacatctgttttatgccccatgcttctcttgtaagaagagtccttcattagcagttctgcttccaaataacaaactttgcccttgaaattccactgttagagattcattccttcgaactgtaaagacaatcttcacatgtcaatattgcctgagcccacctaggggatagaagagtcctaggcagcagaagacctggattctggtcctaaaattctgccactgcatagctttgtaaccttgggcaattcactttcccaccttggtcctcagttttgtcatctgtaaaataacaataatgtctgacttcctttccag

SEQ ID NO: 216 - DNA, 134 bp, Homo sapiens
gggacaccgtggtgtttaaggatggccagtactggatccgaggccggacctcagtggacatcatcaagactggaggctacaaggtcagcgccctggaggtggagtggcacctgctggcccaccccagcatcaca

SEQ ID NO: 217 - DNA, 135 bp, Homo sapiens
gggacaccgtggtgtttaaggatggccagtactggatccgaggccggacctcagtggacatcatcaagactggaggctacaaggtcagcgccctggaggtggagtggcacctgctggcccaccccagcatcacag

SEQ ID NO: 218 - DNA, 187 bp, Homo sapiens
gggacaccgtggtgtttaaggatggccagttaaccagagccccttttcctcaggggacaccgtggtgtttaaggatggccagtactggatccgaggccggacctcagtggacatcatcaagactggaggctacaaggtcagcgccctggaggtggagtggcacctgctggcccaccccagcatcaca

SEQ ID NO: 219 - DNA, 188 bp, Homo sapiens
gggacaccgtggtgtttaaggatggccagttaaccagagccccttttcctcaggggacaccgtggtgtttaaggatggccagtactggatccgaggccggacctcagtggacatcatcaagactggaggctacaaggtcagcgccctggaggtggagtggcacctgctggcccaccccagcatcacag

SEQ ID NO: 220 - DNA, 12004 bp, Homo sapiens
gtaggacccagccccatgggagtggaggagaccccgaggggacaggcaggaactcattgctgcccacgttgagtgacaccgaggctgggagttcccagaattttcagccaaaggcagaagatggggtggagtggggctgggggccactgttacggcactgcctcctgagcacccggcctccccaccggcttctagagtgggctccttggccctgtccctcagtgccaggggccccagtgccccatgacaaggcttctacactgtccctcagcgcgacagccgctccggcacgcacgcaccctgaccacagacgccgggccccacgcagcccttcctggtggccctgctgcccctcgtgggctggggcaccctccacctccgaggtgtacccctgtacccagagacctcaccacccccacgcttagccacacttgtgccctccacatccttctccccaccagagtcagaagtcagctgacgcagtgcggttggtttgcagtgcggctgtttgtttactgttccacaaattagcacattctctctgcctgccagaacaggcctgtgggtgagtgggaacctgcccacctgattgaggtggcccaggaagcctgtggcggtcaggagagacggcggcgcccctggagcctgctggcagcccccactgccaccctcctgctctccctgagcctgccctgagctgctgctgcctgacccccctcctttgtgagaagctggcttggtcccaggatcccacatcccgccccatggggcgtatttggacagtggatatttcgacatttggatagtggacgtatatggatggacatttggatagcggacgtatgtggatgtgttactagggggtccttgctcccagagctcccaagatggtagcgggcagcttccaaaatggcggcaggctgcttccaagatggtggcaagcgtcgtgttctctgacctggggttcttggccttatggattccaaggaatggaatcttgggccatgcggtaagtgttatagctctattagaagccgtgggccacagaaaagaaccatggaacccagtgactagtgttcagcttgattaggatgaacgtgggtgcttagccgtgcaggaacaatggcgagcctttaggccagtcgggagtggcagtgggtgcctcgctggatcaggagcacagtggacaccctgcgggatccggaggaatagaagtcagcggcgggtctgcaacggcggcaagcagcagtggtggacggcgagcgaaagctcaacttgagccgtaactaccacggaccagaagagagtgtagttgcaagatttaatagagtgaaaacagagctcccatacaaagggaggggacccagagagggcagccgttgccaggtttatatcccgatcattgtccctcctgctgtgctctgaggagatagatgattggctattgtttacctcctgttttagcctaattagcattttagtgagctcgctttactacctgactggtcgggtgtgagctaagttgcaagccccctgcttaaaggtggatgtggtcaccttcccagctaggcttagggattcttagtcggcctaggaaatccagctagtcctgtctctcagatggacatttggatagtggacgtatgtccatggatatttggatagcagacgtgcgtgggtggacatttggagagtggacacacgtggttgtgtggctgcaggtactcactgtagtgtatttatccggaagatgtgcacgttgctcctgacccctgggtggtgagattgcggtggtttttcttttcctggtttttttttttttttttttggcctgtctatattttatgctgaacatcattattttataataacctttaagtaatattttccaaaaaaaagaggcccattttcatgcatcagaatctgctggcccaaaatcagaaacgcatctgccccatgcccttccacagggagcagagcggggggctgcagcgtgcaggcgggatgggctccttgagggatgctggaaggggcaatgttggcctgcagcctctccgcctcatggcctgatcctgtgggtcccagaggccctggagcatgtgctgctgtgaggcaggtgtgctaggtgtgtggcagttccgcacgtttgcaaagtgaaggctccgtgagcccctagagcagaggccagtgccccacgcagcatctcataggcttcccaaggtaccctgggaggcaccttcgtgggctggacatcagcagaggacccagggctggggccctagaagcctctctgtgacaggacgtggtcagcacatcaaacactccctcccaatttatcttttttatacatccccattagcgcatgctgatctggggaaacagcctgtccatgacttcccttcaaatgcagaattacaggaaccggacttgagcaggtcttgctctgagcatccctccagtgccctctgaatgccccgaccccaatccgactcacgctgcagttgttttatttatttagttagttatttttgagacggagtctcgctctgtcgcccagtctgcagtgcagtggcacgatctcagctcactgcaacctctgcctctcgggttcaagcaattctcctgcctcagcctcccaagtagctgggattacaggcgcccgccaccacgcccggctaatttttgtatttttagtaaagacagggttttgccatgttggccaggctggtctcgagctcctggcctcaggtgatccgcccgcctcggcctcccacagtgctgggattgcaggcgtcagccactgcgtctggccggttcttgtatttttaaattcaggtaaaagctgaagacgttttcttctttgaaagcacaggaaccacagccctgtggattttgcgagtcgcggggctcccggagccgctgggagggcagccgtgtgagatgcggggctgcgagcgtggaaacactcgcagtcgccagtgctgaggcatgtttcagccggggcggaatcacatgcattaattattgtacagagatgtctttagtagaaaatgattttgaaattcagtttaatttcattgtaatgtgctgcaaacaggaagggagtatgtgtgtttaattggctctcgggggtaaggcctggaagccgcatgtctttgtcacaggccattagcgatgctgctgcataatgagagcctgcaatcagctcacagctgccgctcctgccgggagagcatgatattaaatagaaatcaggagaaattaaacttaaccctttccctggccagcccctcctgccacacggattctggcataagccggcgggcacaggggacagccagggatggctggacacagctgaggatggccgaggccggcctgcagctccccaacggcctcctccgggtcaggatgagaggagaggttgccagctttgatgccagccgctcctgcctcccccacctgcctctgtgcctacagcccgcttctgcctcaagatcacacagcgggcttgtgaggccaggggtctccgctgctgctcaaggagatggcaaaggtctgtttcaggtaactcctctgacggccacaacgatgtcttcagacgtcaaaggtctgtctcaggtaactcctctgacggccacaacgatgtcttcagacgtcaaaggtctgtctcaggtaactcctctgacggccacaatgatctctgcagatgctctgactccacgtgccctcgctcagagacacacgcgcacatttgccacctggggcgagtggaaggtgacgtggaggtgggcacctctgccgggcagatgcgggagcagcagcagcagcagcccctcctgggggcatccaggggtcaggagaggggcggtagggcagggcggcatccctgcaggggtgaatggcgtcttaggctccagccgggtgaggaaacctgataaccgaactccttagagaagagccagggatcccgggaggaccaccaggagcttgtggggaaggactgaggggaagagccccaggtctcgggaggaccaccaggagctcacggggaaggattgaggggaagagccccgggtctcgggaggaccaccaggagctcacggggaaggattgaggggaagagccccaggtcccgggaggaccaccaggagctcacggggaaggattgaggggaagagccccaggtctcgggaggaccaccaggagctcacggggaaagattgaggggaagagccccaggtctcgggaggaccaccaggagctcacggggaaagattgaggggaagagccccaggtctcgggaggaccaccaggagctcgtggggaaggattgaggggaagagccccaggtcccgggaggaccaccaggagctcacggggaaggactgaggggaagagccccaggtcccaggaggaccaccaggagctcacagggaaggatggggagaggggagtggggggctggagaacccccagactgagaaattctgctcggagcgagaagggagctgggcccaggtggccccatcccccaaggttgaacatcagcccagcctcccaggccctccacgtgctcatgggcaccactgccgggcactagcttacttgtcaccctgtctgaggcgtgttggggtaggagcaagagtccgctgcttccagggcccagctggggctccatgtgtccctgggcaccccagaaccctctgggtctcagccgttgggttcttacatctgggccagtggcaaagggttaaagggaccttgtgacttagttgggactcactggcctcaagaagcgaaaatcagagggacagcagccccagccgccggggattccctgtggcgccagagctccccggcaggcactgtggaggccaagtggggaccggcagtgtcgtggtcccggcccacagcctctcagcctcccacagcctctccctgtggtaacgaggtggacgctgagccccaggcctgatggcacatttgaggtcaggtgggggcacctgggctgttcctgtagctgtcccctcgtccaggggagggaccttttcagaagccctggggcctttgtctcattgaccaaaaccctcctggccatgctgccttcacaggacactgggcatctctgtggggcaagggaaggaacacaggcctcctggtggggccccaagacccaaccaaggctcgtctggctggtgccagcctctgcgccaagggtgccgaccaaggtcagagccgatcgcggggatgacaggtgccgaaatggccatgcttgccccagcccctttcatccggcagagggacctcgctgggcctgccacgctcagccaggctgtgctgtgaagcccctctcttcccttctcagagccatatgtccacgctgacagctcctgagagggaccatgttttgctgcctgcaggtgccaagctgactgatgggccatgctgaggagggtgccccagccctcctgcaagatgcccttctgtgcagcctgcagggccaccaggcccacgaggcggccatggtcttcagatgtgtcttagcctgggttccctagaaaacacatgaggactctgggcagaggctgagtgtttttacatttttatttttaagccaaagttacacacctgtggcttaaacacccaagtagttgtagcagtttgagaagaagaatcacagccgtgccccttccccagactcgccggctgctgcttctgtgcggtccccgcatcccgagggccgccagcaccgccacctccaggctcctttttgctgccatggcttgagtcccgcagaggaggcccctcctcaggcacggcccggctcagtcccgtatggcatctgcactattgagactatggagtcgccgctgagaactgagcccaggagacactgaggtttttcctctttctttgttttccagagtcgggaaagtcttggttttcttggtctcctggtgccaattcctcgtgggctgggctggtctccccatggcgcctccttccccatcaccaccaccccttccctcctaccgggtcaggacgtcggctcccagcccacagcatcctcgtcttccctcttccgcccccagctgtggggactgctttcccctggggcttcctgaggcgggtgtgtagggtccgtacttggagacttgcgtgtctctccgggtcttcgttctgccctcagccttgcttgtcggtttggctgcgtatagggttcagggttagaagtcgcttctctatcattttctggccttcagatttgctgctgccacagccgtgctgaatcctggcacttggtgaccccctcctttttttttctgtttttttttttttttttttcgagacagagtcttgctctgtcgccagactggagtgcagtggcgccatctcggctcagtgcaacctccgccttccgggttcaagcaattctcctgcttcagcctcccgagagtagctgggattacaggcgcccaccaccacacctggctgatttttgtatttttagtagagacggggtttcaccatgttggccaggatggtctcgatctcctgacctcgtgatctccccacctcagcgtcccaaagtgctggaattacaggcatgagccaccgcacccaaccatgaccccctctttttaacgtacagggtgtcctctgtccccagacccctgagcccaggttgaggagccaccagctgaggacggagccaaggtcacggagctgccgggtgagcgctgagcccaggtcagggagttgggtctcaggccgtcactgggactccctctgccttcaagaagcctctttcacccttggcccacagaggagacctggatggcactggggtccaggtgcagaagcctccagtgtccacgggcacctgagcttccagcaccttccctcctgctgggcggtggcctgtgcctggccgcaatggaggccgccttccccactgcccctctgagcctcagtctgtcctccctgcagccacctcccctggccaggtgccccggggtaactggtggaggctttcacgtaacttggtttccagctgcctctgtacacacacaggcacctgttccaggcttggcctctctgtacacacacacgggcacctgttccaggcttggaggctgagaacttgggggcagagatctcagggcatcggcttgggcggggtccttgggcagggccttgggcttccctcggcactttcctcaaggactggggccaagcttcacattctgttgctggcatcagtgccatttgggagcaaaagtccgacaggctgggtctgggcctctcttcaccttgtttcctgggatcgcgctttgggtgctggtgtcactccagatccaggctcgggaaccacatctgcacagcagaacaggcgctgttcttatcttgcgtgcgggtcaggacatccccccggccaggagtgcttcctccgaggcccacagacaagttctcgctgggggactggggaccacagcacctcactccacctacactctagagaattcaaatctgagtattggaagatttattttcagttacagtggaaggcagagacatgaaatagcaccaaattcaaaagcagctcataaatccaggtaataggagtttattgattgctacattgtatctgtcagaagaaaactcctttaatgaacacatcaggccgaggacatacacagcccattggcagccgactccgattccagaatcgatgcattttgataaataggttgttatggaaagtaaaggttatttaacttgtttgacttgcatttcacagtgatcgcaagttgccctggagccctctgaaccttctgagtcgccctcgctgccgcaggacctcctcccgcggggtgtccgacccgctcttgcttggctgagactttgtttaaaccctggctccgatgcctctgagcccttgatagcagcgtcccagcctggaagaacaaaaccagccacttttccccttggcaaaggcacagcaaggcgggtgaggcgggcgctgagtagtctgggaatgggcagggagatgtcgaccctcggagctgagactgctctgtgctgagaagctagaacaaagcctgacatgttccaaggggcaagctcagggctgggagggaagcagcggggccgcccctttgggtgggggtgcccaggccttgcagacaagacactggccagaggaggtggagcaggggtactggggcagaggggccatgtttgtgcagcaggatggaccctggagggccccggcctagagggggcctttgccaggaagatgccaggaacgtccaggccaaggcgtccgggcaaaggcatccaggcccgggagacgcatgtgggacttgggctttcctctgtgggcagtgggaagtctctccctacccctggaaggagctccaggcagcagtgaggatggggattctgacactggagtggggagccggccctgtggtgctggctgggctgagagcggcaccaccttctgatgcccagggtgggaaggacacacgactgccaccatgcactgagggccctgcacgccacacacgtgctctgagcactgagggtcccctcatgccacgcacaagttctgggcacagaagcacctctcagaatcatccccgagacaggcgtccatcacagagacaggtctcagtcctgcactgattggcttcgcccagtgctgctgggggagtctcagacacagcctttttccgacaggtatagctgccactttctccggcacagaagcctggggccctgggaatggcaccatgttgcgcgccgacccctacggttcttccctccgcatggctcagtggaaaccgtgcgtgcagcacagcaggcagctggggcctgtgacgaccctggggttggaggccaggcagggctatcactgagaagcagggatttggggcctggggcccagggaatggacaactccccaagctgcccccaccagtccttcctgagcactggctctggaagaagcatctcggggcagaggcagccaggcccaggcagggagagacccccaaacaaggcctacagcagggtctcagggcctgaccatgccagaaacagcccagagccagagaggatgggcagatactcagtgccaccactcctgggagatctcagcaccagggcttcgacctctggggatacacacccacacctgctgagatataacacatctgcagagacacagccacgcctgcagagacatacccacacctgcagacacacccacacctgcagacacacccacacctgcagacacacccacacctgcagagacacagccacacctgcagacacacccacacctgcagacacctacacctgcaggcacacccacacctgcagacagagccacacctgcagagacaccctcacctgcagagatacaggcacacctgcagagacacagccacacctatagacacacccacacctgcagagacacacccacacctacagagacacccacacctgcagacacacccacacctgcagacacacccacacctaaggagacggggtctcgcagtgggcggagaggttgggtcttgcatctaatcagccattgatgggcctctcctgtgaagggcactcattccttgtattcataaattaagctcatgtgagtttgttctttaacaagttattgcgcgatcataatccattgccgacgttggcgtgactcaccatgtcatgagcccactcggggctggtgctgctggagatggggaagaaaattgctccataaaccaaaaagcaacattttaaaacttataaaaaagattcgcaggaaattagaaataacacacaggggttccttgtgccgtccccccagtttctcccagcatcagcctggtgtgtaacggtggtacatcctcagtgccgtgcgtagctttggtgcagtctcagccccgtgcgtagctgtggtgcagcctcagccccgtgagtaactgtggtgcatccttggagccaggacacaggcagctcaagagggtgccggggacttgtcagccttgggggcaggcagtgatggcctctccggcaggaccagagcagggcagtggctccatgctgcgctgggtctctgggtggtgcaggccagggtggagccaggccagaagctgtatggagggccctgagcacctggcagcctccctggtgtcagcagctgtggcatccgtggggcaggagcagcctggacggggtggctcggtgcgattaagagatgctattggaagattggtggctgtctggtccagaggggacacacaagccaggctgcacagcaggagcaggagccatggcgggtcccacgggacttgggacaggctgtgtccaaccccgcccacagcccaacctgcacacccccttccagccgcccagactaccccaggggcgcagtgagaccactctcctgtcggggagcctctggtttttctgctacccatcagcacagagttccagagttccagagctccataaataagcctggagcccacctgggcacacccatccgtcttgtttaatagactgaggagcacgccatgggtctcaaggagtggtgaggtggatggatggggcctttctgcgtccaacagcatgatgtataatgaagtatttatgatttattccagctaataacccatgtggagtgcagggtatgtggaagcagacagttgaggcctcagcactgcccttacatgccctgcatgctcccacagccacggcacacatgtgtgcgtgcacatgctcacagtcacgcataccgcgccctcccagctgcacacacgctcgcaggcacgcacactatgggcccatgcgtcatgagacagcttcgggctgggagtacaggctctgaggctgcagcccgctcttcccgactccccaccctcagtggctggtggtgtctgtgttgagctactcgagaaaggaagaaaacgaaggaagcttggttcccacaggagctccaggaactgcacggggaggagcaagggccacgtcgtggctttgccttaggaaggaaaacgtggggcagccccggccattgttctaggaccagcatggtcaggtgtggagggcacaagatgggcaccagcaggaggctccaggcacccaggaaaggccctgtcctcctcagccaccagcccctccctgtggcctctgcgtgggccttggtgcctctcccatccagaggggctgggcattcactgctggagcccaccgtggtgggatgttgtaatgtgtctggttcacttcttttactgaatatttggcctggattcttttgtgggcctgagagaaatggcaggacagggcctggtgggcctcggcccctctcccagagcagcctgcctgcatgaggggcggcccctctatgctgcagtcccaggggctccgtctgggggcccttgcagcagtagcagcacagccaggaggcccagcacaccctggcacccatcctgagggagggtaaagcatcagaccctgtgcttgttgctcagaaaaggccacgcatcccacccatggccagtggttatcaatcactgtcacagaaacagggcctgagccggcttcctaatgcagggtgtctgcagaccacaggcccagcagggcttctggcacctcctgctcctggcaggctctggacccactgctgacctgcccctggaggaagtgcatacagctgagcatggggaagggaccccacaggaagggcagaccccacatcatgggcacagtcccaccttgggacgcacgtcgtgaccaccaggaatgtgggcttacctggcatagctgtttctccgttggggttgccacagggtagtaaccagagccccctttcctcagaggacaccgtggtgtttaaggacggccagttaaccagagccccttttcctcaggggacaccgtggtgtttaaggatggccagttaaccagagccccttttcctcag

SEQ ID NO: 221 - DNA, 11951 bp, Homo sapiens
gtaggacccagccccatgggagtggaggagaccccgaggggacaggcaggaactcattgctgcccacgttgagtgacaccgaggctgggagttcccagaattttcagccaaaggcagaagatggggtggagtggggctgggggccactgttacggcactgcctcctgagcacccggcctccccaccggcttctagagtgggctccttggccctgtccctcagtgccaggggccccagtgccccatgacaaggcttctacactgtccctcagcgcgacagccgctccggcacgcacgcaccctgaccacagacgccgggccccacgcagcccttcctggtggccctgctgcccctcgtgggctggggcaccctccacctccgaggtgtacccctgtacccagagacctcaccacccccacgcttagccacacttgtgccctccacatccttctccccaccagagtcagaagtcagctgacgcagtgcggttggtttgcagtgcggctgtttgtttactgttccacaaattagcacattctctctgcctgccagaacaggcctgtgggtgagtgggaacctgcccacctgattgaggtggcccaggaagcctgtggcggtcaggagagacggcggcgcccctggagcctgctggcagcccccactgccaccctcctgctctccctgagcctgccctgagctgctgctgcctgacccccctcctttgtgagaagctggcttggtcccaggatcccacatcccgccccatggggcgtatttggacagtggatatttcgacatttggatagtggacgtatatggatggacatttggatagcggacgtatgtggatgtgttactagggggtccttgctcccagagctcccaagatggtagcgggcagcttccaaaatggcggcaggctgcttccaagatggtggcaagcgtcgtgttctctgacctggggttcttggccttatggattccaaggaatggaatcttgggccatgcggtaagtgttatagctctattagaagccgtgggccacagaaaagaaccatggaacccagtgactagtgttcagcttgattaggatgaacgtgggtgcttagccgtgcaggaacaatggcgagcctttaggccagtcgggagtggcagtgggtgcctcgctggatcaggagcacagtggacaccctgcgggatccggaggaatagaagtcagcggcgggtctgcaacggcggcaagcagcagtggtggacggcgagcgaaagctcaacttgagccgtaactaccacggaccagaagagagtgtagttgcaagatttaatagagtgaaaacagagctcccatacaaagggaggggacccagagagggcagccgttgccaggtttatatcccgatcattgtccctcctgctgtgctctgaggagatagatgattggctattgtttacctcctgttttagcctaattagcattttagtgagctcgctttactacctgactggtcgggtgtgagctaagttgcaagccccctgcttaaaggtggatgtggtcaccttcccagctaggcttagggattcttagtcggcctaggaaatccagctagtcctgtctctcagatggacatttggatagtggacgtatgtccatggatatttggatagcagacgtgcgtgggtggacatttggagagtggacacacgtggttgtgtggctgcaggtactcactgtagtgtatttatccggaagatgtgcacgttgctcctgacccctgggtggtgagattgcggtggtttttcttttcctggtttttttttttttttttttggcctgtctatattttatgctgaacatcattattttataataacctttaagtaatattttccaaaaaaaagaggcccattttcatgcatcagaatctgctggcccaaaatcagaaacgcatctgccccatgcccttccacagggagcagagcggggggctgcagcgtgcaggcgggatgggctccttgagggatgctggaaggggcaatgttggcctgcagcctctccgcctcatggcctgatcctgtgggtcccagaggccctggagcatgtgctgctgtgaggcaggtgtgctaggtgtgtggcagttccgcacgtttgcaaagtgaaggctccgtgagcccctagagcagaggccagtgccccacgcagcatctcataggcttcccaaggtaccctgggaggcaccttcgtgggctggacatcagcagaggacccagggctggggccctagaagcctctctgtgacaggacgtggtcagcacatcaaacactccctcccaatttatcttttttatacatccccattagcgcatgctgatctggggaaacagcctgtccatgacttcccttcaaatgcagaattacaggaaccggacttgagcaggtcttgctctgagcatccctccagtgccctctgaatgccccgaccccaatccgactcacgctgcagttgttttatttatttagttagttatttttgagacggagtctcgctctgtcgcccagtctgcagtgcagtggcacgatctcagctcactgcaacctctgcctctcgggttcaagcaattctcctgcctcagcctcccaagtagctgggattacaggcgcccgccaccacgcccggctaatttttgtatttttagtaaagacagggttttgccatgttggccaggctggtctcgagctcctggcctcaggtgatccgcccgcctcggcctcccacagtgctgggattgcaggcgtcagccactgcgtctggccggttcttgtatttttaaattcaggtaaaagctgaagacgttttcttctttgaaagcacaggaaccacagccctgtggattttgcgagtcgcggggctcccggagccgctgggagggcagccgtgtgagatgcggggctgcgagcgtggaaacactcgcagtcgccagtgctgaggcatgtttcagccggggcggaatcacatgcattaattattgtacagagatgtctttagtagaaaatgattttgaaattcagtttaatttcattgtaatgtgctgcaaacaggaagggagtatgtgtgtttaattggctctcgggggtaaggcctggaagccgcatgtctttgtcacaggccattagcgatgctgctgcataatgagagcctgcaatcagctcacagctgccgctcctgccgggagagcatgatattaaatagaaatcaggagaaattaaacttaaccctttccctggccagcccctcctgccacacggattctggcataagccggcgggcacaggggacagccagggatggctggacacagctgaggatggccgaggccggcctgcagctccccaacggcctcctccgggtcaggatgagaggagaggttgccagctttgatgccagccgctcctgcctcccccacctgcctctgtgcctacagcccgcttctgcctcaagatcacacagcgggcttgtgaggccaggggtctccgctgctgctcaaggagatggcaaaggtctgtttcaggtaactcctctgacggccacaacgatgtcttcagacgtcaaaggtctgtctcaggtaactcctctgacggccacaacgatgtcttcagacgtcaaaggtctgtctcaggtaactcctctgacggccacaatgatctctgcagatgctctgactccacgtgccctcgctcagagacacacgcgcacatttgccacctggggcgagtggaaggtgacgtggaggtgggcacctctgccgggcagatgcgggagcagcagcagcagcagcccctcctgggggcatccaggggtcaggagaggggcggtagggcagggcggcatccctgcaggggtgaatggcgtcttaggctccagccgggtgaggaaacctgataaccgaactccttagagaagagccagggatcccgggaggaccaccaggagcttgtggggaaggactgaggggaagagccccaggtctcgggaggaccaccaggagctcacggggaaggattgaggggaagagccccgggtctcgggaggaccaccaggagctcacggggaaggattgaggggaagagccccaggtcccgggaggaccaccaggagctcacggggaaggattgaggggaagagccccaggtctcgggaggaccaccaggagctcacggggaaagattgaggggaagagccccaggtctcgggaggaccaccaggagctcacggggaaagattgaggggaagagccccaggtctcgggaggaccaccaggagctcgtggggaaggattgaggggaagagccccaggtcccgggaggaccaccaggagctcacggggaaggactgaggggaagagccccaggtcccaggaggaccaccaggagctcacagggaaggatggggagaggggagtggggggctggagaacccccagactgagaaattctgctcggagcgagaagggagctgggcccaggtggccccatcccccaaggttgaacatcagcccagcctcccaggccctccacgtgctcatgggcaccactgccgggcactagcttacttgtcaccctgtctgaggcgtgttggggtaggagcaagagtccgctgcttccagggcccagctggggctccatgtgtccctgggcaccccagaaccctctgggtctcagccgttgggttcttacatctgggccagtggcaaagggttaaagggaccttgtgacttagttgggactcactggcctcaagaagcgaaaatcagagggacagcagccccagccgccggggattccctgtggcgccagagctccccggcaggcactgtggaggccaagtggggaccggcagtgtcgtggtcccggcccacagcctctcagcctcccacagcctctccctgtggtaacgaggtggacgctgagccccaggcctgatggcacatttgaggtcaggtgggggcacctgggctgttcctgtagctgtcccctcgtccaggggagggaccttttcagaagccctggggcctttgtctcattgaccaaaaccctcctggccatgctgccttcacaggacactgggcatctctgtggggcaagggaaggaacacaggcctcctggtggggccccaagacccaaccaaggctcgtctggctggtgccagcctctgcgccaagggtgccgaccaaggtcagagccgatcgcggggatgacaggtgccgaaatggccatgcttgccccagcccctttcatccggcagagggacctcgctgggcctgccacgctcagccaggctgtgctgtgaagcccctctcttcccttctcagagccatatgtccacgctgacagctcctgagagggaccatgttttgctgcctgcaggtgccaagctgactgatgggccatgctgaggagggtgccccagccctcctgcaagatgcccttctgtgcagcctgcagggccaccaggcccacgaggcggccatggtcttcagatgtgtcttagcctgggttccctagaaaacacatgaggactctgggcagaggctgagtgtttttacatttttatttttaagccaaagttacacacctgtggcttaaacacccaagtagttgtagcagtttgagaagaagaatcacagccgtgccccttccccagactcgccggctgctgcttctgtgcggtccccgcatcccgagggccgccagcaccgccacctccaggctcctttttgctgccatggcttgagtcccgcagaggaggcccctcctcaggcacggcccggctcagtcccgtatggcatctgcactattgagactatggagtcgccgctgagaactgagcccaggagacactgaggtttttcctctttctttgttttccagagtcgggaaagtcttggttttcttggtctcctggtgccaattcctcgtgggctgggctggtctccccatggcgcctccttccccatcaccaccaccccttccctcctaccgggtcaggacgtcggctcccagcccacagcatcctcgtcttccctcttccgcccccagctgtggggactgctttcccctggggcttcctgaggcgggtgtgtagggtccgtacttggagacttgcgtgtctctccgggtcttcgttctgccctcagccttgcttgtcggtttggctgcgtatagggttcagggttagaagtcgcttctctatcattttctggccttcagatttgctgctgccacagccgtgctgaatcctggcacttggtgaccccctcctttttttttctgtttttttttttttttttttcgagacagagtcttgctctgtcgccagactggagtgcagtggcgccatctcggctcagtgcaacctccgccttccgggttcaagcaattctcctgcttcagcctcccgagagtagctgggattacaggcgcccaccaccacacctggctgatttttgtatttttagtagagacggggtttcaccatgttggccaggatggtctcgatctcctgacctcgtgatctccccacctcagcgtcccaaagtgctggaattacaggcatgagccaccgcacccaaccatgaccccctctttttaacgtacagggtgtcctctgtccccagacccctgagcccaggttgaggagccaccagctgaggacggagccaaggtcacggagctgccgggtgagcgctgagcccaggtcagggagttgggtctcaggccgtcactgggactccctctgccttcaagaagcctctttcacccttggcccacagaggagacctggatggcactggggtccaggtgcagaagcctccagtgtccacgggcacctgagcttccagcaccttccctcctgctgggcggtggcctgtgcctggccgcaatggaggccgccttccccactgcccctctgagcctcagtctgtcctccctgcagccacctcccctggccaggtgccccggggtaactggtggaggctttcacgtaacttggtttccagctgcctctgtacacacacaggcacctgttccaggcttggcctctctgtacacacacacgggcacctgttccaggcttggaggctgagaacttgggggcagagatctcagggcatcggcttgggcggggtccttgggcagggccttgggcttccctcggcactttcctcaaggactggggccaagcttcacattctgttgctggcatcagtgccatttgggagcaaaagtccgacaggctgggtctgggcctctcttcaccttgtttcctgggatcgcgctttgggtgctggtgtcactccagatccaggctcgggaaccacatctgcacagcagaacaggcgctgttcttatcttgcgtgcgggtcaggacatccccccggccaggagtgcttcctccgaggcccacagacaagttctcgctgggggactggggaccacagcacctcactccacctacactctagagaattcaaatctgagtattggaagatttattttcagttacagtggaaggcagagacatgaaatagcaccaaattcaaaagcagctcataaatccaggtaataggagtttattgattgctacattgtatctgtcagaagaaaactcctttaatgaacacatcaggccgaggacatacacagcccattggcagccgactccgattccagaatcgatgcattttgataaataggttgttatggaaagtaaaggttatttaacttgtttgacttgcatttcacagtgatcgcaagttgccctggagccctctgaaccttctgagtcgccctcgctgccgcaggacctcctcccgcggggtgtccgacccgctcttgcttggctgagactttgtttaaaccctggctccgatgcctctgagcccttgatagcagcgtcccagcctggaagaacaaaaccagccacttttccccttggcaaaggcacagcaaggcgggtgaggcgggcgctgagtagtctgggaatgggcagggagatgtcgaccctcggagctgagactgctctgtgctgagaagctagaacaaagcctgacatgttccaaggggcaagctcagggctgggagggaagcagcggggccgcccctttgggtgggggtgcccaggccttgcagacaagacactggccagaggaggtggagcaggggtactggggcagaggggccatgtttgtgcagcaggatggaccctggagggccccggcctagagggggcctttgccaggaagatgccaggaacgtccaggccaaggcgtccgggcaaaggcatccaggcccgggagacgcatgtgggacttgggctttcctctgtgggcagtgggaagtctctccctacccctggaaggagctccaggcagcagtgaggatggggattctgacactggagtggggagccggccctgtggtgctggctgggctgagagcggcaccaccttctgatgcccagggtgggaaggacacacgactgccaccatgcactgagggccctgcacgccacacacgtgctctgagcactgagggtcccctcatgccacgcacaagttctgggcacagaagcacctctcagaatcatccccgagacaggcgtccatcacagagacaggtctcagtcctgcactgattggcttcgcccagtgctgctgggggagtctcagacacagcctttttccgacaggtatagctgccactttctccggcacagaagcctggggccctgggaatggcaccatgttgcgcgccgacccctacggttcttccctccgcatggctcagtggaaaccgtgcgtgcagcacagcaggcagctggggcctgtgacgaccctggggttggaggccaggcagggctatcactgagaagcagggatttggggcctggggcccagggaatggacaactccccaagctgcccccaccagtccttcctgagcactggctctggaagaagcatctcggggcagaggcagccaggcccaggcagggagagacccccaaacaaggcctacagcagggtctcagggcctgaccatgccagaaacagcccagagccagagaggatgggcagatactcagtgccaccactcctgggagatctcagcaccagggcttcgacctctggggatacacacccacacctgctgagatataacacatctgcagagacacagccacgcctgcagagacatacccacacctgcagacacacccacacctgcagacacacccacacctgcagacacacccacacctgcagagacacagccacacctgcagacacacccacacctgcagacacctacacctgcaggcacacccacacctgcagacagagccacacctgcagagacaccctcacctgcagagatacaggcacacctgcagagacacagccacacctatagacacacccacacctgcagagacacacccacacctacagagacacccacacctgcagacacacccacacctgcagacacacccacacctaaggagacggggtctcgcagtgggcggagaggttgggtcttgcatctaatcagccattgatgggcctctcctgtgaagggcactcattccttgtattcataaattaagctcatgtgagtttgttctttaacaagttattgcgcgatcataatccattgccgacgttggcgtgactcaccatgtcatgagcccactcggggctggtgctgctggagatggggaagaaaattgctccataaaccaaaaagcaacattttaaaacttataaaaaagattcgcaggaaattagaaataacacacaggggttccttgtgccgtccccccagtttctcccagcatcagcctggtgtgtaacggtggtacatcctcagtgccgtgcgtagctttggtgcagtctcagccccgtgcgtagctgtggtgcagcctcagccccgtgagtaactgtggtgcatccttggagccaggacacaggcagctcaagagggtgccggggacttgtcagccttgggggcaggcagtgatggcctctccggcaggaccagagcagggcagtggctccatgctgcgctgggtctctgggtggtgcaggccagggtggagccaggccagaagctgtatggagggccctgagcacctggcagcctccctggtgtcagcagctgtggcatccgtggggcaggagcagcctggacggggtggctcggtgcgattaagagatgctattggaagattggtggctgtctggtccagaggggacacacaagccaggctgcacagcaggagcaggagccatggcgggtcccacgggacttgggacaggctgtgtccaaccccgcccacagcccaacctgcacacccccttccagccgcccagactaccccaggggcgcagtgagaccactctcctgtcggggagcctctggtttttctgctacccatcagcacagagttccagagttccagagctccataaataagcctggagcccacctgggcacacccatccgtcttgtttaatagactgaggagcacgccatgggtctcaaggagtggtgaggtggatggatggggcctttctgcgtccaacagcatgatgtataatgaagtatttatgatttattccagctaataacccatgtggagtgcagggtatgtggaagcagacagttgaggcctcagcactgcccttacatgccctgcatgctcccacagccacggcacacatgtgtgcgtgcacatgctcacagtcacgcataccgcgccctcccagctgcacacacgctcgcaggcacgcacactatgggcccatgcgtcatgagacagcttcgggctgggagtacaggctctgaggctgcagcccgctcttcccgactccccaccctcagtggctggtggtgtctgtgttgagctactcgagaaaggaagaaaacgaaggaagcttggttcccacaggagctccaggaactgcacggggaggagcaagggccacgtcgtggctttgccttaggaaggaaaacgtggggcagccccggccattgttctaggaccagcatggtcaggtgtggagggcacaagatgggcaccagcaggaggctccaggcacccaggaaaggccctgtcctcctcagccaccagcccctccctgtggcctctgcgtgggccttggtgcctctcccatccagaggggctgggcattcactgctggagcccaccgtggtgggatgttgtaatgtgtctggttcacttcttttactgaatatttggcctggattcttttgtgggcctgagagaaatggcaggacagggcctggtgggcctcggcccctctcccagagcagcctgcctgcatgaggggcggcccctctatgctgcagtcccaggggctccgtctgggggcccttgcagcagtagcagcacagccaggaggcccagcacaccctggcacccatcctgagggagggtaaagcatcagaccctgtgcttgttgctcagaaaaggccacgcatcccacccatggccagtggttatcaatcactgtcacagaaacagggcctgagccggcttcctaatgcagggtgtctgcagaccacaggcccagcagggcttctggcacctcctgctcctggcaggctctggacccactgctgacctgcccctggaggaagtgcatacagctgagcatggggaagggaccccacaggaagggcagaccccacatcatgggcacagtcccaccttgggacgcacgtcgtgaccaccaggaatgtgggcttacctggcatagctgtttctccgttggggttgccacagggtagtaaccagagccccctttcctcagaggacaccgtggtgtttaaggacggccagttaaccagagccccttttcctcag

SEQ ID NO: 222 - DNA, 81 bp, Homo sapiens
gatcatggcggggcgctggggcccgaggagttcaaggcctgcctcatcagcctgggctacgacgtggagaacgaccggcag

SEQ ID NO: 223 - DNA, 436 bp, Homo sapiens
gatcatggcggggcgctggggcccgaggagttcaaggcctgcctcatcagcctgggctacgacgtggagaacgaccggcaggtactgcaccctgggccccagcggaccatggcattaactgctctctctctctctctccttctctctttctcccctcgccatcccacccctgccatcctgtgtgccatctcatggctctcttgcctccctgcccacatctccctggaccccttcccttttacctggtctcttggggccgctgtctccctgctccccgccactgtcctgtctgcctgctgtgcacatggggcggcccctcttgcctactctgggcccggcctcctctgctatgcctgcgtcctcggagcagaagcagacaggcagcatggactccgatgacttcagggctctgcttatctccacaggatacagcctg

SEQ ID NO: 224 - DNA, 969 bp, Homo sapiens
gtactgcaccctgggccccagcggaccatggcattaactgctctctctctctctctccttctctctttctcccctcgccatcccacccctgccatcctgtgtgccatctcatggctctcttgcctccctgcccacatctccctggaccccttcccttttacctggtctcttggggccgctgtctccctgctccccgccactgtcctgtctgcctgctgtgcacatggggcggcccctcttgcctactctgggcccggcctcctctgctatgcctgcgtcctcggagcagaagcagacaggcagcatggactccgatgacttcagggctctgcttatctccacaggatacagcctggtatgcagctctgtctccccagccacccgctcctcctcctcctcctcctcctcctcctcctcctcctcccccccacctctccccctcaccgcctccagagcttcctcgtcctcggggacactcctccgcccgagcagcgcagccgtgcctgcctcttcctctgctgcatctgccggggtggggtccctccgatgacttcccgagccccccttcttccctagaagtctccagaaagagggggcagctctcccactctctcccctttttctttctctttctctctttcttccccatcctccagagcttactcgtgagcctgggctgagggcagtagaccccagttccctgctgtgggagaccacgagaggggagggtgcagagaggccctgcttcccggcctggggcactgggggcttggaggcctgggtcagctggagcagtggcaggctctgcccggggccaaggctgctggagcaggcggggaacagggcgcacgcacacgtgggttgggccctactctctcggctgtttccctggagaccccaccagtgtgggcctggctgcccctgccccactaaatgtcgggtgtcccccaccccaccctctccttgcag

SEQ ID NO: 225 - DNA, 614 bp, Homo sapiens
gtatgcagctctgtctccccagccacccgctcctcctcctcctcctcctcctcctcctcctcctcctcccccccacctctccccctcaccgcctccagagcttcctcgtcctcggggacactcctccgcccgagcagcgcagccgtgcctgcctcttcctctgctgcatctgccggggtggggtccctccgatgacttcccgagccccccttcttccctagaagtctccagaaagagggggcagctctcccactctctcccctttttctttctctttctctctttcttccccatcctccagagcttactcgtgagcctgggctgagggcagtagaccccagttccctgctgtgggagaccacgagaggggagggtgcagagaggccctgcttcccggcctggggcactgggggcttggaggcctgggtcagctggagcagtggcaggctctgcccggggccaaggctgctggagcaggcggggaacagggcgcacgcacacgtgggttgggccctactctctcggctgtttccctggagaccccaccagtgtgggcctggctgcccctgccccactaaatgtcgggtgtcccccaccccaccctctccttgcag

SEQ ID NO: 226 - DNA, 134 bp, Homo sapiens
agcttgttcatcgagtgaaaagaagagctgacccagatcccatgaagaacacgtgtaaattattggtggtagcagatcatcgcttctacagatacatgggcagaggggaagagagtacaactacaaattactta

SEQ ID NO: 227 - DNA, 154 bp, Homo sapiens
tgcatacaaattcatattagagcttgttcatcgagtgaaaagaagagctgacccagatcccatgaagaacacgtgtaaattattggtggtagcagatcatcgcttctacagatacatgggcagaggggaagagagtacaactacaaattactta

SEQ ID NO: 228 - DNA, 1541 bp, Homo sapiens
gtaagacttaaagagtgtatttcaaataagaaacaaacatactacaattgacttcagtaggggtggttgttatttgttaaaaaataacatgattgtcaagtaactatagtatttggcatgaaaataagaggtttgttccagaaattttcatcttcttttgtttataatgtaagagttgaaaactctggaaaataatgggaacaacagagattagactttaaaaaagattagggaaaagggaaatggagtgatctgagggaaaatattcctgcagatatttagaaatgataaaataatatggtggaaagacaatctttagagtttataagaaattaattggtagtaggagggacctatatatatactgcttagaatacaagaaggttatatccatcttgggacaatccatttagggtcatttaaaaaacgtaaccatcttggaattttactgcccaaaacacctctggttaggttttttgttttgttttgttttgttttgtttgcagcgcgatctcggctcactgcaacctttgacttccaggttcaggtgattctcctgcctcagactcctgagtagctggattataggcatgtgccaccaggcctggctaatttttgtatttttagtggagatggggtttcaccatgttggtcaggctgttctcaaactcctggcctcaagtgatctgcccacctcagcctcccaaagtgttgggattacaggcgtgcaccaacatgcccggccaaagacggttatgttattaaaattatatattagcattttaatatataaataaagaaattcttaatttatttcacaagaaagttgtcctattaaactaattttcaatgtgaatatcttgacatttttactgttacattggttaattcataaacttcttgttgtagaatatgactgacagcttcatagcccagcattaggtgactgttttactctgttgagcactatttatttatttatttatttagagatgaagtctcacttttgtcgccctggcttgagtgcaatggcacaatcttggctcactgcaacctccgcaccctgggttgaagtgattctcctgcctcagccttacaagtagctgggattacaggcgggtgccaccatatctggctaatttttgtatttttaatagagatggggtttcatcatgttggccaggctggtctcgaactcccgtcctcaggtgattcacccaccttggcctcgcaaagtgctgggattacaggcctgagccaacatgcccggccttactctgttgagcactttttaaagtttctgtattggaaaaattaaagaggcacttgtccttggttttgaattctacagtgttttaactttatgttacttttcacttttctgtcttcctccaaattattttttgttgttgttcagaatcctttagtgatattaagctcacataatgtttgtttcaaaaatatgttagatttaaagtgttaccataaaactccttgttttggtgaattttgatttaatagtgcatacaaattcatattag

SEQ ID NO: 229 - DNA, 1521 bp, Homo sapiens
gtaagacttaaagagtgtatttcaaataagaaacaaacatactacaattgacttcagtaggggtggttgttatttgttaaaaaataacatgattgtcaagtaactatagtatttggcatgaaaataagaggtttgttccagaaattttcatcttcttttgtttataatgtaagagttgaaaactctggaaaataatgggaacaacagagattagactttaaaaaagattagggaaaagggaaatggagtgatctgagggaaaatattcctgcagatatttagaaatgataaaataatatggtggaaagacaatctttagagtttataagaaattaattggtagtaggagggacctatatatatactgcttagaatacaagaaggttatatccatcttgggacaatccatttagggtcatttaaaaaacgtaaccatcttggaattttactgcccaaaacacctctggttaggttttttgttttgttttgttttgttttgtttgcagcgcgatctcggctcactgcaacctttgacttccaggttcaggtgattctcctgcctcagactcctgagtagctggattataggcatgtgccaccaggcctggctaatttttgtatttttagtggagatggggtttcaccatgttggtcaggctgttctcaaactcctggcctcaagtgatctgcccacctcagcctcccaaagtgttgggattacaggcgtgcaccaacatgcccggccaaagacggttatgttattaaaattatatattagcattttaatatataaataaagaaattcttaatttatttcacaagaaagttgtcctattaaactaattttcaatgtgaatatcttgacatttttactgttacattggttaattcataaacttcttgttgtagaatatgactgacagcttcatagcccagcattaggtgactgttttactctgttgagcactatttatttatttatttatttagagatgaagtctcacttttgtcgccctggcttgagtgcaatggcacaatcttggctcactgcaacctccgcaccctgggttgaagtgattctcctgcctcagccttacaagtagctgggattacaggcgggtgccaccatatctggctaatttttgtatttttaatagagatggggtttcatcatgttggccaggctggtctcgaactcccgtcctcaggtgattcacccaccttggcctcgcaaagtgctgggattacaggcctgagccaacatgcccggccttactctgttgagcactttttaaagtttctgtattggaaaaattaaagaggcacttgtccttggttttgaattctacagtgttttaactttatgttacttttcacttttctgtcttcctccaaattattttttgttgttgttcagaatcctttagtgatattaagctcacataatgtttgtttcaaaaatatgttagatttaaagtgttaccataaaactccttgttttggtgaattttgatttaatag

SEQ ID NO: 230 - DNA, 163 bp, Homo sapiens
cgcaggacgggcgcgctgcgtgtgggacccgccgcggcctcaacccgggtccgcggggcacccgccggatgcgcagcctggcctctactacagcgccaacgagcagtgccgcgtggccttcggccccaaggctgtcgcctgcaccttcgccagggagcacctg

SEQ ID NO: 231 - DNA, 70 bp, Homo sapiens
cgccaacgagcagtgccgcgtggccttcggccccaaggctgtcgcctgcaccttcgccagggagcacctg

SEQ ID NO: 232 - DNA, 1260 bp, Homo sapiens
gtagcggccgccccgtgggaggggcgcgcgagcctccagccagcccgctgggccgccagcgccacctctctctacgtccgtccccactccgcattcagccctccttcctgtcccacccctccgtccaacccacccctccgtccaaccccgcgcccaccgctccgtccgtggaggggcgggcgcgcgagcctccagccagcccgctgggccgcccgcgccacccctccctacgtccgtccccacctctccctacgtccgtccccactccgcattcagccctccttcctgtcctacctctccatcctgacccactcctccgtccaaccccgcgcccacagctccgtcccatcccgctgcgcccactcctgcgcccacccctccgtcccaacccctgcacccacccccccgtcccacccacctgccccaccccctgcacctccccccgtgctgtcccactctgcggccacccttctgtccaacccctgcgcccaccgctccgttccaccccctccctgcgcccacccctgcgtcctccctcgcccccttgcgcccacactttcgttccagccaatctgggcacgcacccctccgtccatccccatcccgccccttgactccacatacactccctggttctctcccacttgcctacacccacccctgcatcctaccctcctccatccacccctccatctcagccccctgcacccaccccgttcctgggcccaccctgttcctgcacccaccccctcacttcacccccttacccttcgtctgcctccacccgcccctacccctccgtccactctccacgctccatcagtcccacacccctatctcccccacccgcgtacatgtatccctgcgtccccttcccgccgaccgcaccgctcccgggcctaacctgcatctgctccatcccactcagacccgtccctccgtcgccgctccctctgctggccacccacctctgcgccggcaggagccttagtcttggtcccagccaagagccggctcctggtggggggcgcgggccgagaactcctgttcccactcacaaaaggccacgcttccaaacgcttccatcctcgtgcccactcctccgtcccgcctcctcccggtgtacaccccgggactgagccgggcctgagccgggccttgtcgcagcgcaggacgggcgcgctgcgtgtgggacccgccgcggcctcaacccgggtccgcggggcacccgccggatgcgcagcctggcctctactacag

SEQ ID NO: 233 - DNA, 2486 bp, Homo sapiens
gtgagtctgccggcggtggcctgggattggctgtgaggtccctccgcatcacccagctcacgtcccccaaaacgtgcatggtgagaacctgctgggtgccgtgctaggctgaggtactaagccagggcggcttagtttaatgctgtctgtgccctctagaaattatttaaaatgtttgaacaaaagctccaacatttttgtttgactgggccccacaaattatgtagctagtcctgggagggcccctgtgcccaaggactcctggctgagtgaggacaccaatcttaaacagttaccaaggacttccccatctattgtggctggagtcagactggagggcttcctggaggaagtggcctctaaactgaacccacagcagaagtggggctggtagggggaggggagatgaaggagagcaggcaccccaaaagacagacttcctcgcaggattgcataggacattcatgggctccaggcacttttgccttgatgggccccttcctccacaaaaaaattgagaattatgttttaatattcttatacaatgtataaagttttatgtgttactataaatacaagtctttttttttcctatttttttttttttttgagacagagtctccctctctgctcactgcaggctccgcctgccagattcacaccattctcctgcctcagcctcccgagtagctgggactacaggcgcccgccaccacgcctggctaattttttgtatttttagtagagacggggtttcactgtgttagccaggatggtctcgatctcctgacctcgtgatccgcccgccctggcctcacaaagtgctgggattacaggcatgagccacagcgccccgccaagtctttttttttaaattcttttgagacagggcctcgttctgttgcccagggtggagtgcagtagcacaatcatagctcactgttgcctcaacttcttgggcacaaacgatcctcccacctcggccttggagtagctgggactacaggcacatgccacaatgcccagctaatttttaaattttttgtagagatggggtctccctttgttacccaggcttgtctaggactcctggcttcaagccatcctcccaccttggcgtcccaaagcactgggattacagacatgagccaccacccacgcctgatcagcaaatctattaatattatatattacaacattaattttgacctggaagttcattttttcatttttttttttttttgagacagagtctcactctgtcacccaggctggagtgcagtggcacaatcttggcttactgcaacctccgcctcccaggttcaagtgattcccgggcctacgcctcccgagtagctgggactacaggcatgtgccaccatgcccagctaagttttgtattttttagtagagacagggtttcatcatgttggccgggctggtctcgaattctgacctcaggtgatccgcccgccttggcctcccaaagtgctgggattacaggataagccaccacacccagcctagttcatttttttcttctgattttattttatttatttatttattttgagacggagtctcgctctgtcacccaggctggaatgcagtggctcaatcttggctcactgcaagctctgccttcagggttcaagccattctcctgcatcagcctcccgaatagctgggactacaggtgcctgccaccacacccggctaattttttgtatttttagtagagatggggtttcactgtgttagccaggatggtctcgctctcctgacctcgtgatttgcccgcctcggccttccaaattgctgggattacaggcgtgagccacagtgcccggcctttttccttctgattttaaaagaaattaggccaggtgtggtggctcacgcctgtaatcccagcactttgggaagccaaggcaggcggatcacctgaggtcgggagtttgagaccagcctgaccaacatggagaaatgccatctgtgctaaaaatacaaaaaattagccgggcgtggtggcgcatgcctgtaatcccagctactcggaaggctgaggtaggagaattgcttgaacccaggaggcagaggttgaggtgagccaagatcgcgccattgccctccagcctgggcaacaagagcgaaactgtctcaaaaaaaaacaagaaagaaaaataaattaaaacatttgcctcttgagcttcaagtcagtgacaagttaagaaggaaaaaaagaaaaaagacacaaaaaacacatttccatgggcccccaaaagtgtgacaggacctggtcatggtcccggttccccatcgatgggtcagtcatgccttgtcctctgagggcaccagtgcccacggtgcagagtgttggctgtgtcagtgtgtcctgcagtctgggagggacagttaaggttggacactggcctggaaggccctggtggcccctgagctcgccacccacctgtccaccctcctag

SEQ ID NO: 234 - DNA, 243 bp, Homo sapiens
cgcaggacgggcgcgctgcgtgtgggacccgccgcggcctcaacccgggtccgcggggcacccgccggatgcgcagcctggcctctactacagcgccaacgagcagtgccgcgtggccttcggccccaaggctgtcgcctgcaccttcgccagggagcacctggtgagtctgccggcggtggcctgggattggctgtgaggtccctccgcatcacccagctcacgtcccccaaaacgtgcatg

SEQ ID NO: 235 - DNA, 158 bp, Homo sapiens
gacgggcgcgctgcgtgtgggacccgccgcggcctcaacccgggtccgcggggcacccgccggatgcgcagcctggcctctactacagcgccaacgagcagtgccgcgtggccttcggccccaaggctgtcgcctgcaccttcgccagggagcacctg

SEQ ID NO: 236 - DNA, 150 bp, Homo sapiens
cgccaacgagcagtgccgcgtggccttcggccccaaggctgtcgcctgcaccttcgccagggagcacctggtgagtctgccggcggtggcctgggattggctgtgaggtccctccgcatcacccagctcacgtcccccaaaacgtgcatg

SEQ ID NO: 237 - DNA, 1172 bp, Homo sapiens
gtagcggccgccccgtgggaggggcgcgcgagcctccagccagcccgctgggccgccagcgccacctctctctacgtccgtccccactccgcattcagccctccttcctgtcccacccctccgtccaacccacccctccgtccaaccccgcgcccaccgctccgtccgtggaggggcgggcgcgcgagcctccagccagcccgctgggccgcccgcgccacccctccctacgtccgtccccacctctccctacgtccgtccccactccgcattcagccctccttcctgtcctacctctccatcctgacccactcctccgtccaaccccgcgcccacagctccgtcccatcccgctgcgcccactcctgcgcccacccctccgtcccaacccctgcacccacccccccgtcccacccacctgccccaccccctgcacctccccccgtgctgtcccactctgcggccacccttctgtccaacccctgcgcccaccgctccgttccaccccctccctgcgcccacccctgcgtcctccctcgcccccttgcgcccacactttcgttccagccaatctgggcacgcacccctccgtccatccccatcccgccccttgactccacatacactccctggttctctcccacttgcctacacccacccctgcatcctaccctcctccatccacccctccatctcagccccctgcacccaccccgttcctgggcccaccctgttcctgcacccaccccctcacttcacccccttacccttcgtctgcctccacccgcccctacccctccgtccactctccacgctccatcagtcccacacccctatctcccccacccgcgtacatgtatccctgcgtccccttcccgccgaccgcaccgctcccgggcctaacctgcatctgctccatcccactcagacccgtccctccgtcgccgctccctctgctggccacccacctctgcgccggcaggagccttagtcttggtcccagccaagagccggctcctggtggggggcgcgggccgagaactcctgttcccactcacaaaaggccacgcttccaaacgcttccatcctcgtgcccactcctccgtcccgcctcctcccggtgtacaccccgggactgagccgggcctgagccgggccttgtcgcagcgcag

SEQ ID NO: 238 - DNA, 2406 bp, Homo sapiens
gtgagaacctgctgggtgccgtgctaggctgaggtactaagccagggcggcttagtttaatgctgtctgtgccctctagaaattatttaaaatgtttgaacaaaagctccaacatttttgtttgactgggccccacaaattatgtagctagtcctgggagggcccctgtgcccaaggactcctggctgagtgaggacaccaatcttaaacagttaccaaggacttccccatctattgtggctggagtcagactggagggcttcctggaggaagtggcctctaaactgaacccacagcagaagtggggctggtagggggaggggagatgaaggagagcaggcaccccaaaagacagacttcctcgcaggattgcataggacattcatgggctccaggcacttttgccttgatgggccccttcctccacaaaaaaattgagaattatgttttaatattcttatacaatgtataaagttttatgtgttactataaatacaagtctttttttttcctatttttttttttttttgagacagagtctccctctctgctcactgcaggctccgcctgccagattcacaccattctcctgcctcagcctcccgagtagctgggactacaggcgcccgccaccacgcctggctaattttttgtatttttagtagagacggggtttcactgtgttagccaggatggtctcgatctcctgacctcgtgatccgcccgccctggcctcacaaagtgctgggattacaggcatgagccacagcgccccgccaagtctttttttttaaattcttttgagacagggcctcgttctgttgcccagggtggagtgcagtagcacaatcatagctcactgttgcctcaacttcttgggcacaaacgatcctcccacctcggccttggagtagctgggactacaggcacatgccacaatgcccagctaatttttaaattttttgtagagatggggtctccctttgttacccaggcttgtctaggactcctggcttcaagccatcctcccaccttggcgtcccaaagcactgggattacagacatgagccaccacccacgcctgatcagcaaatctattaatattatatattacaacattaattttgacctggaagttcattttttcatttttttttttttttgagacagagtctcactctgtcacccaggctggagtgcagtggcacaatcttggcttactgcaacctccgcctcccaggttcaagtgattcccgggcctacgcctcccgagtagctgggactacaggcatgtgccaccatgcccagctaagttttgtattttttagtagagacagggtttcatcatgttggccgggctggtctcgaattctgacctcaggtgatccgcccgccttggcctcccaaagtgctgggattacaggataagccaccacacccagcctagttcatttttttcttctgattttattttatttatttatttattttgagacggagtctcgctctgtcacccaggctggaatgcagtggctcaatcttggctcactgcaagctctgccttcagggttcaagccattctcctgcatcagcctcccgaatagctgggactacaggtgcctgccaccacacccggctaattttttgtatttttagtagagatggggtttcactgtgttagccaggatggtctcgctctcctgacctcgtgatttgcccgcctcggccttccaaattgctgggattacaggcgtgagccacagtgcccggcctttttccttctgattttaaaagaaattaggccaggtgtggtggctcacgcctgtaatcccagcactttgggaagccaaggcaggcggatcacctgaggtcgggagtttgagaccagcctgaccaacatggagaaatgccatctgtgctaaaaatacaaaaaattagccgggcgtggtggcgcatgcctgtaatcccagctactcggaaggctgaggtaggagaattgcttgaacccaggaggcagaggttgaggtgagccaagatcgcgccattgccctccagcctgggcaacaagagcgaaactgtctcaaaaaaaaacaagaaagaaaaataaattaaaacatttgcctcttgagcttcaagtcagtgacaagttaagaaggaaaaaaagaaaaaagacacaaaaaacacatttccatgggcccccaaaagtgtgacaggacctggtcatggtcccggttccccatcgatgggtcagtcatgccttgtcctctgagggcaccagtgcccacggtgcagagtgttggctgtgtcagtgtgtcctgcagtctgggagggacagttaaggttggacactggcctggaaggccctggtggcccctgagctcgccacccacctgtccaccctcctag

SEQ ID NO: 239 - DNA, 83 bp, Homo sapiens
gtgtttgattttgaattaacacagcacgatatggataacatcctcagcctaaacaggaatctccgactggccatgttccccat

SEQ ID NO: 240 - DNA, 152 bp, Homo sapiens
gtgtttgattttgaattaacacagcacgatatggataacatcctcagcctaaacaggaatctccgactggccatgttccccatgtaaatatggctccttctttttaaaacagagggaagaatatacagattgaatgattggtgtctgaatag

SEQ ID NO: 241 - DNA, 257 bp, Homo sapiens
gtaaatatggctccttctttttaaaacagagggaagaatatacagattgaatgattggtgtctgaataggtatttatcatacacattttagattaattaaactttctcattataattctttcctgtttgaagatgagccactgaatgaagctaatttcatgcactggggagtttaaaagtatataccatttaaaatgtttctcttaaaaaataatcattctttgttcctatttttgatttgtttttctgtttttcag

SEQ ID NO: 242 - DNA, 188 bp, Homo sapiens
gtatttatcatacacattttagattaattaaactttctcattataattctttcctgtttgaagatgagccactgaatgaagctaatttcatgcactggggagtttaaaagtatataccatttaaaatgtttctcttaaaaaataatcattctttgttcctatttttgatttgtttttctgtttttcag

SEQ ID NO: 243 - DNA, 51 bp, Homo sapiens
ggatgttcctgatgacatacagcctatcaccagcctcccaggagtggccag

SEQ ID NO: 244 - DNA, 38 bp, Homo sapiens
ggatgttcctgatgacatacagcctatcaccagcctcc

SEQ ID NO: 245 - DNA, 217 bp, Homo sapiens
gccctgggcttggccaggcagggaagccagacactggatcccatcctcctcccaccatctccacttccatatttctttcctgcttcccaaccatccctctcagtcgcccccgcaccactggcccttcccacagctaccaatccatatcccacccccgctcttgcagggatgttcctgatgacatacagcctatcaccagcctcccaggagtggccag

SEQ ID NO: 246 - DNA, 204 bp, Homo sapiens
gccctgggcttggccaggcagggaagccagacactggatcccatcctcctcccaccatctccacttccatatttctttcctgcttcccaaccatccctctcagtcgcccccgcaccactggcccttcccacagctaccaatccatatcccacccccgctcttgcagggatgttcctgatgacatacagcctatcaccagcctcc

SEQ ID NO: 247 - DNA, 1277 bp, Homo sapiens
gtgagtctccaagaatgggccaggcctctgctctgctggttggggttggggttggggagggagtgttgactggagcgggcatcagtatggctgggggtggcaaagtgagctgtcagcttgaaattcaaggcactggaagcaggctacttggattaaggacaggaatcttaggaacaaaacaaactttgaaagaactcattcatcccatttggaaaattagaagaataacccttgcctgccatcctgagctcttgcagtaagacagaagctgagaaggtgctctgtacattgtaaagtgctatgtacctgtaagagatggcagtcattgaggctgggcacggtggctcacgcctgtaatcccagcactttgggaggctgaggcaggcggatcacgaggtcaggagatcgagaccatcctggctaatatggtgaaaccctgtctctactaaaaacacaaagaaattagccaggcgtggtggcgggtgcctgtagtcccagctacttgggaggctgaggcaggagaatggcgtgaacccgggaggcggagcttgcagtgagccgagattgcaccacttcactccagcctgggcgacggagccagactccatctcaaaaaaaaaaaaaaaaaaaagagatggcaatcgtgattgttaataataatgcagacatttactgagtacttactatctaccaggtactatgctaagcacctacacacattatctcattcaattctgagagcatttgtatgaagaaggagtagctatcctctagaacatcagctccatgagggcagggatgtttgtctattttgttcactgttgtatcatcagggcctagaacagtacttggcacataataagtactcaataaatatttgttgaatgaatgaattaaccacgcatgatatagatgaaggcctaaggctcaaagagatgatagaacttggccacggtcacccaggcagtaagtggctgggatagaaagcaaggacctgccaaattcagagtccaagttcttaaccacttaattccttcctgtaattaccgttcttttagtacagttgctagtgttgtcactgttattcttgttgttcctattattatttcaggccctgggcttggccaggcagggaagccagacactggatcccatcctcctcccaccatctccacttccatatttctttcctgcttcccaaccatccctctcagtcgcccccgcaccactggcccttcccacagctaccaatccatatcccacccccgctcttgcag

SEQ ID NO: 248 - DNA, 1111 bp, Homo sapiens
gtgagtctccaagaatgggccaggcctctgctctgctggttggggttggggttggggagggagtgttgactggagcgggcatcagtatggctgggggtggcaaagtgagctgtcagcttgaaattcaaggcactggaagcaggctacttggattaaggacaggaatcttaggaacaaaacaaactttgaaagaactcattcatcccatttggaaaattagaagaataacccttgcctgccatcctgagctcttgcagtaagacagaagctgagaaggtgctctgtacattgtaaagtgctatgtacctgtaagagatggcagtcattgaggctgggcacggtggctcacgcctgtaatcccagcactttgggaggctgaggcaggcggatcacgaggtcaggagatcgagaccatcctggctaatatggtgaaaccctgtctctactaaaaacacaaagaaattagccaggcgtggtggcgggtgcctgtagtcccagctacttgggaggctgaggcaggagaatggcgtgaacccgggaggcggagcttgcagtgagccgagattgcaccacttcactccagcctgggcgacggagccagactccatctcaaaaaaaaaaaaaaaaaaaagagatggcaatcgtgattgttaataataatgcagacatttactgagtacttactatctaccaggtactatgctaagcacctacacacattatctcattcaattctgagagcatttgtatgaagaaggagtagctatcctctagaacatcagctccatgagggcagggatgtttgtctattttgttcactgttgtatcatcagggcctagaacagtacttggcacataataagtactcaataaatatttgttgaatgaatgaattaaccacgcatgatatagatgaaggcctaaggctcaaagagatgatagaacttggccacggtcacccaggcagtaagtggctgggatagaaagcaaggacctgccaaattcagagtccaagttcttaaccacttaattccttcctgtaattaccgttcttttagtacagttgctagtgttgtcactgttattcttgttgttcctattattatttcag

SEQ ID NO: 249 - DNA, 531 bp, Homo sapiens
atcgtccagaccctgaatcctccggctgtactgccaagtcatttcctagggccgcactcaaggtgtcagactcacgtgggctcatcactgcgtcctctcatattttcaatatgaatgacttttatcaggaaatctgaaaattagtgaaaggttcatttttctcagcatccggaaggctcgaagggcaggcaggaggggcgcgaacaggggctttgccctcctggagagacagcatgaacacagatgttcccagcgcaggcgaaggagaatgctggcttcagcggttgtgggggaggtaggcaggaatgttgcttttctggacattcgttctaaattagcgcctgtgtacccagggctgggtataaactgaggagtaagacattgtccctgctcctatggagcgtggagtgcatcagaggagacaaatgcagaaaaattacattttagtggagtaaatgaagactggctactcggatcggcgcttagcctggtgggacgccaggcacgggaagcggaacctaagtgtcgaag

SEQ ID NO: 250 - DNA, 323 bp, Homo sapiens
ttcgaagaatcctccggctgggaaaactatcgtccagaccctgaatcctccggctgtactgccaagtcatttcctagggccgcactcaaggtgtcagactcacgtgggctcatcactgcgtcctctcatattttcaatatgaatgacttttatcaggaaatctgaaaattagtgaaaggttcatttttctcagcatccggaaggctcgaagggcaggcaggaggggcgcgaacaggggctttgccctcctggagagacagcatgaacacagatgttcccagcgcaggcgaaggagaatgctggcttcagcggttgtgggggag

SEQ ID NO: 251 - DNA, 3177 bp, Homo sapiens
gttcgggtttccgggggtggtgggcccacacaagcggcgcaccgttaagatggcggctgggctgcggaaacgcggccggtccggttccgcggcccaggcagagggactctgcaagcaatggctgcagcgcgcctggcaagagcggcgcctgctgctgcgggagccgcgctacacgctgctggtggccgcctgcctctgcctggcggaggtgggcatcaccttctgggtcattcacagggtggcatgtgagtgcgccgagggggaggggaggggagggagggagacctgaacccgcgacccaaactggatctcagacctggaactccaaaccagactctgtatccactcactcgtcaattgcgaacccatccatatcccttacctgagcgccaagcctgctctacagaaaaccggatcttaatctgcccgcatggcagaggtggataccctagagattggccttctgcactgaacttacagcctgcaaaccagcttagaagtcagatttgagccaaaattgttgtactgctgctgctgctgcttttctctgtggctttggacacctcaggtctcctcctggatctcagctttttccatgtgttcagttctgtgatctttgaacgtcccttctcaatgatggcatcttgtgaccacttgagtccattaggcattattggctactcctttccaggctgaaactatactctaggcttaaggcacttggctttcttgctaaagactcttaattcaacaaatatttatttagtgcttattatatgcctagcattatgctggttaccagagagaggtacagtggtgaataagagatgcatttctgccgggcgcggtggctcacgcctgtaatcccagcactttgggaggccgaggcgggcggatcacgaggtcaggagatcgaggccatcctggctaacacggtgaaaccccgtctctactgaaaaaaaaaaaaaaaaaagaatttagccgggcatggtggcgggcgcctgtagtcccagctactcgggaggctgaggcaggagaatggcgtgaacccgggaggcagagctttcagtgagccgagatcacgccactgcactccagcctgggcgacagagcaagactccgtctcaaaaaaaaaaaaagaaaaaggatgcatttctaactcgggcctggacagtaagttagcaggcaattataatgcatcataatcatggtagtagtaacacaggataccataaagggcataggaagtcacttaaaccaggttggaggagtcagcaaaggcttcatagagccacccttggaaggtaggaattagctatttaaggaaagaagaaaaaggtgaggggaaggagtgctgtggacagaggatcctctattaaaaatctccagctaggctgggcgcagcggcacacgcctgtaatcccagcactttggtaggcctaggcgggtggatctcctgaggtcaggaatttgagaccagcctggccaacatgatgaaatcctgtctctactaaaaatacaaaaattagctgggcgtggtggcatatgcctgtaatcccagctactcgggaggttgagacaggagaattgcttgaacccgggaggtggaggttgcagtgagccgagattgcgccactgtactccagcctgggtgacagagcaagctccgtgtcaaaaaaaaaaaaaattcagttagactgggcacggtggctcatgcctgtaatcccagcactttgggaggctgaggtgggcggatcacttgggggcaggagttaaagaccagcctggctgggcacggtggcttatgcctgtaattctagcactttgggagcccgaggcgggcagatcacctgaggtcaggagttcaacaccagcctggccaatatgttgacaccctgtctctactaaaatagaaaaattagctgggcatgatggcaagtgcctgtaatcccagctacttgggaggctgagatgggaaaatggctcgaaccggggagatggtggttgcagtgagctgagatcgcaccactgcactccagcctgggtggctgagcgagaccctgtctcaaaagaaaaacaaacaaacaaaccagcctggccaacacggtgaaaccccatctctactaaaaatacaaaacttaaaaaattagccaagcatggtggcacacacctgtagtcccagctactcgggagactgaggcaggagaatcacttgaacccgggaggcggaggttgcagtgagctgagatcgtaccactgcactccagtctgggtgacagagtgagactctgtcaaaaaaaaaaaaaaaagaagacagcctggttcctttgaggaactgaaatgatttttttagagctagagtgtagaaatcaagtgaagggagtagtaagagatgggaatgcagaaactgaggccagatcatgaaggaatttgaaagctttgttaagaagatagcatgataattaagaacttgggaccctgcaagcttcaatcccaactccaccatcctagctcaattatcttaagccagtcacttaacctaattaattcttaggctccccttcaaaaaatgggaataatacagagttttctttatcttaagggtcttggggaatcattgagaggttttaagcagaggcctgttatgatttgtattttaggaggagctctttggtgtacgaggtggaaaatatattgtagcagggtgaaagtagaagtcaggagcctaattagcaggctattgtatactcattggggctagagattactttaggctcaaatttgagtatgtagtagcagagaaggatgagatagagatatttacggtgaggaacaggcagaacttgttgacgaagggttgcaaatgagagaggagggagtatcaaagatgttactcaggttcgtgacctggtagctaagaggtcggtggtgccatttgcggaacccaggaaaaggagtagattggaatgggaagaaagatcacaaattcacttatagaaatgttgagtttgagatgcctgggctcacccagagaatgtcagataaagagttagattaagaggtagtaaagccctgggaattggctgaaagtctgtgttttgatggtctggaggcatggggagggtggcagacaagttctagactcagaagtaaccagatcatcttgtcttcttccag

SEQ ID NO: 252 - DNA, 3413 bp, Homo sapiens
gtaggcaggaatgttgcttttctggacattcgttctaaattagcgcctgtgtacccagggctgggtataaactgaggagtaagacattgtccctgctcctatggagcgtggagtgcatcagaggagacaaatgcagaaaaattacattttagtggagtaaatgaagactggctactcggatcggcgcttagcctggtgggacgccaggcacgggaagcggaacctaagtgtcgaaggttcgggtttccgggggtggtgggcccacacaagcggcgcaccgttaagatggcggctgggctgcggaaacgcggccggtccggttccgcggcccaggcagagggactctgcaagcaatggctgcagcgcgcctggcaagagcggcgcctgctgctgcgggagccgcgctacacgctgctggtggccgcctgcctctgcctggcggaggtgggcatcaccttctgggtcattcacagggtggcatgtgagtgcgccgagggggaggggaggggagggagggagacctgaacccgcgacccaaactggatctcagacctggaactccaaaccagactctgtatccactcactcgtcaattgcgaacccatccatatcccttacctgagcgccaagcctgctctacagaaaaccggatcttaatctgcccgcatggcagaggtggataccctagagattggccttctgcactgaacttacagcctgcaaaccagcttagaagtcagatttgagccaaaattgttgtactgctgctgctgctgcttttctctgtggctttggacacctcaggtctcctcctggatctcagctttttccatgtgttcagttctgtgatctttgaacgtcccttctcaatgatggcatcttgtgaccacttgagtccattaggcattattggctactcctttccaggctgaaactatactctaggcttaaggcacttggctttcttgctaaagactcttaattcaacaaatatttatttagtgcttattatatgcctagcattatgctggttaccagagagaggtacagtggtgaataagagatgcatttctgccgggcgcggtggctcacgcctgtaatcccagcactttgggaggccgaggcgggcggatcacgaggtcaggagatcgaggccatcctggctaacacggtgaaaccccgtctctactgaaaaaaaaaaaaaaaaaagaatttagccgggcatggtggcgggcgcctgtagtcccagctactcgggaggctgaggcaggagaatggcgtgaacccgggaggcagagctttcagtgagccgagatcacgccactgcactccagcctgggcgacagagcaagactccgtctcaaaaaaaaaaaaagaaaaaggatgcatttctaactcgggcctggacagtaagttagcaggcaattataatgcatcataatcatggtagtagtaacacaggataccataaagggcataggaagtcacttaaaccaggttggaggagtcagcaaaggcttcatagagccacccttggaaggtaggaattagctatttaaggaaagaagaaaaaggtgaggggaaggagtgctgtggacagaggatcctctattaaaaatctccagctaggctgggcgcagcggcacacgcctgtaatcccagcactttggtaggcctaggcgggtggatctcctgaggtcaggaatttgagaccagcctggccaacatgatgaaatcctgtctctactaaaaatacaaaaattagctgggcgtggtggcatatgcctgtaatcccagctactcgggaggttgagacaggagaattgcttgaacccgggaggtggaggttgcagtgagccgagattgcgccactgtactccagcctgggtgacagagcaagctccgtgtcaaaaaaaaaaaaaattcagttagactgggcacggtggctcatgcctgtaatcccagcactttgggaggctgaggtgggcggatcacttgggggcaggagttaaagaccagcctggctgggcacggtggcttatgcctgtaattctagcactttgggagcccgaggcgggcagatcacctgaggtcaggagttcaacaccagcctggccaatatgttgacaccctgtctctactaaaatagaaaaattagctgggcatgatggcaagtgcctgtaatcccagctacttgggaggctgagatgggaaaatggctcgaaccggggagatggtggttgcagtgagctgagatcgcaccactgcactccagcctgggtggctgagcgagaccctgtctcaaaagaaaaacaaacaaacaaaccagcctggccaacacggtgaaaccccatctctactaaaaatacaaaacttaaaaaattagccaagcatggtggcacacacctgtagtcccagctactcgggagactgaggcaggagaatcacttgaacccgggaggcggaggttgcagtgagctgagatcgtaccactgcactccagtctgggtgacagagtgagactctgtcaaaaaaaaaaaaaaaagaagacagcctggttcctttgaggaactgaaatgatttttttagagctagagtgtagaaatcaagtgaagggagtagtaagagatgggaatgcagaaactgaggccagatcatgaaggaatttgaaagctttgttaagaagatagcatgataattaagaacttgggaccctgcaagcttcaatcccaactccaccatcctagctcaattatcttaagccagtcacttaacctaattaattcttaggctccccttcaaaaaatgggaataatacagagttttctttatcttaagggtcttggggaatcattgagaggttttaagcagaggcctgttatgatttgtattttaggaggagctctttggtgtacgaggtggaaaatatattgtagcagggtgaaagtagaagtcaggagcctaattagcaggctattgtatactcattggggctagagattactttaggctcaaatttgagtatgtagtagcagagaaggatgagatagagatatttacggtgaggaacaggcagaacttgttgacgaagggttgcaaatgagagaggagggagtatcaaagatgttactcaggttcgtgacctggtagctaagaggtcggtggtgccatttgcggaacccaggaaaaggagtagattggaatgggaagaaagatcacaaattcacttatagaaatgttgagtttgagatgcctgggctcacccagagaatgtcagataaagagttagattaagaggtagtaaagccctgggaattggctgaaagtctgtgttttgatggtctggaggcatggggagggtggcagacaagttctagactcagaagtaaccagatcatcttgtcttcttccag

SEQ ID NO: 253 - DNA, 739 bp, Homo sapiens
atcgtccagaccctgaatcctccggctgtactgccaagtcatttcctagggccgcactcaaggtgtcagactcacgtgggctcatcactgcgtcctctcatattttcaatatgaatgacttttatcaggaaatctgaaaattagtgaaaggttcatttttctcagcatccggaaggctcgaagggcaggcaggaggggcgcgaacaggggctttgccctcctggagagacagcatgaacacagatgttcccagcgcaggcgaaggagaatgctggcttcagcggttgtgggggaggtaggcaggaatgttgcttttctggacattcgttctaaattagcgcctgtgtacccagggctgggtataaactgaggagtaagacattgtccctgctcctatggagcgtggagtgcatcagaggagacaaatgcagaaaaattacattttagtggagtaaatgaagactggctactcggatcggcgcttagcctggtgggacgccaggcacgggaagcggaacctaagtgtcgaaggttcgggtttccgggggtggtgggcccacacaagcggcgcaccgttaagatggcggctgggctgcggaaacgcggccggtccggttccgcggcccaggcagagggactctgcaagcaatggctgcagcgcgcctggcaagagcggcgcctgctgctgcgggagccgcgctacacgctgctggtggccgcctgcctctgcctggcggag

SEQ ID NO: 254 - DNA, 767 bp, Homo sapiens
ttcgaagaatcctccggctgggaaaactatcgtccagaccctgaatcctccggctgtactgccaagtcatttcctagggccgcactcaaggtgtcagactcacgtgggctcatcactgcgtcctctcatattttcaatatgaatgacttttatcaggaaatctgaaaattagtgaaaggttcatttttctcagcatccggaaggctcgaagggcaggcaggaggggcgcgaacaggggctttgccctcctggagagacagcatgaacacagatgttcccagcgcaggcgaaggagaatgctggcttcagcggttgtgggggaggtaggcaggaatgttgcttttctggacattcgttctaaattagcgcctgtgtacccagggctgggtataaactgaggagtaagacattgtccctgctcctatggagcgtggagtgcatcagaggagacaaatgcagaaaaattacattttagtggagtaaatgaagactggctactcggatcggcgcttagcctggtgggacgccaggcacgggaagcggaacctaagtgtcgaaggttcgggtttccgggggtggtgggcccacacaagcggcgcaccgttaagatggcggctgggctgcggaaacgcggccggtccggttccgcggcccaggcagagggactctgcaagcaatggctgcagcgcgcctggcaagagcggcgcctgctgctgcgggagccgcgctacacgctgctggtggccgcctgcctctgcctggcggag

SEQ ID NO: 255 - DNA, 2969 bp, Homo sapiens
gtgggcatcaccttctgggtcattcacagggtggcatgtgagtgcgccgagggggaggggaggggagggagggagacctgaacccgcgacccaaactggatctcagacctggaactccaaaccagactctgtatccactcactcgtcaattgcgaacccatccatatcccttacctgagcgccaagcctgctctacagaaaaccggatcttaatctgcccgcatggcagaggtggataccctagagattggccttctgcactgaacttacagcctgcaaaccagcttagaagtcagatttgagccaaaattgttgtactgctgctgctgctgcttttctctgtggctttggacacctcaggtctcctcctggatctcagctttttccatgtgttcagttctgtgatctttgaacgtcccttctcaatgatggcatcttgtgaccacttgagtccattaggcattattggctactcctttccaggctgaaactatactctaggcttaaggcacttggctttcttgctaaagactcttaattcaacaaatatttatttagtgcttattatatgcctagcattatgctggttaccagagagaggtacagtggtgaataagagatgcatttctgccgggcgcggtggctcacgcctgtaatcccagcactttgggaggccgaggcgggcggatcacgaggtcaggagatcgaggccatcctggctaacacggtgaaaccccgtctctactgaaaaaaaaaaaaaaaaaagaatttagccgggcatggtggcgggcgcctgtagtcccagctactcgggaggctgaggcaggagaatggcgtgaacccgggaggcagagctttcagtgagccgagatcacgccactgcactccagcctgggcgacagagcaagactccgtctcaaaaaaaaaaaaagaaaaaggatgcatttctaactcgggcctggacagtaagttagcaggcaattataatgcatcataatcatggtagtagtaacacaggataccataaagggcataggaagtcacttaaaccaggttggaggagtcagcaaaggcttcatagagccacccttggaaggtaggaattagctatttaaggaaagaagaaaaaggtgaggggaaggagtgctgtggacagaggatcctctattaaaaatctccagctaggctgggcgcagcggcacacgcctgtaatcccagcactttggtaggcctaggcgggtggatctcctgaggtcaggaatttgagaccagcctggccaacatgatgaaatcctgtctctactaaaaatacaaaaattagctgggcgtggtggcatatgcctgtaatcccagctactcgggaggttgagacaggagaattgcttgaacccgggaggtggaggttgcagtgagccgagattgcgccactgtactccagcctgggtgacagagcaagctccgtgtcaaaaaaaaaaaaaattcagttagactgggcacggtggctcatgcctgtaatcccagcactttgggaggctgaggtgggcggatcacttgggggcaggagttaaagaccagcctggctgggcacggtggcttatgcctgtaattctagcactttgggagcccgaggcgggcagatcacctgaggtcaggagttcaacaccagcctggccaatatgttgacaccctgtctctactaaaatagaaaaattagctgggcatgatggcaagtgcctgtaatcccagctacttgggaggctgagatgggaaaatggctcgaaccggggagatggtggttgcagtgagctgagatcgcaccactgcactccagcctgggtggctgagcgagaccctgtctcaaaagaaaaacaaacaaacaaaccagcctggccaacacggtgaaaccccatctctactaaaaatacaaaacttaaaaaattagccaagcatggtggcacacacctgtagtcccagctactcgggagactgaggcaggagaatcacttgaacccgggaggcggaggttgcagtgagctgagatcgtaccactgcactccagtctgggtgacagagtgagactctgtcaaaaaaaaaaaaaaaagaagacagcctggttcctttgaggaactgaaatgatttttttagagctagagtgtagaaatcaagtgaagggagtagtaagagatgggaatgcagaaactgaggccagatcatgaaggaatttgaaagctttgttaagaagatagcatgataattaagaacttgggaccctgcaagcttcaatcccaactccaccatcctagctcaattatcttaagccagtcacttaacctaattaattcttaggctccccttcaaaaaatgggaataatacagagttttctttatcttaagggtcttggggaatcattgagaggttttaagcagaggcctgttatgatttgtattttaggaggagctctttggtgtacgaggtggaaaatatattgtagcagggtgaaagtagaagtcaggagcctaattagcaggctattgtatactcattggggctagagattactttaggctcaaatttgagtatgtagtagcagagaaggatgagatagagatatttacggtgaggaacaggcagaacttgttgacgaagggttgcaaatgagagaggagggagtatcaaagatgttactcaggttcgtgacctggtagctaagaggtcggtggtgccatttgcggaacccaggaaaaggagtagattggaatgggaagaaagatcacaaattcacttatagaaatgttgagtttgagatgcctgggctcacccagagaatgtcagataaagagttagattaagaggtagtaaagccctgggaattggctgaaagtctgtgttttgatggtctggaggcatggggagggtggcagacaagttctagactcagaagtaaccagatcatcttgtcttcttccag

SEQ ID NO: 256 - DNA, 99 bp, Homo sapiens
gacgggacagcgcccctgtggatcgcgtcccagatgggccacagcgaggtggtgcgggtgatgctgctgcgcggagccgaccgcgacgctgcgcggaac

SEQ ID NO: 257 - DNA, 235 bp, Homo sapiens
gacgggacagcgcccctgtggatcgcgtcccagatgggccacagcgaggtggtgcgggtgatgctgctgcgcggagccgaccgcgacgctgcgcggaacgtgagtgcccgagtcgcgcggccaaagagcgaagcctcccggcgcgcctgtgtggagaaaacgggtcttgactgagtctgcagcccacatgggtttcctcccaacctccttccttgagcaggaaaacaaagtcaag

SEQ ID NO: 258 - DNA, 1703 bp, Homo sapiens
gtgagtgcccgagtcgcgcggccaaagagcgaagcctcccggcgcgcctgtgtggagaaaacgggtcttgactgagtctgcagcccacatgggtttcctcccaacctccttccttgagcaggaaaacaaagtcaaggtctgattcggtgctgctcggtctctctcctcctccacccgagatgaccttgggacgcactagagagggtggaatcttagccttaggcctgagggcggtagagacggggcctcccgcctgtcctgggggcctcccgcctgtcctgggggcctcccggctgtcctggggcgtgtcctagggggatcccctggctggtgctgcgcctcctgcaggccctgcctcttgcccctcctccctggagctgcagaccccttgcaccccgtcccctgttggcccgccgtcatccactggcctctgctggtgccacctaatactgcctttgtgtgctgcacagcaggcccttttccccataaggaaggcttgaagagaacctgaccacctatgctgtttgctttttgtgttttactgtggcctttgtataacccttgcttacgtaacccaccttcccctctccaagtctaagctccaaaaaagggaaatcaccagacgcgttcgccaccatttcactgccctctctctcactcttcttcttcccacaatctctgaagccagaaaagacccccaccccccgccccccaattcattcttccttctttctgattacagataaaccctaatggcaggccgaagtggtttcttggctacgggagaattatggactaaatcctccaaacacagcgactgatatgtgaaaatgggagaaaaaggaatttggaaactgtgttcttgagccaaaaaataacgacagaagctaaatattaatttttgaatttggcttttcattctttttagcagattttattttatttttttctgagacagagtctcactctgtcacccaggctggagtgcagtggcacggtctcagctcactgtaacttccgcctctgggttcaagtgattctcgtgcctcagcctcccgagtagctgggactacaggcacgggctaccacacccggctattgtatttttggtagagacggggtttcaagtgaccctcctgccttggccttccaaagtgctagaattacaggcgtgagccactgcacctggccttttagcagattttaatctatcacctctgcccctaagccccactacccacacacgggcggatgcctagagcagactagggcaaggctgtataaatttttttagaaacagtaaatacagctcaacaatgatctaaattattaaagacagttaaccatttctgctaagttatgaacagccgagaatgcctctttggtccaaccatggcctaaaaatatgctcttgaaattccccttgtcccctgcccagtgttctcaggaactgtagaagtatgaattcccaaatggcagagttctaacataatctaagtcactgtttatctgatactctttcatgcagaatttactgcttaatattctctaaaatgctcctagattaagagacattgctgatctgtgcttaatttacacgtcattagtttctgacaacggtactttccagttcccaactgactgctttcaagcaacacagatatatgttaataatcaacttttattttcctctttctgttaag

SEQ ID NO: 259 - DNA, 1567 bp, Homo sapiens
gtctgattcggtgctgctcggtctctctcctcctccacccgagatgaccttgggacgcactagagagggtggaatcttagccttaggcctgagggcggtagagacggggcctcccgcctgtcctgggggcctcccgcctgtcctgggggcctcccggctgtcctggggcgtgtcctagggggatcccctggctggtgctgcgcctcctgcaggccctgcctcttgcccctcctccctggagctgcagaccccttgcaccccgtcccctgttggcccgccgtcatccactggcctctgctggtgccacctaatactgcctttgtgtgctgcacagcaggcccttttccccataaggaaggcttgaagagaacctgaccacctatgctgtttgctttttgtgttttactgtggcctttgtataacccttgcttacgtaacccaccttcccctctccaagtctaagctccaaaaaagggaaatcaccagacgcgttcgccaccatttcactgccctctctctcactcttcttcttcccacaatctctgaagccagaaaagacccccaccccccgccccccaattcattcttccttctttctgattacagataaaccctaatggcaggccgaagtggtttcttggctacgggagaattatggactaaatcctccaaacacagcgactgatatgtgaaaatgggagaaaaaggaatttggaaactgtgttcttgagccaaaaaataacgacagaagctaaatattaatttttgaatttggcttttcattctttttagcagattttattttatttttttctgagacagagtctcactctgtcacccaggctggagtgcagtggcacggtctcagctcactgtaacttccgcctctgggttcaagtgattctcgtgcctcagcctcccgagtagctgggactacaggcacgggctaccacacccggctattgtatttttggtagagacggggtttcaagtgaccctcctgccttggccttccaaagtgctagaattacaggcgtgagccactgcacctggccttttagcagattttaatctatcacctctgcccctaagccccactacccacacacgggcggatgcctagagcagactagggcaaggctgtataaatttttttagaaacagtaaatacagctcaacaatgatctaaattattaaagacagttaaccatttctgctaagttatgaacagccgagaatgcctctttggtccaaccatggcctaaaaatatgctcttgaaattccccttgtcccctgcccagtgttctcaggaactgtagaagtatgaattcccaaatggcagagttctaacataatctaagtcactgtttatctgatactctttcatgcagaatttactgcttaatattctctaaaatgctcctagattaagagacattgctgatctgtgcttaatttacacgtcattagtttctgacaacggtactttccagttcccaactgactgctttcaagcaacacagatatatgttaataatcaacttttattttcctctttctgttaag

SEQ ID NO: 260 - DNA, 122 bp, Homo sapiens
caaggtgcagagctagaaatgaaagacatccagggctggacagccctcttccactgtaccagcgccgggcaccagcacatggtcaggttcctcttggacagtggagccaatgccaacgtgag

SEQ ID NO: 261 - DNA, 198 bp, Homo sapiens
gtgagctacgagggaactcaggcccagaaacctgaggggctccgtggccaccctgacagagatgcgaaccactgcaggccacggtgttcgtgtgtgctcgtgtaatcacttctgattcttgcagcatggccgcctggagggcgcccgccccacgcagaggagatgaggccgtaacgcacgttctgtgttctcttgaag

SEQ ID NO: 262 - DNA, 196 bp, Homo sapiens
catggccgcctggagggcgcccgccccacgcagaggagatgaggccgtaacgcacgttctgtgttctcttgaagcaaggtgcagagctagaaatgaaagacatccagggctggacagccctcttccactgtaccagcgccgggcaccagcacatggtcaggttcctcttggacagtggagccaatgccaacgtgag

SEQ ID NO: 263 - DNA, 124 bp, Homo sapiens
gtgagctacgagggaactcaggcccagaaacctgaggggctccgtggccaccctgacagagatgcgaaccactgcaggccacggtgttcgtgtgtgctcgtgtaatcacttctgattcttgcag

SEQ ID NO: 264 - DNA, 45 bp, Homo sapiens
gagaaaaatctattacctgccccgccgttacaagttcatgagcag

SEQ ID NO: 265 - DNA, 107 bp, Homo sapiens
ttcaaactgtaactgacgatgggttttcttctcgactggcttcatttttgctgttcttccaggagaaaaatctattacctgccccgccgttacaagttcatgagcag

SEQ ID NO: 266 - DNA, 3438 bp, Homo sapiens
gtaggtggaaatgtattttattccactctctctgctgcttcactgtaaatctaatgttctcctctctcagaacaaataaaactgaaatgcagattggaaggccattagaggagggaatctttcaaatgtttaggatatgcaaataagccttcatggccaataatgatttcatggctttttgtgaaaaattctggctaatttagttcttagcaggtagatatttccagtgcctgtaataaagaagcattttccaagtggcatttttatttccaaagtgccatttttagaagtcctgtgtactgctgctttgaacagccagaccacaggcagcagttgcacaggggcatgttttcatgttctttactgactagtctcttccagaaaaacattaaaatgtatttctgtagatacaagtgcaagaaatttcatgacagtgtgatcttctttttaaaaaaaaaacaaaaaaaaccactttttttaattttaaaaagtcataaatactttgcaaacacgaatattgatatttgttccaaggggaatagaaaatactttgtattccttagttatttaaaaggattaatttaccttcatttcacaatgaatatttttattttccctatggattatggaaaagtgatctgcatttgctatacagaaataaaatattaaacctcaaattagaaatgccaagatatgtgggtcttttgtaatggaatctgctaaaaagatggatggatgtagtcccaaggacagttctgaggggactcgaagaataacgtacttttggtttgcaatttgccagtaagaccacattaggtgacagaaatgaggcaaattggtaccaactctacagtctgtctcttaatgagctgtggaaagttgtggagacaaagaacatttatagagacagagagaagggttagggactcatttagagaaaggcaatttccattcacaggcttgtaatgtatctccctggtgcatcttatcttctttgttcattggcctgtatgtcctaataccaagtcaaaatagaggctatgatttctagcatctgttttcctggaggcaaaattctcaaaatggataataaatatagttctgatcttatgatttatttttgtatttaactgttaaaaagaaaatctgagaactcaaggattaaaaaaaggaatacatatatatatccactagggagagataaggaatgtcaatttagattccactgaaaatttttatactataatagttaaagccaaatatgtatcaatgatataataagtgtctaatgtggattaataccatattatacctaagaaccgaaagagaaagaaagaaaaccctacaaaatatgtctagatagaaatttatacacccctctccagtataaataaatctcataaaaccttctgccagaacacacttctgtaacaaagaacccagggagatgatagaaacttgagcaatggtaatgcaaagccaattctcttactacctgcaaaggattttgtatctgaagggcctggccacatcatgaataacacttctgcatgcctactacacagcagaaatgtgctgcctccaagcagcattaatactgttttaatgcagcattgagagaatgtgaaccaagcaatgaaatgaaaatgaacatgaacaattatcttctttttagatataggaattcctgcaggacaattttagaagaaaatattgttaatgtgtgacactaattgacctcattaatattgatgtaggtttacctactaaacatggcttcacttgttgtaacctgatggattaaaaacttttgctattattgtgtccacagtttcagacaaataactctagtctaaggagatacatgcatttccaaaggaggaattctcctactacatcatttcaacaaaatgtacaaacatcattttagctgaattttaatacgcaaagaatcttacctgtattcataattttctgtagattcataattttctgtacttctgaatcccaagtttagtctccatggatttttatccctataatgtttaaaaggaaatataggaatagatttcttatgagaaattacagtaaaacctgcttcttaaatacttatatgtccatggatattttttataactaatagaccttactttttagagaaatttttaggtttatagaaaattgagaagatactagtgttccaatataccccttctcccccagcctacagtttctttattattaacattttgcattagcgtgatatatttgttaaagttggtggaccaatattgataaattcttattaactaaagtccatagtttactctagggttgactctgtgtgtgtggttctgtgggttttgacaaaggcatatcatgtatccaccattgcaggatcatgcagagtagctgcactgccctaaaagtctcctgtgtttcatcaccttccttctcccccgacctgtacctctggcaaccactgatctttttattgtctctatagttttgcctgtgttttaaagctttcacaaatacgcaaaaaaattggtgatatataaacttaccatttacagaagtcagagagttcagtaacagttcgggatatacataaaaagcacctgtttcattattattccattcagtttcggttgaagcctgaaatatggaaagtgaggttgcattttaataaagaatctaatacatgtattctccattcaaactacaccaagaattttcatttttaacatttttaaaagatagatatatagcaatctgacagaataagactgatttttgtatagtttccagaattccttgattttacttatttaattcatctaaagccagggccagtggttagccagtgtgccccggtgtggttatgtacagctgggtgttgatgctgacaagtgagtgtccttcccatactggttgtgaaatacatatatatatatttatttatatttatattactcctgtctataccatgagagacgtgtcttgtgtaaacttaaaatgctatataaatattagttaatataatagcgtgcccactaaattatgtatgttgccctctgatccatctttgcattttcctggggaaaaaagctgacctcagctgaagctgtgcaaataccaatcactccaaattatcatactgcacatgctttgtaggcaaggagcaaccattaaaaaaaaattatggtaatgggtagaggaagaaatatcaatggaaactgtttcataagatttcatgactcaaaaacgcatgccctgtgttcccactgtatttctcactgttaatctctttttagttttttcttcttcacctcttacaggcttctatcttcaatctcctttccttccttgctagttcaaactgtaactgacgatgggttttcttctcgactggcttcatttttgctgttcttccag

SEQ ID NO: 267 - DNA, 3376 bp, Homo sapiens
gtaggtggaaatgtattttattccactctctctgctgcttcactgtaaatctaatgttctcctctctcagaacaaataaaactgaaatgcagattggaaggccattagaggagggaatctttcaaatgtttaggatatgcaaataagccttcatggccaataatgatttcatggctttttgtgaaaaattctggctaatttagttcttagcaggtagatatttccagtgcctgtaataaagaagcattttccaagtggcatttttatttccaaagtgccatttttagaagtcctgtgtactgctgctttgaacagccagaccacaggcagcagttgcacaggggcatgttttcatgttctttactgactagtctcttccagaaaaacattaaaatgtatttctgtagatacaagtgcaagaaatttcatgacagtgtgatcttctttttaaaaaaaaaacaaaaaaaaccactttttttaattttaaaaagtcataaatactttgcaaacacgaatattgatatttgttccaaggggaatagaaaatactttgtattccttagttatttaaaaggattaatttaccttcatttcacaatgaatatttttattttccctatggattatggaaaagtgatctgcatttgctatacagaaataaaatattaaacctcaaattagaaatgccaagatatgtgggtcttttgtaatggaatctgctaaaaagatggatggatgtagtcccaaggacagttctgaggggactcgaagaataacgtacttttggtttgcaatttgccagtaagaccacattaggtgacagaaatgaggcaaattggtaccaactctacagtctgtctcttaatgagctgtggaaagttgtggagacaaagaacatttatagagacagagagaagggttagggactcatttagagaaaggcaatttccattcacaggcttgtaatgtatctccctggtgcatcttatcttctttgttcattggcctgtatgtcctaataccaagtcaaaatagaggctatgatttctagcatctgttttcctggaggcaaaattctcaaaatggataataaatatagttctgatcttatgatttatttttgtatttaactgttaaaaagaaaatctgagaactcaaggattaaaaaaaggaatacatatatatatccactagggagagataaggaatgtcaatttagattccactgaaaatttttatactataatagttaaagccaaatatgtatcaatgatataataagtgtctaatgtggattaataccatattatacctaagaaccgaaagagaaagaaagaaaaccctacaaaatatgtctagatagaaatttatacacccctctccagtataaataaatctcataaaaccttctgccagaacacacttctgtaacaaagaacccagggagatgatagaaacttgagcaatggtaatgcaaagccaattctcttactacctgcaaaggattttgtatctgaagggcctggccacatcatgaataacacttctgcatgcctactacacagcagaaatgtgctgcctccaagcagcattaatactgttttaatgcagcattgagagaatgtgaaccaagcaatgaaatgaaaatgaacatgaacaattatcttctttttagatataggaattcctgcaggacaattttagaagaaaatattgttaatgtgtgacactaattgacctcattaatattgatgtaggtttacctactaaacatggcttcacttgttgtaacctgatggattaaaaacttttgctattattgtgtccacagtttcagacaaataactctagtctaaggagatacatgcatttccaaaggaggaattctcctactacatcatttcaacaaaatgtacaaacatcattttagctgaattttaatacgcaaagaatcttacctgtattcataattttctgtagattcataattttctgtacttctgaatcccaagtttagtctccatggatttttatccctataatgtttaaaaggaaatataggaatagatttcttatgagaaattacagtaaaacctgcttcttaaatacttatatgtccatggatattttttataactaatagaccttactttttagagaaatttttaggtttatagaaaattgagaagatactagtgttccaatataccccttctcccccagcctacagtttctttattattaacattttgcattagcgtgatatatttgttaaagttggtggaccaatattgataaattcttattaactaaagtccatagtttactctagggttgactctgtgtgtgtggttctgtgggttttgacaaaggcatatcatgtatccaccattgcaggatcatgcagagtagctgcactgccctaaaagtctcctgtgtttcatcaccttccttctcccccgacctgtacctctggcaaccactgatctttttattgtctctatagttttgcctgtgttttaaagctttcacaaatacgcaaaaaaattggtgatatataaacttaccatttacagaagtcagagagttcagtaacagttcgggatatacataaaaagcacctgtttcattattattccattcagtttcggttgaagcctgaaatatggaaagtgaggttgcattttaataaagaatctaatacatgtattctccattcaaactacaccaagaattttcatttttaacatttttaaaagatagatatatagcaatctgacagaataagactgatttttgtatagtttccagaattccttgattttacttatttaattcatctaaagccagggccagtggttagccagtgtgccccggtgtggttatgtacagctgggtgttgatgctgacaagtgagtgtccttcccatactggttgtgaaatacatatatatatatttatttatatttatattactcctgtctataccatgagagacgtgtcttgtgtaaacttaaaatgctatataaatattagttaatataatagcgtgcccactaaattatgtatgttgccctctgatccatctttgcattttcctggggaaaaaagctgacctcagctgaagctgtgcaaataccaatcactccaaattatcatactgcacatgctttgtaggcaaggagcaaccattaaaaaaaaattatggtaatgggtagaggaagaaatatcaatggaaactgtttcataagatttcatgactcaaaaacgcatgccctgtgttcccactgtatttctcactgttaatctctttttagttttttcttcttcacctcttacaggcttctatcttcaatctcctttccttccttgctag

SEQ ID NO: 268 - DNA, 107 bp, Homo sapiens
tcacccctcccagtgtccagcctgtgtctcccccagcaattgtgtctaccagtctggctgctgacctggagggcctgacactcacagactccaccctggtaccgtcg

SEQ ID NO: 269 - DNA, 169 bp, Homo sapiens
gctccctgctcaacccaagccacctccactttgcctcctcatagtcttatctactcccacagtcacccctcccagtgtccagcctgtgtctcccccagcaattgtgtctaccagtctggctgctgacctggagggcctgacactcacagactccaccctggtaccgtcg

SEQ ID NO: 270 - DNA, 326 bp, Homo sapiens
gtgagtttgggtggtaaaagtcacaggggaaaggaggcctggggagcatgaattagaacagcccatagggactctggatcgggttcctcaggtcttgtgggagcaggggagcagacagaacatatcttcaggcctgagagggcagcagggctgacctccccaggtctggggttgaggtctaggaatgggtattttgcgagagcctccaggcagccatgtgccccgctgtccatggtgctgaaatgcgtgctccttgatccctaggctccctgctcaacccaagccacctccactttgcctcctcatagtcttatctactcccacag

SEQ ID NO: 271 - DNA, 264 bp, Homo sapiens
gtgagtttgggtggtaaaagtcacaggggaaaggaggcctggggagcatgaattagaacagcccatagggactctggatcgggttcctcaggtcttgtgggagcaggggagcagacagaacatatcttcaggcctgagagggcagcagggctgacctccccaggtctggggttgaggtctaggaatgggtattttgcgagagcctccaggcagccatgtgccccgctgtccatggtgctgaaatgcgtgctccttgatccctag

SEQ ID NO: 272 - DNA, 208 bp, Homo sapiens
tctagtggcaataccagtgtatgtgaaacatagtatcagctttaaggagaacagttcttgcggcagatttgatataacaattggaccaaagcagaatatggggaaaactattgaaggaattacagtgacagttcacatgccaaaagttgtgctgaacatgaacctgacacccacacaaggcagctatacatttgatccagtcaccaag

SEQ ID NO: 273 - DNA, 230 bp, Homo sapiens
tctagtggcaataccagtgtatgtgaaacatagtatcagctttaaggagaacagttcttgcggcagatttgatataacaattggaccaaagcagaatatggggaaaactattgaaggaattacagtgacagttcacatgccaaaagttgtgctgaacatgaacctgacacccacacaaggcagctatacatttgatccagtcaccaaggtacagccacttcaaatcaaga

SEQ ID NO: 274 - DNA, 1623 bp, Homo sapiens
gtacagccacttcaaatcaagagtgagcaagtgtttctgcaatctattttgtgatttgtggggaggaatggagggaaaggtttggcaccttgtttaaaactaaagttcgtatcaaaacctagagagcatactgtgctgtgcttctgccactggctgcagaaggaatcctgcagctgctactgagtagatgaacagaaaaatgtgtcattctgtcctttttcagagtgtgccttcactcatccattattaatccagagcctgactctgctatctaataagaaagaagtaaaagcttttttaaaaagagaaaacattatgtagattgaagaagatattatgatggtctatgaattactaagttttctatataaattgatcactaagacctttttcttcctttataatttaaaagcattatttcatactctttcacagggctaggaaagttgcttcctcactctacttaaatttttgtgtaacagagggttttcagagaaactgtagcagatgattttctctcagcttcctgattagctggtaaatatgattgttttcaatagcagagtcattgagctacctgataaatgaaaagacatgttttttgaataacatcatagaatgttaaagattatttaatacagttgtaaggattcaaagaacctcctcctggagaccacacagggctgagaaagggagcttcagattcctggccctttaccacagcttcaactatgacagctttgctttctttctcatctgctgttgagccttcacaccgaagatttcatttgaacaatgggtttcacagctaaaagttttaaaaacaccatcttaagtcaatctaattattttacagaaaaataaacagaggctgggcgcagtggcttacgcctgtaatcccagcactttgggaggccgaggtgggtggatcacctgaggtcaggagttcgagaccagcctgaccaacatggagaaaccccatctctactaaaactacaaaattagctgggcatggtggcgcatgcctgtatcccagctgcttgggaggctgaggcaggagcatcgcttgaacctgggaggcagagtttgtggtgagccaagattgcaccattgcactccatcctaggcaacaagagtgaaactctgtctcaaaaaaaaaagaaaaagaaacaggcccagagaaaagtgaagatggttatgatggagaacatttgaaatcagagggccttaggttcaaatcccagccttacctctgactaactatgtgaccttgagcgagtcatttgatctctgagccttaatgtcctctgagctttaatttcctcatttgtaaatagaagacaaaagctacttcacagccctcaatgagacaacatatgaataatgctaagcacggtgctaatacaaaagaaaatgctcaacaaatgtagattctctgctctcactccccattcaaagtcacagaattaatcagaggtaaactcactgtagatgccagatctcttgttttcaagagactgcacttcagtttgtacagaagtttatgatatctttgaactttgtttttgagggtttgtctttaataaatggttctatttgtttttcattttttgtctttttaag

SEQ ID NO: 275 - DNA, 1601 bp, Homo sapiens
gtgagcaagtgtttctgcaatctattttgtgatttgtggggaggaatggagggaaaggtttggcaccttgtttaaaactaaagttcgtatcaaaacctagagagcatactgtgctgtgcttctgccactggctgcagaaggaatcctgcagctgctactgagtagatgaacagaaaaatgtgtcattctgtcctttttcagagtgtgccttcactcatccattattaatccagagcctgactctgctatctaataagaaagaagtaaaagcttttttaaaaagagaaaacattatgtagattgaagaagatattatgatggtctatgaattactaagttttctatataaattgatcactaagacctttttcttcctttataatttaaaagcattatttcatactctttcacagggctaggaaagttgcttcctcactctacttaaatttttgtgtaacagagggttttcagagaaactgtagcagatgattttctctcagcttcctgattagctggtaaatatgattgttttcaatagcagagtcattgagctacctgataaatgaaaagacatgttttttgaataacatcatagaatgttaaagattatttaatacagttgtaaggattcaaagaacctcctcctggagaccacacagggctgagaaagggagcttcagattcctggccctttaccacagcttcaactatgacagctttgctttctttctcatctgctgttgagccttcacaccgaagatttcatttgaacaatgggtttcacagctaaaagttttaaaaacaccatcttaagtcaatctaattattttacagaaaaataaacagaggctgggcgcagtggcttacgcctgtaatcccagcactttgggaggccgaggtgggtggatcacctgaggtcaggagttcgagaccagcctgaccaacatggagaaaccccatctctactaaaactacaaaattagctgggcatggtggcgcatgcctgtatcccagctgcttgggaggctgaggcaggagcatcgcttgaacctgggaggcagagtttgtggtgagccaagattgcaccattgcactccatcctaggcaacaagagtgaaactctgtctcaaaaaaaaaagaaaaagaaacaggcccagagaaaagtgaagatggttatgatggagaacatttgaaatcagagggccttaggttcaaatcccagccttacctctgactaactatgtgaccttgagcgagtcatttgatctctgagccttaatgtcctctgagctttaatttcctcatttgtaaatagaagacaaaagctacttcacagccctcaatgagacaacatatgaataatgctaagcacggtgctaatacaaaagaaaatgctcaacaaatgtagattctctgctctcactccccattcaaagtcacagaattaatcagaggtaaactcactgtagatgccagatctcttgttttcaagagactgcacttcagtttgtacagaagtttatgatatctttgaactttgtttttgagggtttgtctttaataaatggttctatttgtttttcattttttgtctttttaag

SEQ ID NO: 276 - DNA, 143 bp, Homo sapiens
ttcctggcctggaacagcccacccctcacctccgagtttgtggcgctcctcccggccctggtggacgctggcacagccctggagatgctgcacgcgctgctggacctgccctgcttgacggcggtgctggacctgcagctcag

SEQ ID NO: 277 - DNA, 181 bp, Homo sapiens
ctccgagccgtgtccgaaccgctgtgctgtgcccacagttcctggcctggaacagcccacccctcacctccgagtttgtggcgctcctcccggccctggtggacgctggcacagccctggagatgctgcacgcgctgctggacctgccctgcttgacggcggtgctggacctgcagctcag

SEQ ID NO: 278 - DNA, 1205 bp, Homo sapiens
gtatatttgggcatccctgggtgccagggcaggggcatggtaagtccctggggctcctcccctctttccagcggggttcagggcgagtcctggctgagcatagagccctgtgagtcccgggcctggaatgcggtgtgcagggtgaggtggggatctggggtgtccctgcagcgtcacgtgattgacggtgctgtccaagaactcccttgtgggtgttttggagagggggctgtgacacaagacggtgagtttgttctcacagcactggggcagggctgctgcctggtaggatccctcccccgggagccctgcctggtgccttgggcacttgggtgccatttgccttttttttttcttttgagatggagtctcattcctgtcacctaggctggagtgcagtggcgcaatctcagctcactgcaacccccgcctcctgggttcaagcgattctcctgcgtcagccacctgagtagttgagattacaggcacccaccaccatgtccagctaatttttggtatttttagtagagatggggtttcgacatgttggccaggctggtctcgaactcctgacctcagatgatcctcctgccttgacctcccaaagtgctgggattacaggcatgagccaccgcacccggcctggtgccatttgcttttgaagtgtcttttgcagcctcgcctcgctgtaaggtcttttcaactgaggtggggaatcctctttctggagaaaaaccaggacagtggaaaattattgacctgttggtacgaaagtagatacaggctgggggcagtggctcacacctgtaatcccagcacctcgggaggccaaggcaggaggatcttgaggccaggagttcaagaccagcctgggcaacacagggagacctcttgtctacaaaaagtaaacagcctcacatggtggtgtgtgcctgtagtctcagctgctcaggaggctgaggtgggaggatcacttgagcctgggaggttgaggttgcagtgagctatgattgcaccactgcactccagcctgggcgacagagcaagaccctgtctcaaaaaaataaaaagcgggaggaggcaaaggtagaagccctcctggggactgcaggtctgggacagctgtggggccctagctggctcctccctctgccgcctgctccacagctccgagccgtgtccgaaccgctgtgctgtgcccacag

SEQ ID NO: 279 - DNA, 1167 bp, Homo sapiens
gtatatttgggcatccctgggtgccagggcaggggcatggtaagtccctggggctcctcccctctttccagcggggttcagggcgagtcctggctgagcatagagccctgtgagtcccgggcctggaatgcggtgtgcagggtgaggtggggatctggggtgtccctgcagcgtcacgtgattgacggtgctgtccaagaactcccttgtgggtgttttggagagggggctgtgacacaagacggtgagtttgttctcacagcactggggcagggctgctgcctggtaggatccctcccccgggagccctgcctggtgccttgggcacttgggtgccatttgccttttttttttcttttgagatggagtctcattcctgtcacctaggctggagtgcagtggcgcaatctcagctcactgcaacccccgcctcctgggttcaagcgattctcctgcgtcagccacctgagtagttgagattacaggcacccaccaccatgtccagctaatttttggtatttttagtagagatggggtttcgacatgttggccaggctggtctcgaactcctgacctcagatgatcctcctgccttgacctcccaaagtgctgggattacaggcatgagccaccgcacccggcctggtgccatttgcttttgaagtgtcttttgcagcctcgcctcgctgtaaggtcttttcaactgaggtggggaatcctctttctggagaaaaaccaggacagtggaaaattattgacctgttggtacgaaagtagatacaggctgggggcagtggctcacacctgtaatcccagcacctcgggaggccaaggcaggaggatcttgaggccaggagttcaagaccagcctgggcaacacagggagacctcttgtctacaaaaagtaaacagcctcacatggtggtgtgtgcctgtagtctcagctgctcaggaggctgaggtgggaggatcacttgagcctgggaggttgaggttgcagtgagctatgattgcaccactgcactccagcctgggcgacagagcaagaccctgtctcaaaaaaataaaaagcgggaggaggcaaaggtagaagccctcctggggactgcaggtctgggacagctgtggggccctagctggctcctccctctgccgcctgctccacag

SEQ ID NO: 280 - DNA, 89 bp, Homo sapiens
agccaacgtcctggaaggcggggacccaaccttcccacagctcacagcatccccccacagcatggacagcatgctgccctctggagaag

SEQ ID NO: 281 - DNA, 184 bp, Homo sapiens
gtccagagtggacaccggacaccttggccaagttgaatggtgcacagttctgagcaggcctgactcacgtttccttattgctgggatgttcacagagccaacgtcctggaaggcggggacccaaccttcccacagctcacagcatccccccacagcatggacagcatgctgccctctggagaag

SEQ ID NO: 282 - DNA, 877 bp, Homo sapiens
gtaagtacttttcctatatctgaagctccccttgcttcaaacagatgcctagggttcctcatctgggaaatggggtgcaggcaacatccagtatcacatcctttaatgccatcttgctaatacctgtgaagcctcaggactggcagaagctagaaaggattgttaacaaagggacaagcttcaggacttgtaccatgcaggccctggcttatgaaactgctccaggaaatagcaacatttccttccagataaagcagctaacctttgaattccacaggccctgcaccctaggcatccacttgtgctgctgtggaggaaggggttggcaatctatgaaaggctcattcaggcactagctcacactggccttggctgaggatggggaggtctccatacctgtcaggcagggggcccaagcactggcagctggaatgccatctcaaaaggctgctacctgctagatgagcagagggaggtgaaggagcctctctttggccaggcctgctccccacttttccttccccatagtgtccaaaaccccacctatggtaagagctgtgtgaggggccggggctaggtgcactgcaggctggcaggaggaggtgctgtaatgatggcagtaggttactgcagccaccacctctgctgaactgtgtcccacacatattaggaaggcctaggcaggcagtggggccaaaggccaggatgctatccattatattatcaaacagtgagacctgtttacccactcagacagacacttcattttctggcctgtccaggtccagagtggacaccggacaccttggccaagttgaatggtgcacagttctgagcaggcctgactcacgtttccttattgctgggatgttcacag

SEQ ID NO: 283 - DNA, 782 bp, Homo sapiens
gtaagtacttttcctatatctgaagctccccttgcttcaaacagatgcctagggttcctcatctgggaaatggggtgcaggcaacatccagtatcacatcctttaatgccatcttgctaatacctgtgaagcctcaggactggcagaagctagaaaggattgttaacaaagggacaagcttcaggacttgtaccatgcaggccctggcttatgaaactgctccaggaaatagcaacatttccttccagataaagcagctaacctttgaattccacaggccctgcaccctaggcatccacttgtgctgctgtggaggaaggggttggcaatctatgaaaggctcattcaggcactagctcacactggccttggctgaggatggggaggtctccatacctgtcaggcagggggcccaagcactggcagctggaatgccatctcaaaaggctgctacctgctagatgagcagagggaggtgaaggagcctctctttggccaggcctgctccccacttttccttccccatagtgtccaaaaccccacctatggtaagagctgtgtgaggggccggggctaggtgcactgcaggctggcaggaggaggtgctgtaatgatggcagtaggttactgcagccaccacctctgctgaactgtgtcccacacatattaggaaggcctaggcaggcagtggggccaaaggccaggatgctatccattatattatcaaacagtgagacctgtttacccactcagacagacacttcattttctggcctgtccag

SEQ ID NO: 284 - DNA, 178 bp, Homo sapiens
gggcacccgcagggactacattatggccaagtatgtggagcataggtttgcacgccggtgcacacctgagcctcagcgactctggacagccatttgcaacagggacctcctgtcggtactggaggcctttgccaatgggcaggactttggacagccgctgccagggcctgatgcacag

SEQ ID NO: 285 - DNA, 1232 bp, Homo sapiens
gtgagaacccctccaagggccacttataacccacctgtctaacatattccccagttcttctccaggaccagctgttactcccctccaccccacctctgacatctgctcagatctcacccatcagagtggtaagtgggaaagagcacagcttcagtcaggcagacctgggtgggaatcctggctctgttttttcctagctgtgtgatctagggcaggttacttctctgagtctcatttcctcatctataaaaggggttaataatagcacccacggtgatgaagtgagaagtcatgtatataaagggcttagtgtacaatgggcatgcaataaacgttaatatctttttctttcacctaaatagccctgaaatataagggcatgtcagtttagagccaggaaggccacattgctttggctattccaagaacaaacacatgagcatggagaaaggatatcagagacatttgaaaaagtaaatcaacaggagttgctgactgattcgacatcaaaaattggatgttggctgggtgtggtggctcacgcctgtaatcccaacactttgggaggccaaagtgaaaggatcacttgagcccaggagttcagaatcagcttgggcaaaataaggaaacccccatctctacaacaacaactaaaattagctgggtatggtggcacacacctgtggtcccagctactcagaaggctgaggtgggagggtggcttgagcccaggaggttgaggctacagagagctgtgattgcgccactgctctccagcttgggtgacaaagcgagaccctgtctcagaaaaactaaaaacgggtatctttgaactgtctgtctgatatcttggtgggctatccaatgggcagtgcagcacttaggtgaggtaagaatttggaacagcctgcacatgtgtgatagttgaaaatgtgaggttgctgaggtcttggtggggaagtgcgatcagggagaggagccgagagctgagaaagaagtttgggaaacacttgttgggggcagaggaggaagagccgtgaatgggaacaatgggagaatggcccttcaccttcctcccagacatgaggctctgcccttgcagtctcatctctccagggttctggcagcttcctatggggggataaggggttagcaagagttcaagagggaaatactgggttggaggcaggtgcactggggggggaatctcagaggtgtggatgtgttttcag

SEQ ID NO: 286 - DNA, 306 bp, Homo sapiens
gggcacccgcagggactacattatggccaagtatgtggagcataggtttgcacgccggtgcacacctgagcctcagcgactctggacagccatttgcaacagggacctcctgtcggtactggaggcctttgccaatgggcaggactttggacagccgctgccagggcctgatgcacaggtgagaacccctccaagggccacttataacccacctgtctaacatattccccagttcttctccaggaccagctgttactcccctccaccccacctctgacatctgctcagatctcacccatcagagtg

SEQ ID NO: 287 - DNA, 1104 bp, Homo sapiens
gtaagtgggaaagagcacagcttcagtcaggcagacctgggtgggaatcctggctctgttttttcctagctgtgtgatctagggcaggttacttctctgagtctcatttcctcatctataaaaggggttaataatagcacccacggtgatgaagtgagaagtcatgtatataaagggcttagtgtacaatgggcatgcaataaacgttaatatctttttctttcacctaaatagccctgaaatataagggcatgtcagtttagagccaggaaggccacattgctttggctattccaagaacaaacacatgagcatggagaaaggatatcagagacatttgaaaaagtaaatcaacaggagttgctgactgattcgacatcaaaaattggatgttggctgggtgtggtggctcacgcctgtaatcccaacactttgggaggccaaagtgaaaggatcacttgagcccaggagttcagaatcagcttgggcaaaataaggaaacccccatctctacaacaacaactaaaattagctgggtatggtggcacacacctgtggtcccagctactcagaaggctgaggtgggagggtggcttgagcccaggaggttgaggctacagagagctgtgattgcgccactgctctccagcttgggtgacaaagcgagaccctgtctcagaaaaactaaaaacgggtatctttgaactgtctgtctgatatcttggtgggctatccaatgggcagtgcagcacttaggtgaggtaagaatttggaacagcctgcacatgtgtgatagttgaaaatgtgaggttgctgaggtcttggtggggaagtgcgatcagggagaggagccgagagctgagaaagaagtttgggaaacacttgttgggggcagaggaggaagagccgtgaatgggaacaatgggagaatggcccttcaccttcctcccagacatgaggctctgcccttgcagtctcatctctccagggttctggcagcttcctatggggggataaggggttagcaagagttcaagagggaaatactgggttggaggcaggtgcactggggggggaatctcagaggtgtggatgtgttttcag

SEQ ID NO: 288 - DNA, 227 bp, Homo sapiens
aacaaaatggcggcggcagcggtgtcgctttgtttccgcggctcctgcggcggtggcagtggtagcggcctttgagctgtggggaggttccagcagcagctacagtgacgactaagactccagtgcatttctatcgtaaccgggcgcgggggagcgcagatcggcgcccagcaatcacagaagccgacaaggcgttcaagcgaaaacatgaccgctgagcccatgag

SEQ ID NO: 289 - DNA, 235 bp, Homo sapiens
ctcggcccaacaaaatggcggcggcagcggtgtcgctttgtttccgcggctcctgcggcggtggcagtggtagcggcctttgagctgtggggaggttccagcagcagctacagtgacgactaagactccagtgcatttctatcgtaaccgggcgcgggggagcgcagatcggcgcccagcaatcacagaagccgacaaggcgttcaagcgaaaacatgaccgctgagcccatgag

SEQ ID NO: 290 - DNA, 239 bp, Homo sapiens
gagcctcggcccaacaaaatggcggcggcagcggtgtcgctttgtttccgcggctcctgcggcggtggcagtggtagcggcctttgagctgtggggaggttccagcagcagctacagtgacgactaagactccagtgcatttctatcgtaaccgggcgcgggggagcgcagatcggcgcccagcaatcacagaagccgacaaggcgttcaagcgaaaacatgaccgctgagcccatgag

SEQ ID NO: 291 - DNA, 244 bp, Homo sapiens
tgcctgagcctcggcccaacaaaatggcggcggcagcggtgtcgctttgtttccgcggctcctgcggcggtggcagtggtagcggcctttgagctgtggggaggttccagcagcagctacagtgacgactaagactccagtgcatttctatcgtaaccgggcgcgggggagcgcagatcggcgcccagcaatcacagaagccgacaaggcgttcaagcgaaaacatgaccgctgagcccatgag

SEQ ID NO: 292 - DNA, 364 bp, Homo sapiens
aacaaaatggcggcggcagcggtgtcgctttgtttccgcggctcctgcggcggtggcagtggtagcggcctttgagctgtggggaggttccagcagcagctacagtgacgactaagactccagtgcatttctatcgtaaccgggcgcgggggagcgcagatcggcgcccagcaatcacagaagccgacaaggcgttcaagcgaaaacatgaccgctgagcccatgaggtaaaacgcaaccccgtctcatgggccccagcggtctgggcccaggcaccgtctgagtcgggtgtttgggaaggcgttcgcttggtgggttaggcctgtgtgttgcttagccgaaagaggcatcgttttctctttag

SEQ ID NO: 293 - DNA, 372 bp, Homo sapiens
ctcggcccaacaaaatggcggcggcagcggtgtcgctttgtttccgcggctcctgcggcggtggcagtggtagcggcctttgagctgtggggaggttccagcagcagctacagtgacgactaagactccagtgcatttctatcgtaaccgggcgcgggggagcgcagatcggcgcccagcaatcacagaagccgacaaggcgttcaagcgaaaacatgaccgctgagcccatgaggtaaaacgcaaccccgtctcatgggccccagcggtctgggcccaggcaccgtctgagtcgggtgtttgggaaggcgttcgcttggtgggttaggcctgtgtgttgcttagccgaaagaggcatcgttttctctttag

SEQ ID NO: 294 - DNA, 376 bp, Homo sapiens
gagcctcggcccaacaaaatggcggcggcagcggtgtcgctttgtttccgcggctcctgcggcggtggcagtggtagcggcctttgagctgtggggaggttccagcagcagctacagtgacgactaagactccagtgcatttctatcgtaaccgggcgcgggggagcgcagatcggcgcccagcaatcacagaagccgacaaggcgttcaagcgaaaacatgaccgctgagcccatgaggtaaaacgcaaccccgtctcatgggccccagcggtctgggcccaggcaccgtctgagtcgggtgtttgggaaggcgttcgcttggtgggttaggcctgtgtgttgcttagccgaaagaggcatcgttttctctttag

SEQ ID NO: 295 - DNA, 381 bp, Homo sapiens
tgcctgagcctcggcccaacaaaatggcggcggcagcggtgtcgctttgtttccgcggctcctgcggcggtggcagtggtagcggcctttgagctgtggggaggttccagcagcagctacagtgacgactaagactccagtgcatttctatcgtaaccgggcgcgggggagcgcagatcggcgcccagcaatcacagaagccgacaaggcgttcaagcgaaaacatgaccgctgagcccatgaggtaaaacgcaaccccgtctcatgggccccagcggtctgggcccaggcaccgtctgagtcgggtgtttgggaaggcgttcgcttggtgggttaggcctgtgtgttgcttagccgaaagaggcatcgttttctctttag

SEQ ID NO: 296 - DNA, 68738 bp, Homo sapiens
gtaaaacgcaaccccgtctcatgggccccagcggtctgggcccaggcaccgtctgagtcgggtgtttgggaaggcgttcgcttggtgggttaggcctgtgtgttgcttagccgaaagaggcatcgttttctctttaggtgagaagggtttcggggtatcggcgcaaggctccgacgggggtgggggtggggatggggtggggggaggtggggggggcgcggcctagggtatggggcgcttcttgcaatctcccctaaacggtgacgcttggtcgggctcctctgtttattctttggtgcctgtgggattgagacctcgaagtcggaggcggtctttggtatcccggtcatttttgctaatctttgggcctagaaactgcgtggggaagaagcggggggagggtgagaagagggggaggggtgggcgggcgcgaggatgtgagatcccaggacgacttagaggcgtttaggttgctggagatgggaagcacccgggccctgcgggattttttttctgcagccccaggagacaagcctttttttgattgggttgtggtgcagttccaggtatttaggtatcttttctactccatatcctgaaggatatccttgggtttatttctaggcgaggggggacttaacacagggttttgcttccagaggaccctagtatactactttttgtgatgtccagccttaatgggacctcaagtgtttccccactttctgggcaaatttcgaggagtaattaggccctatctttatttacttatttattccatgaaggatgaagggcaggttaacgtgggctgatgcgaagtaagatttattgcaagggaaaatgcctggcaggcctcctcttaaccaatcaagcacgtttattaggttgaagctgtttttctgtgtgcttctgatttgcctcttgacgggtctgaaaatttgggtagtcaatatgaaatgtatacacttttacccaggtggctggctggcgtttcagtttgacatttgaattttcatcccacaatgtgaattaagtaatttttttactcggagatgcatccttggcgtccagtggcaaaataaaattacaaggagcatgggtcagaattgcatttcaagttggcgaaatgtgcctttgagtaactcttagattggcatatgtttttagagcaatttagctagaatgtagaattgggcaatgagcctatgatacgtatgtctgtatttctgcatgaacaagcagtagattatattttctttaccttggggaaagatatgcttcagttcttagattgtagatctctagttgtgtacacgattgtggccttggtttctgaatttgtcagtaggctcaaatacaacaaatctttatctgtggggtattaggcacgtaagtggtacccagtataacttgttggcctgtaattaccaggcactcatgttcatatgcatggatggtgtaccttacagttaaattatgacctctagattttactaagtttcacaaagtctacatttgaaactatagtttgaagtcggatcttctcagtttctttagaatgaacaaattacgtatatagaatttctgaatagaataattaattttacacaagggtcagtttttcttactagtcttggatttttgtagatcttgatgataagagtaataatcataactaagttgagtgcttattgtcgttctttataatcttgatgaattctcaaacctgtgaggtaagtacttggttttgcccattttaccgatgaggaggaaagtgagacatagatcaagaacttgaccgaagttatacagcttgtaattggtggagctggaattgaaccccatcttgacttcacagcttatgttcttaaccacaaggcattaatgcccccttcagctgccaggtctaacctgattatgaccatttaaatttagcccaagtgttacaatgaaagaagttcatattacctactctgatttgttgcaggtctatgattttgtagctgtttataatgttacattttttgtgtccaggtgtactatgtagtgagataactgaaatatttaatgctaggagagtcttaagctacatgaaaaacctctagtaaagaactgcatatatgcatgtagggaattaattaaaaagtgtgacactccctgatgatttactatgaaagagctccaagtaggtgttcagaactgtctcaggctgaagtgtcatcgatctcctaaaccataatcatggttaaaggagaatctgacaggtaatgcttgagttgaacccacagtaccaaatccctcttgagtcttttctaatgtgaggcagaaataatataagcattattgttaatattattttacacagtagttccagattttctctttatcaaatattttgtcaagcacttaaaaagcaggaacaaagactagttctaatttttacttgtgtttataaaaaaaagtaatattctaggattctgtggtggaaaaatggccagaagacaagaggaaggaaaataaaccgatgacctggctaaaacatacactgactaatcagtggctcagtctttaaaggttttgttgtttttaaaggatttttttggttgtttgtgttgtttgaaataagattgacttgcttctggcattataaaagataaggtcttttataatcaccaagctctcaatgtagtacttgggtacctgggtgtcactgctgattattttttaatttttaaatttatttttttgagacagagtctcactttgttgcccaggctggagtgaaggggcgtgatcttggcttactgccgcctccgcctcccaggttcaagtgattctcatgcctcagcctcccaagtaactgggattaacaggtgtgtgccaccacgcctggctaatttttgtatttttagtagagagggagtttcaccatattggctaggctggtcctgaactcctggactcaagtgatctacctgccttggcctcccaaagtgctgggattacaggtgtgatccaccgcgcctggctctctgctggttattcagggcccaagggctcttcagttatcaggtgatgtatgctgctaggactgggaccttcccttcagggcagcagattcccttctggcccaggatgtgtctagaattgtcatcctggagctagggcctggaatggaggcttcatgactgatgaactttaatttgttttctttatttttattttttttgagatggagtctcactctgttgcccaggctggagtgcaatggcaccatcttggctcactacaacctttgcctcctgggttcaagcgattctcctgcctcagcctcccaagtagctgggattacaggcaagtgccaccacacctggccaatttttgtatttttagtagagacggggtttcaccatgttggccagccaggctggtctcaaactcctgacctcaggtgatctgcccgcctctgcctcccaaagtgctgggattacaggtgtgagccactgcgcttggccttaatttatttgcatataaagatttcagtattgggagatttggtgaaatttgtcattctaatccttatggcaattgattacttgaaaagctgacagctatattaccttgttattgatcttaaatataaaaaggcagaagttgtctaaattgagagattttgaatgtcttagaaagtatctgttaaggtggtagtttacaagcagttacattgtaacctaattgttgaaaaatgttatctgtgaaatacttgcatttccactatgaaaagcatgaaaccaggcccttggagggggaggagatgcaaattttataaaggtttttaaaaagcatttaaatatcaatggcttggttatgtaatgggttggggtgaaaagaaagacatttgtgaccttaatttttatcaggcccagttttattattggccacccttggcatagttggccttgagctttcagttatgtattgtatttctagagataagataaatgtagtacttaaaataatatttaagtattgatgtaggtgtgtgaaataattgtttcataagtaattgtatgtgtctttttcacttttggggtctgaataaacttatgggttgggtaataggatacgggcaattcttgaatttacatgaagtgctttcccccagaccgtgaatgttcttttggatatcagaaactatttaaatagttgaagccagtgaaaactgatgcatagatcttcctttagaaatgttgaatataacagggcagtgaaaggagggtctaagcagtctgtctctaattttatcctaatgcttgtcttatgatcagcttggaagctgacatgcaagatgtttaacttctatttttccatctgtaaaatgggaataagctcaaatgggagtaaatatcaatatttatcaataatagatattgataaagtctaaaggtattctgaaggaggtaacatgtttgtaacaatggttcttaaaagagaaactaaagctctggggtcctagttttttttttttttttttttttttgagacagagtctcactatgttgcccaggctggagtacagtggcacgatctcaggtcactgcaaactccgccctccgggttcacgccattctcctgcctcagcctcccgagtagccgggactacaggcacctgccaccatgtgcggctaattgtttgtatttttagtacagacagggtttcaccgtgttggccaggatggtctcgatctcctgacctcgtgatttccacccgcttcggcctccaaagtgctaggattacaggtgtgagccaccgcgcccggctgttaatttttaagagtgaaaagaggtgctgcgactaaatggtttgagaactgcttgtatagaggaatgaacactgaactgtgagccaagccttggtttttcagttatagctctgttgcttgattgtatgactgtggacaaatcatttatctgttccaggcttctgctttgtcatttgcagaacgaacaagactagatggtctgtagcattaatttttttttgggacaaggtctcactgtcacccaagctgtagtgcagtgacactgaacatggctcactgtagccttgacctcctggctcaagcaatcctcctgcttcagcctcccatgtagctgggaccacaggtgtgtcatcatgccccgctaattttttgatttttttgtagaaacagtggtctcactttgttgcccagtctggtcttgaactcctggacttaagcgatcctcctgccttggcctcccaaagtgctgggattacaggtgtaaaccaccataccctgcctaaagttagtttttaaaaaattctgcttacaggccacgtgcagtggctcacgcctgtaatcccagcactttgggaggccgaggcaggtggatcatgaggtcaggagttcaagaccagcctggccaagatggtgaaaccccatctctactaaaaatacaaaaaaaaatcatctcggtgtggtggtgggcacctgtaatctcagctactagggaggctgagacagagaattgcttgaacccaggaggcggaggttgcagtgagctgagattgcgccactgcagcctgggcgacagggtgagagtctgtctcaaaaacaaaaacaaaaacaaataagcaaaaaattctgcttatatgagtgtttatcattttctcttatctgccttttgtgggttagggagaagggtagtggtgagataaagtttctttattcagtgtatttatatctttttgccttaaaacttacatggttaggttacaggtgttttgttgctgatacttgtcatagtatcatgtatacctggttgtataaacatttattggaaaggaaaaaacatttttgttggaaagtttggtaattattgtggcttaggatatgttctattttgaaagattgctatatccagtatatttctgcccttttatgattgaagatgtacgtctgaaaatacctatgttagttctagccggttgttctttttgcgctgggaagtctttgaattttgcactgtagctgctattttcagatcctgtctctgaaactttgtctctcagttttagcttgaagtagccatttcctgtatctgtagtccagcactcttgttaactgtcccatacaatatttgttaagaaattattgttctggcagtagtattcacatgtatatatcctgcactccatattttgggggaatgctttattagttgatcaaatacttaagtatcaatttggggccaggcatggcactgtgttagggttatgccaaaggtaataaaattcctgccatcttaaggcattcttagtcaagtgagggagattggtaagtaaatgagcaattagaaagcagtgctaaaatatggaaatatattgattgcgctagggatcagaaatgaaagaaagcctaatttgggggatgtctaggaaagttttgcaaaggagatgttaactgtattgagtcttgaatgagttagcagttaagggttgactgtgagagggcagtccagacagctattagtatggttaaagattagtcttattttccatatatcagaggaaataagacatgtacacgattagttttggtgcaagatataaagtgataaatgctgcatgaagtaaaagtaagttgttgtgtgagttcaaagtagaaagacatttctggtggggaccaaggaaagctttatagagagatagcatttgagccgggcgccgtggctcacacctgtaatcctagcactttgggaggctgaggcgggtggatcacgaggtcaggagatcgagaccatcctggctaacatggtgaaaacccgtctctactaaaaatacaaaaaaaaaaaaaaaaaaaaaaaaatccgggcatggtggcgggcgcctgtagtgccagctgctcgggaagttgaggcaggagaacttcgtgaacctgggaggcggagcttgcagtgggccgagatcgcgccactgcactctagtctgggcaacagagcgagactccgtttcaaaaaaaagaaaaaagagagatagcatttgaatctagtccttggaatataggtacagttttgacaaaggagactgtgggagaattccagatgtgaggagtagcagcttgagcaaaggaatgttgtgtatattagcattttctatttggaagaaggtcaacatcgaattttaaacttaatttctggacaaatactgtataactattgtgcctttttttttttttttgagacgtagtctcgctctgtcacccaggctggagtgcagtggcatgatcttggctcactgcaacctccgcttcccgggttcaagcgattctcctgcctcagcttcccgagtagcttggactacaggcgtgtgccaccatgcctagctaatttttgtatttttagtagagatgggatttcaccgtgttggccaggatggtcttgatctcctgacctcatgatccgcccgccttggcctcccaaagtgctgggattacaggcgtgagccaccgcgccctgcctattgtgcttttttttttttttttaagagacagggacttcctctgtcacccagcctggagtgcagtggggtgatcatagctcatagcttactgcatcctagaactcccgggctcaagtgatcctcccacctgagcctcctgagtagctgggaccacaggcatgtgccactatgcccagctactattgtgcattttgtatggtagcttttgtggcttgatgatcttgtaaaaggtacatgtgcctttgtgaatgggcctgataattttagttcagaattgtcaaaagtattatctacttttttttttttttttgagacagagtctcactctgtcacccgggctcagtggcaccatctcagcttactgcaacctccacctcctgggttcaagcgattcttctgcctcagcctccgagtagctgggactacaggtgtgagccaccatgcctggctagtttttgtatttttagtagagacggggtgtcaccatattggccaggctggtctcgaactcctagacctcgtgatctgcccacctcggcctcccaaagtgctgggattacaggcatgagccaccgcgcctggccagtattacctacttttaaataagattgtgtaggatttaatgcacagattttgaatcactgtgataaaaatgcatccttagttgtcttcattttgctcatttgaagtgctcagttgacttttgggtgggtaacatttgacttatagaatctaagataaaaaattatttctgagtaatactggatttgttattttgcttatttggattatattagttattttttggtttatttgatagcattccagatttagttttgctataatgcttgttttgaaaatgtggattttttccaaaagggttgatatttcagggaacaatttgaagcatacgacaaaatttgcatttgcttatgggggattttgtctgcagggtcagggatcagcatactgtggcctaccaaccagtggcctgttttttgtaaataaagttctttttttttgtttttgatctttgttttgttttgttttgttttgttgagacggagtcttgctctgtcgcccaggctggagtgcggtggtgtgatgtccgctcactgcaacctccgcctcttgggttcaagcgattctcatgcctcagcctcacgagtaggtgggatttcaggcatttgccaccacgcctggctgatttttgtattttttttttttttttttttttttttttttttagtagagacagggttttaccacattggcctggctggtcttgaactcctgacctcaggtgatccgcctgccttggcctcccaaagtgcagggattatagatgtgagccatgtaaataaagttctattggaatacacctatgtccatttatttacattgtctgtggctgcttttgcactgtagttgcagagttgaatagctgcagcagagacctagtagcccacaaagcctaaaatgtttactgtctggccctgtattgaaagagtttgctgattattgtgctagatgaatgcaggatactacacccctctaaaaagagctgcatagaaatacatgcatatagatgcacacacgtctgacatctaccagctacctcatttcaccacttgggttataaaccacacatatttacatctgttgtacaattttcaatccgatttcagataaccttccttctaccacttcacaataattcatgagctgcaacccttttgatgcccacttcacaagcaaacttcaggtctttttcaaagtaaagtgccacatttattgttatatttgagcatttattatttaacatgtcaaactgtgctaccatttttctttggtttctttgttttaaaaaaagtcactgatgaaatttttgaatgttgtgcttctaacctcatttttcctatgagttctatggtgttaattgcacaattttacatagtttggtggtttttaggaacccatatgttacattattgaggaactgactaattatcatcctgtaaaaagtactaattcattcaccaaacatttctggggtgatgtaaatattaagtgagttaaatgggcataaagcacttatgtctttattgttactcaaatattagttattactgattactattaccatgtgtcaggaactgtaataagtagtgcattgatgaacaagacagataagggacctgtctccatgaagcttacattgtatttttaaaaatctattaatatacattttggctagtaaccgagcccttgccccacagaaaagttgtgctgttacacaaaataatattttaagatccatccacaagtcaaagacatttcacttaaaacagctttctcagcagtgtctccttgatagggtataatattttattgaattattgtttttggctgggtgcagtggctcatgcctgtaatcccaccactttgggtggccaaggcaggtggttctcctgaggtcaggagttcaagaccagcctggccaacatggtgaaaccccgtctctactaaaaatacaaaaattagccgggcgtggtggcgcatgcctgtaatcccagctactcaggaggctgaggcaaaattgcttgaagccgggaggcagaggttggagtgagccgagatatcaccaccgcactccggcctgggcgacagaatgagattccgtttcaaaaataaataaataaataaataaataaataaataaagaattattgtttttaatttttgtttttttctgagataggctgttactctgtcactcaggctggagtgcattggtgcagtcatggctcactgcagcctccgcctccctggttgcaggtgatactcccacctcagcctcccgaatatctgggactataggtgcatgccaccatgctgagttaatttttgtatttttttgtggagatgagtttttgccatgttgcccaggctggtatcgaactcctggactcaagctatctgccctctttggcctcccaaagtgctgggattataggcatgagccaccaaacctggccatgtgattgtttttttgtaactgtaacctcaggagatgaatccgatctatctttagggagataaagagtaatcatcccttcctttttttactgtataaaaggttacaaaatataatttcagacttgtagaaaatttgtaaaaatagcacaaagattctcagatgtgcttcatccagatgcagcaaggggtaacattttaccatgtttactttatcatcctctattattatttttctgaattgtttcagagtaaattgcagacatgatgtccctttactcccaaatactttaatacatatttctcgaaactaggaatagtctgttacatgatcccagtatagttagcaaaattaaaaattagcattaaggctgagtgcggcctcccacacctgttatcccagcactttgggaggctgaggtgggaggattgtttgaggccaggaattcaagaccagtcttctcaacatagaccctgtctctacaaaacaaacaaacaaacaaacaaacaaacaaacaaaagtactaaattagccggtgtggagcatgcctggagtcccagctactcagaaagctagagtcaggaggatcacttgagcctagaagttccaggctgccatgaactatgatcatgccactgcagtctagtgtgaatgacagagtgagacccccatctcttaaaataaaagagagattagcattgatacaataccatttttttttttttgagacagagtctcacactgtcgcccaggctggagtgcggtggcgcgatcttggctcactgcaagctccgcctgctgggttcacgccattctcctgcctcagcctcccgagtagctgggtctacaggttcccgccatcacgcccagctaattttttgtatttttagtcgagacgggttttcaccgtgttagccaggatggtctcgatctcctgacctcatgatccgcctgcctcggcctcccaaagtgctgggattacaggcgtgagccactgcacccggccgatacaataccatttttaatctacagaccttattcacattttaccaattgcttcatgacatccttcatgatgaaagacaaaaagttcttgttttctgatctaccatctaattctagaacactcattatatttcattgtcatctggaacagctcaccttgccatttttttttttttgagacagttttgctcttgttgcccaggctggagtgcaatggcatagtcttggctcactgcaacctccatctcccaggttcaagtgattctcctacctcagccacccgagtaactgggactacagacatgccccaccacgcacggctaattttgtatttttagtagagatggggttgcaccatattggtcaggctggtcttgaactcctgacctcaggtggtctgcccgcctcggactcccaaagtgctgggattacagatgtgagccactgcgcccggcctcttctccatttttaaaagaacacaggccagttgatttgaatttgtctgatgtttccctttgattatatattttggtaggaacactatgaagtgatgttttgtccttcacagcacattttatcaggaggtgtataatgcctttgcttttactatgttttagaatgattttgctttgtttttttttttctgagacagagtcttgctctgtcgcccaggctggtgtgcagacgtgcgatctcggctcactgcagcctccgcctcctgggtccaggcgattctcctgcctcagcctcctgagtagctgggactacaggcgtgcaccaccatgcccagctaatttttatatttttagtagagacggggtttcactgtgttgatcaggatggtctcgatatcctgacttcgtgatccgcccgccttggcctttcaaagtgctgggattacaggcgtgagccatcgtgcctggccgattttgcttctcatgctaaaattattaatcagctcattctctgccattttatttagaggtttgaagtttggcttgattaatttctacagaattggggagagttttcccacctcccatttttcttgctttttccatttcctccttcctcagatacccccaaagttcaaaaccaaccaccccgattatgaattttcattttgtattctgaacatatagctaaaagcagagaattaagggtgaatgtttcatgttaaagtgattggacctgttgttaagcatatgaaataatatatttccttcaaaggctgactatactatagtgcatccaacatagcttgttgaatatctcagttcttttttttttttttttttttttttagctgaaatttgccacagggaaatatctctccagcctgggcaacatagtgagactctgtctcaaaaaaaaaaaaaaaattagccaggtgtggtggtgcacaactgtagtcctaaatacttgggaggctgaggagggaggatcctttgagcacaggagtctgaggctgcagtgagctatgattataccactgtactctagcctgggagacagagcaagaccccgtctctcaaaaaaaaaaaaaaattggtggtgaaatacacataccacaagatttagcattttaaccattaaaaaagtttgtttttggctgggtgtggtgactcacgcctttgggagtgatcccagcactttgggaggccgaggcggatggatcacgaggtcaagagatggagaccatcctgtccaaaatggtgaaaccctgtctctactaaaaatacaaaaaaaaaaactagctgggcatggtggtgtatgcctgaagtcccagctactcgggaggctgaggcaggagaattgcttgaacccagggggcagaggttgcagtgagccgagatggcgccactgcccgccagcctggagacagaacgagactctgtctcaaaaaaaagcttttttttttttttttttgagagaagggatctcgctatgtttcccaggctggtctcaaacttctggcctcaagcaatccttctgcttcggcctcccaaagtactgggattacaagagtgagccactgtacctggcctcatttttctattttgataaacacttttttttttttttttgagacggattcttgctgtgttgcccaggctggagtgcagtggcatgatcttggctcactgcacctctgcctcccgggttctctgcctcccgggttcaagcaattctgcctcagcctcctgagtagccgggactacaggcgtatgccaccgtgcccagctaattttttttgtagttttagtagagacgggttttccccatgttggtcaggatggtctcgaactcctgacctcaggtgatccgcccgcctcggcctcccacagtgctgggattacaggcgtgagccaccatgcctggctgataaacacttttaaggcttaacatgagctaagtattattttagaacagattgtctcaaccttggcactatagacattttgtccagaaaattttttgttagaggctgtcctgtgaatgcattttatccctgacctctacccactagataccagtaacacccctaccctgagttgtgacaagcaaaaatatttccagaaattgccagatgttccctgtgggcggtatgggtttgagaaccacttttctagataataggcatttgtagataatgaatactgagctaagtggaggagtaaatggttgaaatagactatgtggttaagtacagttacagagatataaaccaagagatgtggaagaatagcaaaaaatttccttagagagttgatagcaagtattttcccaagagagacagcaattctgagttgggtcattggggatggtggggggaaatgtgctgaggagggggaaatattctaggtggtggaacgggttatgtctagagatacggtagaggagcccttgggtgccttgagaaaaatgagataataagtatgattggagagaatatgggaggtagaattggaaagaaggatgctagttggggtcaggtttgagaaaggcttttttttttttttgagacggagtcttgccctgtcacccaggctggagtgcagtgcctcactcggctcactgcaacctccgccttctgggtttaagtgattcttctgcctcagcctcttgagtagctggcattacaggtgcgtgccaccacttccggctaattttgtatttttagtagagaccgggtttcaccatgttggccagactagtctcagaactcctgaccttgtgatccgccagcctcggcctcccaaagtgctgggattacaggcatgaaccaccacgcccggccgagaaaggctttttatgctatgctaaaatgtttcattttccccctttcattatagaaaatcaacaaatacttttaaagtctgtagagttatatgatcagctttttaaaagaatagtgatacagtgaaatggtaaaaatggtcaatggtgaatattaaactcaagaagataactctagcctgtaaagtaggaaaataggaagggatggagatttatataaaactaaaactagatgtcatatgttgcccttaaatcacatcaccctgtgtgtagacttcttcatcctcatttgtcaaaattctgacatattgtcaatactgatgaagattcttgatattcaaagcaggagtgaagtgggcaaaaatctgtattctaattttcattaccctaataatgtccttttaatttggagcagttctgtggcctctctttgtctgtcctgatcttgacatttttgaagagtatagaacaattattttttagaatgtatctctatttgggtttgtgtgatgcttctttatgattagatgaagggtatgcatttttggaagaaataacagaagtgatggtatgttgttttcagtgcctctgtaacaggagatgcatgacattggttggtcccattactgatgatggtaattttaatcacttgggtggtttccagtagatttttctatgtaaagtttatcatttttggccgggcatggtggctcacgcctgtaatgccagcactttgggaggctgaggcaagcagattacttgaggtcaggagtttgagaccagtctgaccaatgtggtgaaaccccatctctaaaaaaatacataaattagccaggcatggtggcatgcgtctgtaatcccagctgctcaggaggctgaggcaggagaatcacttgaaccctggaggtggaggttgcagtgagccgagattgtgccactgcacttcagcctgggtgacagagtgagactccgtgtcaaaaaaaaaaaaaagtttatcatttcccatttttattttgaaacagtcttgctctgttgcctaggctggagtgcattggcacaatctcagctcactgcagcctcaacctcctgggctcaagtgatcctcccacctcagtctcctcagtagcgtgttccaccacacccggctgctttttgtattttttggtagaggtggagtttcaccatgttgctcaggctggtctggaacccctgagctcaagggcactgatcacctcagcctcccaaagtgttgggattacaggtgtgagccaccacgcctggccctgaaaaatatttttaacggttacattatcatggagaattggatggtataaaacaatagcagttctcatatttgaaaataaattgatgtaatgaaacaaatgagaggatcaaataatattgtaaaaagaataaaaacccacatatggacaggtctgtggaaattgtattaaagcctacctctcccagattgtttccgtttgttgcaatccatttaagaacagtttttgggctgggcacggtggctcacgcctgtcatcccagcactttgggaggcccaggcaggtgtatcatgaggtcagatttcaagaccagcctggccaacatggtgaaaccctgtctctactaaaaatataaaaattagctgggcatggtggcatgcacttgtaatcccaggtactcgggaggctgaggcaggagaattgcttgaaccaggactcgggaggtggaggttgcagtgagccaagatagcaccactgcactccagcctggcctgggctacagggtgagactcagtctcaaaaaaaaaaaaaacaaacaaaaaacagtttgtgggaaaaaacaatccttgtgtatgacataatttgctgcttttcccatttagaaaatttaaaaaatacttatttgagatggggtctcactatgttgtccaggctagggtgcagtggctattcacaggtgtgaacatagtacactacagcctcgtactcctggccttagcatcttgagtagctgggactgcaggtgcacatcacagtgcctcgcttactttttccatttttgtctgttgatcctctctctcttcctttggggtaaaaattgtggcttgtgatggtggtttgtggggaaagaaaaagttggtaagctacaagctctgagcctttaatgtgtttttgttaaccatgcagacagacattagatacatagatacaacatagatgagttaaatttgaaagaaggcaccaaactttgttactttaaagcaggatttctcaaagggacactgttgacattgatttcagaagtgagattttcatggtttttaatgttattattataatggtatggatagtgttttgccctctaagaagtagctaggagtgtttccatagatgcatttagtttatatcacttatgtattctgtctctattttgtaagaaaattgcctatgaacagaattttttctgtatgtggatttaatgtcttcttctaaaggaaacatgggtgtggttcacatttccttagttttgagtagcatggcttaagttgtgatccaattttaaaaaatcagttgaataaataaatagaaaataaaaggataatttctgtactaaaaaagtcagctggacagttaaaacatctccttttattcgtaagtttttcaataaaaattgttaaaagcagtattcatttgtgtaatgatataatctttgttattgttttatgtgcttttctaaaatgcaggaaacataaggtaaggagaagtctttccttaccctgggaccagatgtctatgaggactgttgacttttctgctataaacaggatgataaattaacagtggtgtgataggtaaagtagatttgttatgacatatcttccattaagcgataataacttgatttttacttagttgatgaaataaaataactttgaaaccttgggtaacatgaaattgaatcaaaatattttcaagttatggaacatagtgttattaatagaatggagtgttgaaaaagcactggattatgctttctgtaacttttagttctgggtcttatgataactgtgaccctgagcctcagtgttttccttttaatctgtagtgatattttttagttcagtctctcattttaaactgcttttagctctaaaattttatctcagtgacctgttgagttatataacaatcgtatcaggtaacctagataagaagaggaaggcagtaacatttcagaaatacagtttggggttgggaatccttaagtgatccagacttctcctttggtccgaagatagtgtgaataaaacagctgagggatgtgggcatcaatatattgcagaggaaaaggttatttccaggagtggatttgcagctactcttaaatctattatgttggggctgggcactggggctcatggctgtaatcccagcactttgggaggctgaggcgggcggatcacctgaggtcaggagttcaagaccagcctggccaacgtggtgaaaccctgtctctacaaaaatacaaaattttgccgagcatgatggcgggtgcctataattccagctacttgggaggctgaggtgagagaattgcttgaacccaggagtcggaggttgcagtgagctgagattgtgccattgcactcctgcctgggtgacagagcgagactctgtctcaaaaagaaaaaaaaaatctattatgttggatagatggtcttttccagaagcaaattttatagatggaaagcattttaattaatctagtaaaattctctcattttacaaatgaggctccctctacctctctccccctctccccctctccctctctccctctctccctctctccctctccccacggtctccctctccctctctttccacggtctccctctgatgccgagccgaagctggactgtactgctgccatctcggctcactgcaacctccctgcctgattctcctgcctcagcctgccgagtgcctgcgattgcaggcgcgcgccaccacacctgactggttttcgtatttttttggtggagatggggtttcgctgtgttggccgggctggtctccagctcctaaccgcgagtgatccgccagcctcggcctcccgaggtgccgggattgcagacggagtctcgttcactcagtgctcaatggtgcccaggctggagtgcagtggcgtgatctcggctcgctacaacctcacctcccagccacctgccttggcctcccaaagtgccgagattgcagcctctgcccggccgccaccccgtctgggaagtgaggagcgtctctgcctggccgcccatcgtctgggatgtgaggagcccctctgcctggctgcccagtctggaaagtgaggagcgtctctgcccggccgccatcccatctaggaagtgaggagcgccttttcccggccgccatcccatctaggaagtgaggagcgtctctgcccggccgctcatcgtctgagatgtggggagcgcctctgccccgccgccccgtctgggatgtgaggagcgcctctgcccggctgcgaccccgtctgggaggtgaggagcgtctctgcctggccgccccgtctgagaagtgaggagaccctctgcgtggcaaccgcctcgtctgagaattgaggagcccctccgcctggcagccgccccgtctgagaagtgaggagcccctctgccccgctgccaccccgtctgggaagtgaggagcgtctccgcccggcagccaccccgtccaggagggaggtgggggggtcagccccccgcccggccagccgccccgtcggggaggtgaggggcgcctctgcccggccgcccctgctgggaagtgaggagcccctctgcccggccaccaccccgtctgggaggtgtgcccagcggctcattgagaacgggccatgatgacagtggcggttttgtggaatagaaaggggggaaaggtggggaaaagattgagaaatcggatggttgccgtgtctgtgtagaaagaggtagacatgggagacttcattttgttctgtactaagaaaaattcttctgccttgggatcctgttgatctgtgaccttacccccaaccctgtgctctctgaaacatgtgctgtgtccactcagggttaaatggattaagggcggtgcaagatgtgctttgttaaacagatgcttgaaggcagcatgctcgttaagaatcatcaccactccctaatctcaagtacccagggacacaaacactgtggaaggccgcagggtcctctgcctaggaaaaccagagacctttgttcacttgtttatctgctgaccttccctccactattgtcctatgaccctgccaaatccccctctgcgagaaacacccaagaatgatcaataaaaaaaataaaaataaaaataaaaaaaattaaaaaaaaatgagaaaattgagctctcctgaggttgcagtttgcttaacagcatagatctaattagtaattaggactagaaccaaggttatctgactcccagttcaaggttcttggtacagtaccgtgtttttaactagtccattaggttgttttctgtgtattttataacacttctgtaagaaagtggaatatttttctctaaggtatgttaaaactcttgttcgagaaaatacagtaaaggatacctgttgtatcttaaagtgatttttatgtttttctgtcaatgccacaatctgaagaaagtaaattagctacacttctattgctgtgacaatagattatttagaatcttcttgattacttgtattattgttcccgtgcttcagagctgtttccttgctatttaaaatcattatggtatagcccagaggctaagggggttttctaagagtatgcaatttgtcattgacatagtttttttgtttgtttttgtttgttttgtttgtttttgagacagagtttttgctctgttgcccaggctggagtgcaatggtgtgatctcggctcactgcaacctccacctcctgggttaaagcaattctcctgcctcagcctcccgagtagctgggattacaggcacccaccaccacacctgactaatttttgtagaggcagggtttcaccatgtcggcgaggctggtcttgaactcttgacctcatgtgatccacctgcctcggcctgtgaggattacaggcatgagccaccgcaccctgccaacacagttgtttttgattggaaaagtttattttcctaatctcaaagtagcttgtatctgttctttattgtgaaatgcagtttctacattgaatttgtgtagtctgtagttttgactgttttaagttcaataactagcttagtagtatacttgttagaggtcagagtaggttaactactagaaagaacagtccttctgcttactgtactaggaggaagtctgtggtggagggaaaaaaggagtaaaacaattccagtcttctgtaaaatttgagtaatttctttctctactccttctacatgaaaaatacatcttatttgatttttgcatcacatgccttctatatgtgttggaatctggatcaccatttcttcattacttgtgggtttttgttgtgaaaaatgtggagtaagttagaagttgactgtagaataggtaacattctcttaaattctttgatcagagtgagcagagtccagaagcttggctcagacttagggaactcatgacacttctcttaatatcctaagttcatgacatgtctcttaataccctaagtgtacaatacaatagtagatcaaggaaggcagaggtatctggcagacttagaagtaactgttcataaaaacaaggatcagtatgtttctacaagataatgatttaaagttgagccaggattagttatacctttaatataaaaaattgaaatagcttatttaatctgttctaggctatagtatacggagctaggtattaaaacattctctatatatttaactcttttttttgagacagggtctcactctgtctcccaggctagagtacagtggcatgatcttggatcactgcagcctagacctcctgggcacaagtgattctcccaccttagcctccacagtagctgggactacaggcctttgccaccacacctggctcatttttgtattttttgttgagacggggtttcaccttgttgcccaggctggtcttaaacccctaagctcaagtgatccgcttgcctcagcctcccaaagtgctgggattacaggtgtgcaccactgcgcccaggctatttgacttttttattctgtaaaattgcaagcatattcagaaataagaaaatagtataacggggccgggtgtggtggctcacgcctgtaatcccagcactttgggaggctgaggcaggtagatcacgaggtcaggagttcgagaccagcctggccaacatggtgaaaccccgtctctactaaaaatacaaaaattagccaggcgtggtggtgggcgcctgtaatcctagctactcgggaggccgaggcaggagaatttcttgaaccagggaggcggaggttgcagtgagccgagatcgtgccactgcactccagcctgggtgacagagcaagactcattttttttttttttttttttaaaaaaaagaaaaaagaaaatagtataatgggttgggcccggtggctcacgcctgtaatccagcactttgggaggccaaggtgggcggatcacctgaggtcaggagttcaagaccagcctggccaacatggtgaactcttgtttctactaaaaacacaaaaattagctgggcatggtggcaggcacctgtaatcccagctacttgggaggctgagttaggagactcacttgaacctgggaggtggaggtttcagtgagccaagattgtgccattgcagtccagcctgggcaacaagagcgagactccatcccaaaaaaaacaaaaaacaaaagacaactatatatatatatataaaataacgaaaccccctaagtacctgtcacccagcttcaacaattatcatcttgcagttagttgaatttggttaacacttacccttcagtggattattctagactaaatttccaaacataatcatattgtattgaagtgttttttgaacaaactatactatggggtatttacctaaaatgaactatttgcaaaaagataagttgattttttttcttctggtgccagtacacatcataattgtagttaaaagctattatcctcacattaaagtttaatttttaacacattatgaaaatttaaaacttacagcaaagctttaaaaattttacactgaacaccaatattattaacatctagattctacctttaacattttactcttcttttttttttactcttcttgttttatcacatattgatccatctgtccaactctccattgatgtaacatttcattttattttcttattcatttcaaagtaaattacagatattagtatagttgaggttcagtttttaaagtcatattttcaactaattgtttttcctgttttgaaagactgttatatctgaagttccacattatgacaactcatagtctctatggttccagtgcttcccattttgaacttttctttcatgttctacgaacctttattaaaatatttagagctatgtacaagtaatatatacagtatttagctaaaactaagtagaatgaatgagggttttgcttgtgtgtttattgcagtctttaaaaaaaatctcttctagtgagtcaatgtgtatcttttttttttttttttttttttttgagacagagtcttgctctgtcgcccaggctggagtgcagtggcgtgatctctgctcactgcaaagctccacctcccggattcatgccattctcctgcctcagcctcccgagtagctgcgactacaggcgcctgccaccacgcctggctaattttttttgtattttttgtagagatggggtttcattatgttagccaggatggtcttgatctcctgacctcgtgatctgcccgcctcggcctcccaaaatgctgggattacaggcatgagccaccgcgcctggccaagtcattgcgtatcttaagatggtacactaaactaatatgcttgccattggtgacaacatagatgaacctggaggacattatggcaagtgaagttagccagacgtggaaaaaataatacttcatgacttcaacctatatgtggaatctaagaatgccaagtctgcaaaagaagagagtagaaaagtagttaaatgggtaggaaggtgggagaaatggggagatattggttaaaggttaccaagttggaatcacgtaggatgactaggtctagagatctaatgtacagcatgaacactatagttaataatactgtatcatgtactggaaagttgttaaaagagtagatttcaggtgttttcagcacacacagaaaaagataactatatgtggagatgggacattttgcttgaccatagtaatcatttcactatgtatatgtatatcaaaacattcatgttgtacactttattgattgattgattgagacagggtctctcgctgttgcctcagctggagtgcagaggcatgatcacagttcactgcctgcttgacctcccaggctcaagcgatcatcccacctcagccccccaagtagctgggactacaggtgtatgctaccatgcctggctaatttttatagtttttgtagagatgggttttgccgtgttgcccaggctggtattgaactcctgagctcaagcaatctgcccgcctctgcctcccaaagtgctaggattacagatatgagccactgcgcctggccataccctttaaatatatacataaaaagaagaatgcctttaaaaattttccatttaacaattactctcagggccaaaactcactgtttaagtattttgctcttttactttgatcttggtgttctatgtagtgctaaaatatactttcatctccatatgactgcttgtaacaaaaagctgttcaccacattatgaactccctgaatacacacaataatcatatagtaaatgcttgttgaataaacaagacaaaattcatcagtttttatccttacttaattttttgaacttttccttgaacttctgttatcaaacttaatacatgaacaacagaaagatgctacggatctatgtagtacaaagtaaaatatgaaatttacacactaaatatttctgtagcatattttcagaagtaagtaattgaatataaacagaagcaagcatattctatttttttattatttaagtgggaaatattttaaaatcttatgtcatatttgctttagatttcttttaaagaattaaaacattacagatagagttgaagcctcatgggttattttaatgttttctacataaacatgtttccatatacataaaccttatttagaattttttcagtttatttatttatttttattattatactttaagttttagggtacatgtgcacattgtgcaggttacatacgtatacatgtgccatgctggtgtgctgcacccactaacttgtcatctagcattaggtatatctcccaatgctatccctcccccctcccccctccccccaccccacaacagtccccagagtgtgatgttccccttcctgtgtccatgtgatctcattgttcagttcccacctatgaatgagaatatgtggtgtttggttttttgttcttgcgatagtttactgagaatgaaattttttcagttttatacgtttatgtaagtggcaccatacagtacatattattttgcaacttgccttttttttttttgtttgtttgctcaatgttgtttttaggattttgatgtaactccagatctgcactgtccaatacaatagccactaactatctgtggctattgagtactggaaatgtagctagtccacattgagatgtgctagaaatatatttgtacatggaatttcaaatatttagtattaaaaacatgtaaaatatctcactaaaagtttagtatccctaagaatctgaaatagaaaatgctccaaaacccaaaattttttgattactgacatgactctcaaaggaaatgctcaaaggtttaatgcaaatattccaaaatctgaaaaaatctgatatattgaccacatatggaactgataatagtttggatgtattggattaaataaaatgtaaaaattttaccagtggtttccttttttaaaatatggctactagaaaatttaaatatatatttgaaatgccttacattatatgtctgttgggcagcactgatctatattgcccacttttcattcctgtttatttattattattttatttttatttttattttttgagacagagtctcgctgggtcgcccaggctggagtgcagtggtgctatctttgctcactgcagctgctgcctcccaggtccaagcaattctcttgccttggcctcccaagcagctgcgattacagctgtgcaccaccacacttggctaatttttgtatttttagtagagacggggtttctctgtgttggccaggctggtctcgaactcctgacctcaagtgatccacctgccttggcctcccaaagtgctgggattacaggtgtgagtcactgctcccagccttcactcctgtttagtattaagttatatagataatagtttgctactggtggatagttgttgttttttttttttacgaatttggtgctactaaagactgttctcatgagcattcttaaacatgtctcctttgcacatatgctagagtttctttctccctaatggttcttctgatttatacttccactggcagtttgagaatgttcttgttctgcagttcttcatcctggtcgatgtttttgtgtagataactgtaatttaatacttaaagtcaaaagcataaggaagcattggtaattatttaagtgaatataaaatgtcagcttatttttctcagtgaatcttttgtaatagtcaactcacattgcctattttttattgtagtgcttctgatctgaataaataaatttaaaatttaacagccatgttatgtatcttattagtaggcagctgcagttatgcaaccaaagaatgtcccatctttaagttccattagcttgaaaaagaaatggcagctttacgtcatggaatactgtgctgccactaaaaatgatgttttagaagaatatttaatgatgcagaaaaatattcacagtatcttaatggaaagaaaagattataaagcagtaaccatttcgttttgttaaaatcaggtctatgttagctttttttttttgagatggaatctcgctctgtcacccaggctaaagtgcagtggcgtgatctcggctcactgcaacctccgcctcctgggttcaagtgatgctcctgcctcagcctccctagtagctgggattacaggagcatgccaccacacccggctaatttttttgtatttttagtagagatggggtttcaccatgttggccaggctggtcttgaactcctgacctcaagtgatccacccgccttggcctcccaaagtgctgggattacaggtgtgagccaccgtgcccggcgagcatttccttacatgcttatctctggatggtcagattgtaggtaacttctattttgcacttcacactttttttttttttcttgagatggagtttcgctcttgttgcccaggctagagtgcaatggcgtcatcttggcccactgcaaactccgtgtcccgggttcaagcgattctcctgcctcagcttccagagtagctgggattacaggcgcccgccaccacacctgcctaatttttagtatttttagtagagacagaggttcaccatgttggccaggctggtctcgaactcctgacctcaagtgatccactcgcctcggcctcccaaagtgctgggattacaggcgtgagccaccgtgcccagcctgtacttcacacttttaatatttcattttctgtagtggatttactattaccagggaaggggaatgcaaggaggagggaagagttcttaacctaaaattttcatagttggaatattattataggaaagaagagattgaatgaggtgtcactgttcccatgtttaaagataagtcaattgggaggccgaggcaggtgaatcacgaggtcaggagttcaagaccagcctggccaatatggagaaaccccatctctactaaaaatacaaaaattagctgagcgtggtggcaggggcctgtaatcccagctactcgggaggctgagggaggagaatggcttgaacccagagggtggaggttgcagtgagctgagatcgtgccactgcactccagcctgggcgacagagtgagactttgtctccaaaaaaaaaaaaaaagataatactttccttctattcaatttcaggcttttcttaagttacaaatggaaccagccaaactatgttattgcttacccattgtttttccagcgttagaggagtttttcaaagaatattttttgatttagagattattttatttattatctatttagagattattcatcatttagagattgccatttaatttcagtaagagttccatttgcatctgatattttttagtttcggagaaaggaaatggtggagaaatggattcatctccaatcctttggaataaaattcagacagtttaagctctagtctcaacttgatttaatttggaattgcatgatgtggtgtcagatttgggttcacatccagttctcttgctgtgtaaccttgggaaatttacccagcatctgagttgtttcttcatgtgtgcagtggagacaataccaagatgaagatttcatgagatgtctagtgtagacatctatttttcagagtggatgcatttaacagttggatgctgaatttataagagtatggatttcataaaaagagcataaatttcatgatatgatgtatatatcaaaagatataggtcgggtgcagtggttcatgcctgtagtcccagcactttgggaagttgaagcggatggatcacttgatgccaggagttcgagaccagcctggccaacatggtgaaacttcgtctctactaaaaatacaaaaattagccaggcgtggtggtgtgtgcctgtaatcccagctacttgggaggctgaggcaggagaattgcttgaacccaggaggcagtggttgcagtgagccgattttgtgccactgcactccagcctgagtgacagattgagactccatcttaaaaaaaaaaaaatgatggctgaataggaacagctctggtctgcagctcccagtgagaccaaaatgtagaaggcgggggatttcttcatttccaactgaggtacccagttcatctcattgggactggttaggcagtgggtgcagcccatggagggtagcagaagcagggtggggcgtcgcctctcccggaagtgcaaggagcgagagatctcccttccccaagccaaaggaacccgtgagtctatgctatccggcacagatactacacttttcccatgatttttgcagtccgcagacccggagattccttagtgtgccaactccaccagccctgggtttcaagcacaaaactgggcatctgggcagacagtgagctagctgcaggagttttttttttttccccctcttcataccccagtggtgcctggaaccccagtgagatagacccattcactcccctggaaagggggctgaagccagggagctaggtggtcttgcttagcgggtcccactcccacagaacccagcaagctaagaaccactggcttgaaattctcattgccaacacagcagtctgaagctgacctgtgaagattgagcttggtgaggggaggggcgtctgccattactgaggcttgagtaggcagttttcccctgacagcactaaggaggctgggaagttcagactgggcagaactcaccacagcgtggcaaagtggctatggccagactgcgtctctagattcttcctctctgggcagggcatctctgaaagaaaggcagcagccccagtcaggggcttatagataaaactcacatcttcctgggacagataacctgtgggaaggtgcagctgtgggcgcagcttcagcagacttaaatgttcctgcctgctaggtctgaagaaagcagtggatcctgacaaggaggattctcctagcacagcacttgagctctgctaggggacagactgcctcctcaagcgggtccctgaccccagtgcctcctgactgggagagacctcccagcaggggttgacagacacgtcacacaggagagctcccgtgggcatcaggctggtgcccttctgggacgaagctcccagaggaaggagcaggcagcaatatttgctgttctccagcctccgctggtgatacccaggcaaacagggtcaggagtggacctttagcaaattgcagcagacctgcataagaggggcctgttagatgaaaaactaacaaatagaaagcaataatatcaacatcaacaaaaaggacccccacacaaaaaccccatcaaaaggtcatcagcctcaaagatcaaaggtagataaatccacgaagatgaggaaaacccagtgcaaaaatgctggaaattccaaaaacccgaatgcctcttctccttcaaatgaacacagctcctctctagcaaggccgcaaaactggacggagaatgagtttgacgaattgacagaactaggcttcagaaggtgggtaataacaaactcctctgagctaaaggagcatgttctaatccaatggaaggaagccaaggaacttgataaaaggttacaagaactgctaactagaataaccagtttagaggacataaatgacctgatggagctgaaaaacacagcacaagaacttcgtgaagcatacacatgtatcaatagtcaaatcgctgaagcggaaaaaaggatatcagatattgaagatgaacttactgaaataaggcatgaagacaagattagagaaaaaaggttgaaaaggaacaaacaaagcctctgaaaaaatatgggactatgtgaaaagaccaaacctatgattgattggggtccctgaaagtgatggggagaatggacccaagttggaaaacacacttcagggtattatccaggagaacttccacagcctaccaagacaggccaacgttcaaatcaggaaatacagagaacaccacaaagatactccttgagaagaccaaccccaagacacataatcgtcagattctccaaggttgaaatgaaggaaaaaatgttaagggcagccagagagaaaggtcgggttacccacaaagggaagctcccagaggaaggatatctgggcagaaaccctacaagccagaagagagtgggggccaatagtcaacattcttaaagaaaaaacttttcaacccagaatttcacatccagccaaactaagcttcgtaagcgaaggaggaataaaatcctttacggacaatcaaatgctaagagattttgtcaccactagacctgccttataagagctcccgaaggaagcactaaatacagaaaggaaaaactggtactagccactgcaaaaacattccaaattgtaaagaccatcgacactataaagaaactgcatcaactaacggtcagaataaccagctagcatcataatgacaggatcaaattcacacataataatatgaaccttaaatgtaaaagggctaaatgccccaattaaaaggcacagactggcaaattggataaagagtcaagacccattggtgtgctgtattcagaagacccatctgatgtgcaaagacacacataggctcaaaataaagggttggaggaatattaaccaagcaaatggaaaaaacaaaaaaaaaaggggtgttgtaatcctagtctctgataaaacagactttaaaccaacaaagttcaaaaaaggacaaagaagggcattacataatggttaagggatcgatgcaacaagaagagctattttaaatgtatatgcttccaatacaggagcacccagattcataaagcaagttcttagagacctacaaagagacttagattcccacacaataatagtgggagactttaacaccacactgtcaatattagacagatcactgagacagaaaattaacaaaaatattcaggacgtgaactcagctctggaccaagcagacctaatagtaacctacagaactctctaccacagatcaacagaatatacgttcttctcagcacatcacacttattcactcaaaaccccacaactacatggaaactgaacaacctgctcctgaatgactgctggtaaataacgaaattaaggcagaaataaagaagttctttgaaaccaatgagaacaaagagacaacgtaccagaaatctctgggacacagataaagcagtgtttagaggggaatttatatcactaaatgcccccatcagaaagcaggaaagatctaaaatgaacaccctgatatcacaattaaaagaactagagaaaaagagcaaacaaattcaaaagccagcagaagacaagaaataactaagttcagagcagaactgaaggagatagagacatgaaaacctctccaaaaatcaatgaatcaaggagctggttttttgaaaagattaacaaaatagaccatgagccagactaataaagaagaaaagagagaagaattaaatagacacaataaagaatgataaaggggatatcaccactgatcccacagaaatacagactaccatcagataatattataaacacctctacgcaaataaactagaaaatctagaagaaatggataaattcctggaaacatataccctcccaaggctaaaccaggaagaagttgactccctgaatagaccaataacaagttctgaaattgaggcagtaattaatagcctaccaaccaaaaaaagcccaggagcagatggattcacagccgaatgataccagaggtacaaagaggagctggtaccattccctctgaaactattccaagcaatagaaaaagaaggattccttcctaactcattttatgaggcaagcatcatcctgataccaaaacctgtcagagacacaaccaaaaaaggaaatttcaggccaatatccctgatgaccatcgatgtgaaaatcctcaataaaatactggcaaacagaatccagcagcacatcaaaaagcttatccaccattatcaagtctgcttcatctctgtgatgcaaggctggttcaacatacgcaaatcaataaaagtaatcaatcacataaacggaaccagtgacaagaaccacatgattatctcaatggatgccgaaaaggccttcgataaaattcaacaccccttcatgctagaaactctcaataaattacgtattgatggaacatatttcaaaataataagagctatttatgacaacccatagccagtatcatactgaatgggcaaaagttggaagcattccttttgaaaaccagcacaagacaaggatgccctctctcaccactcctattcaacatagtgttggaagttctggctaggcaagagaaagaaataaaggttattcaaatagcaagacaggaaatcaaattttctctgtttgcagatgacatgattgtatatttagaaaaccccatcatctcaacccaaaaactccttgagctgataagcaacttcagcaaagtctcaggatacaaaatcagtgtgcaaaaatcataagcattcctatgtaccaataatagacaaacagccaaattatgaaggaactccctttcacaattactacaaagagaataaaatacctaggaatgcaacttacaaggggtgtgaagggcctcttcaaggagaactacaaaccactgcttgaggaaataaggacgcaaacaaatggaaaaacattccatgctcatggatgggaagaatcaatatcgtgaaaatggccatactgcccaaagtaatttacagagtcaatgctattcctatcaagctaccattgactttcttcacagaactaggaaaaactacgtagagccaaaacaatcctaagcaaaaagaacaaagctggaggcatcctgctacctgacctcaaactatactacaaggctccagtaaccaaaacagcatggtactggtaccaaaacagatatatagaacaatggaacagaaccgaggcctcagaaataacaccacacatctacaaccatctgatcttcaacaaatctgacaaagacaagcaatggggaaaggattccctgttttataaatggtgctgggaaaactggctagccatatgcagaaaacagaaactggaccccttctttagagcttatacaaaaattaactcaagatcgattaaagacttaaatgtaaaacctaaaaccataaaaaccctagaagaaaacctaggcaataccgttcaggacataggcatgggcaaagacttccatgactaaaacaccaaaagcaatggcaacaaaagccaaaattgacaaatgagatctaattaaagagcttccacacagcaaaaaaactatcattggagtgaacaggcagcctacagaatgtgagaaaatttttgcaatctatgcatctgacaaagggctaatatccagaatctacaaggaacttaaattacaagaagaaaacaactccatcaaaaagtgggtaaaggatatgaacagacatttctcaaaagaagacatttatgtggccaacaaatgtgaaaaaaagctcatcatcactggtcattagagaaatgcaaattaaaaccacaatgagataccatctcacgccagttagaatggcgattattaaaaaggcaggaaacaacagatgctggagaggatgtggagaaataggaacacttttacacttttggtggaagggtaaattagttcaaccattgtggaagacagtgtggctattcctcaaggatctagaaaccagaaatacaatttgacccagcaatcccattactgggtatatacccaaaggattataaatcattctactataaagacacatgtacctgtatgtttattgcagcactatttacaatagcaaagacttggaaccaactcaaatgcccatcaatgacagactggataaggaaaatggggcacatatacaccatgaaatactatgcagccataaaaaagattgagttcgtgtcttttgcaggtacatggatgaagctgtaagccatcattgtcagcagagtaacacagtaacagaaaaccaaacactgcacgttctcactcataagtgggagtcgaacagtgagaacacatgggcacagggaggggaacgttacacattggggcctgtcaggggttggggggcaaggggagggagtgcattaggacaaatataatgcatgtggggcttaaaacctagatgatgggttgataggtgcagcaaaccaccatggcacatctatacctgtgtaacaaacctgcatgttctgcacatgtatttcagatcgtaaagtaaaaaaaaaaagatatggaagttactatgcgcgttaataaaatatgtttatacctcctcccttaggtgtctattatgtagaacaagtttattacattctaatgataaagtaaacactctgttttcaaaggtggtgttatacgtttgtgtatcttttgccccgggcatgatgatttcatcgtttgtgtaataaatttaatactaccatagtctccccttattcacacgggataagttccaagaccccaatggatgcctgaaactgtggatagtactgaatcctatatacacttatgtttttttcctgtacactcatatttatgataaagtttaacttataaattgtgcacagtgagagactgacaataactataataaaatagaacaattataacaatatactgtaataaaatttatgtgaatttggtttcaaaatatcttattgtactgtactcacccttatgatgatgatgttagatgataaaatgcttatgtgatgtgatgaaggtaggtgaattatgttaggcattgtaatgcagcatgaagctactattgaccttctggtgttacatcagaaggaggatcatctgcttgggtggtcctgaatcatcacgtcctgatgatgtctgttgctggttgtcaggagcagacagtgtccatgactaatgggcaggcagcgtatatagcatgtatacactggacaaagggatgtctcatgtccacggctggacagagcaggagagtgcaagattttgtcacactactcagaatcgtgcagtttaaaacttaccaattgtttatttctggaattttccgtttaatatttttggactgcagttgaccacaggtaactgaattcatggaaagcaaaacaaccatggacaaagtgggattactgtattatttcagattttaattagcatttttcaaaactctgtctagctagtgcttgcattgtagaatttgtctgatttcatttttattgattagggaaataagctttatttttatctggagtgatttgtttctttgtgcttcctcaaaattgagtagtggctactgagtatatatcgaaaaggaaataaattattatgtcaaaaagatacctacatttgtatgttgattgtagcactgttcacaagattaaagatatggaatcaacctaagtgatgaagaaaattggtgtgtgtgtgtgtttgtgtgtatacatacacactgtggaataatactattcagccacaaaaaagaaaaaaaaatcatgtcttttgcagcaacatggatgggactggaggccattatcctaactgaaataactcagaaagtcaaatactacatgttctcacttacaggtgggaacttaaatggttacacatagaatagagtagaataatagacattggagactccaaaaggtgagagggtggcaggggggtgagggttgaaaaattacctattgagtactttgttcagtatttgggtgatgggtacactaaaatcccactttaccaccatgcaatatatgcatgtacgaaatctgcacttgtaccccctaaatatatacaaataaaagttttttaaaacacttagtaaatagcctgtcatagggaataattgaaaccatttcgtatctcactttaaaacctttaggctgggtgctgttgcttatgcctataatcctagcactctgggaggccgaggtgggtggatcacctgaggtcaggagttcgagaccagcctggccaacatggcgaaatcccatctctactaaaaatataaaaattagccagtcatggtggcacacgcctgtaatgccagctccttgggaggctgaggcgggaaaatcacttgaacccaggaggcggaggttacagtgagccgagatcacaccactgcactccagtctgggcaacagagcgagactccatctccaaaaaaaaaaataaaaataaaaataaaaaacctttttagttctgtttcaatgttatcttctttttatttaattatttttggaataagaaataatatttatatggtttgaacaccaaaaggtataaaagatatttttaaaggtataaagtataaaagttagaaatttcccccacttccctgttctctgttcccacagctgccagcagcttaccaccccccagcccaatcactgctactgatgcctaacctatctttccagagttctttgtgtgttcagtagcagttaaccacagatctttaatcattcccctttataccataaaaggtggcatgttatgtacacttgcctcccctttgctttttccacttaatgtgtcttgagaagctttccatatatcagtacatggaaaactttcttatattgttttattttaaatttatatacaataaatgcatggatcagaaaaataattgaatagtgggccccaaattaaatgattactctaatgatttgtagatgggtttagttaaagcactgggatatttagctacaggtataggaatgcatgattattttctgtcaggaaacctagattttgttcttctccccttctttatcaaaggtgaaatcagactcttatttaaaccaggattaagtattctttgcataataatatatatttgctttcccaagttattcttcaggaaagtcttgactctctagcaaactttgtttcttaaaatggaggttagcaggtgttggaaataaggtgagagttttaacacttaaaggaaactatataaagattagatatagtcagaaatttagaaaacattaggaaattcacagagagatggatcccccttttctaccctagattacccctgggctgcttaatggcttgtctttactattagattgtgagctccttgaggtcaggttttatctgttttttatttcaataccaagtgccaagaatatattcagcatttggtgtaaatattataaaatgagtaaatgaatgtgctcttgaatagaagttaactctgattttgggttaagtcccccgccccctttttttgagacagtctcactctatagctcaggctggagtgcagtagcgcagtctcagctcactgcaacccccttctccggggttcaagcaattcttatgcctcagcctcccaagtagctgggattacaggtgtgtgccaccacacccggctgatttttgtatttttagtagagatggggtttcaccatgttggccaggctggtcctgatctcctgaccttaggtgatctgcctgccttggcctctcaaagtgctgggattacaagtatgatctactgcgtctggctgattttgtgttaaaatcctttatgtcagttccagaagaggttaaatggaagttttcgaggcaagagatacttgtgaatttgacatgagtggcctttgttttgaaattttaatgctacacagatgctgtaaaaggattttttcaggccgggcgcggtggctcacgcctgtaatcccagcactttgggaggccgaagcgggtggatcacgaggttaggagatcgagaccatcctggccaacatggtgaaacctcatctctactaaaaatacaaaaattagccgggcgtggtggtgtgcgcctgtagtctcagctactcaggaggctgaggcaggagaattgcttgaacccgggaggtggaggttgcagtagagccgagatcgcgccactgcaactccagcctgggccacagagcaagactccatctcaaaaaaagggtttttcaaaaaatcatgtacaattagaaaattgtgtctcttaaatctatttgcttatgttattaatcccagattatgactgttctttcccctaaggcattagcctgttgaaagaaacagacctataggacttttgttgatgttaaagccagaccagaaatttagaaaatcaggatatttgccattttgataagaaaaccatttaatagttgaatataggaatttgcattttgagagtgtgtactaatttagattctccaggaatagaaccatcatctgaaaataaataagtttaaccagacggacaaggagtgatatgtagttttaggtggtaagactgtgatattgttaggttacatgtatctagggcaagatgctcaaatacaataagtatatacagactaggaactctagttgtctttttttaattaatgaaaagagggttttatgcttcatttctaaacattctcaaaggaatttatgttttgttgatgatctttttttatttatataaatttacgggggtacttgtgcactttttttttaaacatggatagattacagagccgtcaagtcaagcctttagagtttccatcacccaaataacacacattgtattcattaagtaatttctcatgatctcccacctcctgctctctcacctttccaagtctgttatctatcattccatgctctacgtccatgtgtacacatttttcagcatccacatgtgaatgagaacatgtgttattcccaccaacagtgtatgagtgttcccttttctctgcaacctcaccaacttgtgttattttttgtctttttagtaatagtcattctaactggggctggatgatacctcattgtgggtatttttaaaataaaaaaaaatttgtgtgtacataggtatatttatttatggggtacatgagataatattgatacagacatacaatgttcaataactacatcagggttgtatccatcaccaagcatttatcctttcttggtgttagaaacaatctagtttctaatctctaatagtttctaatctctagtagttatattaaaatgcataatgaattattattgactgtagtcaccccattgtgctatcaaatgctaggtcttattcattctatctaactatatttttatacatattagccatccccactgtgccaccatccccattagtgccctggcccccactacccgtcctagcctctggtaaccatcattctactctctatctctatgagttcaattgttttgatttttagataccacaaataagtgagaacatgtgaagtttgtttttctatgtctagattatttcacttaatataatgacctacagttccatccatgttgttgcaatgacaggatctcatacttttttaagggctgaataggactccattgtgtatgtgtaacacattttctttattcgtccgtctgttgatggacactcaggttacttccaaatcttggttattgtgaatagtgctgcagtaatcatgggagtgcagataactctttgatatactgatttcctttctttggggtacatatttagcagtggaattgctggattatatggtagctctctagtttttttttttttttttttttttcatttttgagacagggtctcactctgttgcccaggctggaatgcagtggcggaggttcacttcagcctcaacctcgcaggcttaggggatccacccacttcagtcttccaagtagctgggactataggcgcataccaccatgcccagctaggtttttgttgttgttgttgttgttgttgaggcagagtctcactctgtcacccaggctggagtgcagtggtgcgatctcggctcactgcaacctctgcctcctcggttcaagccattctcctgccttagcctcccaagcagctgggattacaggcgcccaccaccatgcctggctaacccagctagtttttaattgttcgtagagatggggtttcaccatgttgtctagactggtctcgaactcctcgactcaagtgatcctcctgcgttggtgtctcaaagtgctgggattgcaggcacaaggcaccgtgcctggtcagaatttttttttaagggtttctcctttgtaaatttcttattcatatcttgaattgattttctgagtttcttgtattggttttcagacttttcttgcatctcagtgacccttaaaatcaatattttgaatattttatctgggattttgtggatttcattttggttaagatctgttgctgcagaatcgtgttcctttgacagtgtcatattaccttggtttctgatgtttcctttgtcttttcattgatttctgtgcatgtgctgtaacagtcacttcttatctttgaatttactttcatggtgaggggagatttcttcctgaagatgtgactataatgttggttgggccttgcttctgggtgcgtgcagtagtgaagtctctgtatgatttattttgagacagctctgttgcccaggctggagtgcagtggcacattcatagcttgcttcagcctcaaagtcctgggcataagtgatccttctgcctcagcctcctgagtacctaggactacaggcgtgtgccaccatgcctggctaattttcaattttcttttagagatgggggtctcattatattgcccaggctggtcttgaactcctggtctcaagcaatcctctctccttggcctcccaaaatgttaggattacaggcatgaaccaccgtgcccagcctctgtatgatttctttggctataaatagcattaatggtgtctgtggtttccttgatgtcttagcttgagtttatttgtggaggctgaagttgcgctggggattggaatgcctaataggcctgtctttaggtttcaatggtagtgatggtgggctaagcatgtctatccatgtgccctggggcagtgtgtgctggtaactgtgttggcagttccaggcaggctgattcttgggcttctgagtgactttctcagatgcctgttgtaatggtgtaccaggtgggtgagctggctcttgagctcctgggcaactggcatggcatagtttatggtggtagtagttttgttgagatactcttgtgggtcccaagcactttgcatttgtgttagcagtggttacaatgagatccaggccagtaaggtggtacttgcaggcatgaggcagctgaggcggtactggtagggtgttatccctgacctctgtcccctgggagaagtactctggtgtttcagagtgtttcaggtagtgggtttggttgtggaatcccctggtaacctggatcctgcactgtttctcagccaggtcaaagcctggtagagctggactgggaaagcttgcactcaggcccccacagtggtgtaatgtcatgataggcggggtggaatgatcttcaggctgctggcaaaatgcttgggtgagggatgagtgccactgctgagatcctgccatggggaagttgggcctggtcccaggagtgagttgtgttcctttcatgccccagtccaggcggagttccttcctcttgtccctgctgttcagtcagaactctgcagttcttgcctagtccctaaatcatcccagggtcgggtcatataagccccatccagctcaagacttaagcctccagggcaattaatcgtgctcaaatcctgggggtggtgtttgcttctagcactggtggtggctgcatcccacaccaggcagagccaccccatccccgcccctactcacactctgcctctccaaacagcagcccaagtttccctaatggctaggactggccctgttgcttccccgtactgctcacagttatgagctgagatcctgcatcgtgtcttgttacagctgcttaggtttcaaaaatggcatgggacacagaatgtgttccctccctgaaacagttctttctcacagtcttccagtcattccctaaattaattagattcagggcttaagagggtcagggtgctctactgaggactggattgtatggtagtggaccacagaaaaatactcaccctctcccatattggggaatcacttctggttccctgtgggtcccagccacacaggctctctgttttccttttgcttcctagattttggtttttgctgtcgcttttctgttgaactcctgtgttccctctgggataatatatccaaagtgtcattgtctacacaattttagctcttgtacctggatgaggcacgcttgaaattcttgcagtcatccatcttttcctgatcttgtttcttctgccccattccccaggttcctccagggtctcacagttcccctgtatgtgggaaaggcagttttctttctgcccaatcctgcttctcctttgtccacccagatgaggtttccgctagaattgctacttaaagtggttctgtggaacattttgtagcagagaaaatcagggctgagggagcaccataaaggttagaaaagattagaacattaggttagaaaatctgaactactctacctgtcttgattaggaggattagagttgatgttggatgggtttgttggtttattttccacttatctatcagaatgaagaacttactgccttttcttcttagttggtctaatatttatcactttaattatttttaagtgtacaattcagtggcattaaatatatttataatgtatcatgatcattactacctatgcccaaaactttttcatcatccccaacaaaactctatatccaaaaaaaaataaaaccctctatatgtacatggaacaattaagttgggcccctatcttgcaccatataaaacagttaaatgcatcaaagatcttaacgttaacagctaaaattataaaactcttagcagaaaacatttgggctgattttcatgacctgggatttggcaatgatttcataaacataatgtagaaagcacaggcagcaaaagaataagtaagttggacttcattaaaaatttaaaaatttttttacatcagaggtcactatcggctggatgtggtggctcacacctgtaatcccagcactttgagaggctgaggcgggtggatcacttgaggtcaggagttcgagaccagcctgaccaacatggtgaaaccctgtctctactaaaaatacaaaaattagctgggcatggtggcgcgcacctgtagtcccagctacttgagaggctgtggcaggagaatcacttgagcatgggaggtggaggttgtagtgagctgagatcgtgccactgcactagaacctgggcgagagcgcaagactccatctcaaaacaaacaaacaaacaaaatgaagcaatcccccccccaaaaaaaaggtcactatcaagagaataaaaagaaagacaactcagaatgggagaaaatatttgcaaatcatatgactgatgagggtttaatatccagaatgtgtaaagaacttttactgagcagcgaaaagaaaacccaatgaagaaatgaacaaaggccttcaagaaatgaacaaaggccttcaatagccatgactttacttttttaaatttaaatttaaattttttgagacaaagtcttactctcttgcttgggctggagtgcagtggtgtgactgtggctcactgcagccttgatctcccagactcaagtgattctcctacctcagtctctggagtagctaggatgacagactcacactaccacatgtgactttgtgtgtgtgtgtgtgtgtgtgtgtgtagagacagggtctcactatgttgctcaggctggtcttgacctcctgggctcaagtgagcctctcacttttatttttatttgtagtagagatgagatcttgctaatgttccccaagctggtctcgaactcctgagctcaagcaatcctaccttcctcggcctcccaaagggctgggattataggcgtgattcactgtgcctggcctagtttctttgttttaatttttttcctccccatttgtcttttgagtttccctgagaatctgtcttgctgctgtctcagttgtcattcactgttattacactggaaccctattgatgtagtggtaaggaattagggaggggaagtgttttgtaatctcatgattaaatgtcatttcttttttttttaattggtcctgagtccctgaattgtgactctcagaagtgtttcttagcccttgccctcccacttagatgagacaggaaggctataagcctcgggggttttctaattgtctttcctcttggtagataatggtgtgagcatatttgaatatagtttctttcctctcctcctgctcaaggcacaaggaaattttcctcaaatatttgcagtgaaaacatactaaaacccttgtaggattcctggaggtaaaacctaggaaagtgtaggggcccctctaagactgggatgtcaggatttttaaactctcaaactaatccatatttggcctccagaagttgtcagtttctacttgagtgtttctgttctaggaaagctgtgatattctgtatctgtctttctagttttttttggtggtggtttgccttgtgacctcagtttttggattgatctaagataaattactgattttcagttttctcagcgttttttcttgtcaggatagaagtgaggacctccaaaatccttacatattatagctgcctggtgagttttgtttgtttctttttttaaaaattttttttttttttttttttttttgggatggagttttgcgcttcttccccaggctggagtgcagtggcgcaatctcggctcactaaaacctctgcctcccaggttcaagcaattctcctgcctcagcctcccaagtagctgaaattacaggtgcccgccactatatctggctaattttttttatatttttgatagagatggggtttcgtcatgttggccaggctggtcttgaaatcctgacctcaggtgatctacccacctcggcctcccaaagtgctgggattacaagtatgagccaccttgcctggcccgttttttcttacttttagtaaaaataacctcacgtaaactgtcataggtgtctgtgggcttatttttgatgttctcctttgttggaaattcttgtgaaataccttccaggtcttagtctttgtgaggatcaggttctgctttcaattggatgttttaagaattagttttaaaataatttgtttttcttattattagcaccctatgtttagttgctgtacttatttggatagtgtggtaagcacagtggcttaggcatgagaaatataactagagatctcataattttatgtgtttataaagtgttttatttaaaaattaaataattgcaaatgagtggataaagaaactgatatatatatatctgattatatatatatatatctgattatgtatatatatctgattatatatatatgatggaatactacccggctataagaatgaatgaattaatggcatttgcagtaacctggatgggattggagactattattctaagtgaagtaactcaggaatggaaaaccaaacatcgttatgttctcgctcataagtaggagctaagctataaggatgcaaaggcataagaatgacacagtggcttttggggactcagagggaaagggtaggaaggagatgagggataaaagactacaaattgggttcatgtgtactgcttgggagatgggtgcaacaaaatctcagaaattaccactaaagaatttactcgtgtaaccaaataccacgtattccccagaagcctgtggaaataaaaaattaaaaaaattgcaaatgtaaataagacagtaacaaagatggcaaagaacaaagatgaaaaagtatgctgtattacctgaaagtgcttttatggatatcttagcttatccttcgtccatttaaatattgttagttttagccgggaacatgcctgtaatcccagcaccttgggaagctgaggcgggcagaccacttgagaccaggagtttgagaccagccaggccaacatggtgaaacccgtctctactgaaaatataaaaattagccgggcgttggggcgcatacctgtaatcccagctatttaggaggctgaggcaggacaatcacttgaacctgggaggcggaggttgcagtgagacgagattgtgccactgaactccagcatgggtgacagagtaagaccctgtctccaaaaaaaaaaaaaaaaaaaaaagacacaaaagagaaacaaaaaaaacatattgttagttttgatgattatctactagggtaagtacttttctactcattaaattccattagtgactgtgccttgatttccctgaaaggatgcagtatagagtaggcttttgattggagatagacttcctgattttccacttagtatttaggagtgaaaattattattattattatttattgttttttttttttttggagacagggtgtcactgtatcgcctaggctggagtgcagtggcttgatcctgactcactgtagccttgacttcctagggtcaagcaatcttcccacctcagcctcctgagtagctgggactacaggcacgtgccaccacagccggctaatttaaaaaaattctgtagagatgggatctcactatgttgttcaggcttgtctcaaactcttgggctcaaatcatcttcccacctcagcctccctaagtgctgggattataggtgtgagccactgcacccagccggaagtgcaaattatttaactcctttattttattcagcaaataaatgtctttctgagcctcagtttcctgtaataaggttcttataagttttaaatgaggtcagtgtgcattaaatgtacatgttagaatttggtaaggttagtaagaaaaccaaagacatgtggaccctttacaaaaaattccagcatttaccctaagagatgctttttaagtggttgaaatttggtggcatggaggaaatgtatatgggctcgtatcacatttgggagtaaaattaaggcatgaaatttaaacaaaaaataaaattgtgggtacatagtaggtgtatatatttatgggatttatgagattctgagacaggcatgaaatgtgtactaatcacatcatgtaaaatgggctgtccatcccctcaagcatgtatcctttgagttgaaaaacaatccaattttattctttcaggtattaaaaaatgtacaattaatttaatacagtaaataatacattaatttgatctcaaactcctgacctcaaatgattaattagattaattaatgtattatctattatttattatatacaccctgttgtgccatcaaatactaggccccccccccccttttttttttttggagacagagtcttgccctgtcgcctaagctggagtgcaatggtgcgatcttggctcactgtaacctccgcctcctgggttcaaatgattctgctgcctcagcctcccgagtagctgggattacaggcgcccaccaccaagcccagctaatttttgtatttttagtagagacggggtttcaccatgttggccaggctgctatcgaactcctgaccgcgtggttcgcccgccgcggcctcctaaagtgctgggagtacaggtgtgagccactgcgcctggccaaatactaggtcttattcatgctttccaactgtttttttttttgtacccattaaacgtcaccacatcttgccccccctcgcacttctcttttctttctactctgtgtctccatgagtttgttttgatttttagattccacaaataagtgagaatatgcaatgttggtctttctgtgcctggcttatttcacttagcataataacctctagttccatccatgttgttgcaaatgacgggatctcattcttttttatggctgaatagtagtccattttgtgtaactaccacattttctttatccattcatctcttttgatggatacttaggttgcatccaaacctggctattgggaacagtgctgtaataaacatgggaatgcaggtatccctttgatatgctgatttgctttatttctggtgtatacccaagcagctggattgctggatcatatggtagctcaatttttagttttataaggaacctccaaactgttcttcgtagtggttgtcctatttcacgttgttgccaactgtgtatgaggattttcttttctttacatcattgccaacatttgttattgcctgtcttttggatataagccatttcaactcaggcaagatggtatctcatggtagctttgatttgcatttctctgatgatcagtgatgtagaatgctttttcatatgcctatttgcaatttgtatgtcttcttttgagaaatgtgtatccacattttttgcccatttttgattggattattagatttttattctgtagagttgtttgagctacttacatattctggttattaatcgcttgttagatggatagtttgcaaatactttctcccattctttgggttgtttgttcactttgttgattgtttcttttgttatgcaaaagctttttaacttgatgtgatcccatttgtcaagttttgtttggttacctgtgcttgtggggtattgttcaagaaaattttgcccagactaatggcctagagagtttccccaatgttttcttgtagaggattcataaattgaagttttagataaaattctttaatccattttgattttatttatgtatagagcaagagataggagtctagtttctttttctttttttttttttgaggtggagtttcggctcttgttgcccatactggagtgcaatggcacggtctcagctcactgcaacctccgtctcccaggttcaagcgattctcctgcctcagcctcccgagtagctgggattacaagagcccaccaccatgcccgtctgatttttgtatttatttatttttatttatttatttatttatttatttagttttttgagacggagtcttgctctgtcacccaggctggagtgcagtggcacgatctcggctcactgcaagctccgcctcccgggttcacgccattctccagcctcagcctcccgagtagctgggattacaagagcccaccaccatgcccgtctgatttttgtatttatttttatttatttatttatttatttatttatttatttatttagttttttgagacggagtcttgctctgtcacccaggctggagtgcagtggcacgatctcggctcactgcaagctccgcctcccgggttcacgccattctccagcctcagcctcccgagtagctgggactacaggcgtccgtcactgtgccggctaattttttgtatttttattagagacggggtttcaccgtagccagaatggtctcgatctcctgacctcgtgatccgcctgccttggcctcccaaagtgctgggattacaggcgtgagtcattgcgccaggctaatttttgtatttttaatagagaccggatttcaccatgttggccaggctggccttgaactcctgacctcaggtggtctggccgtctcggcctcccaaactgctgagattacaggtatgagccactgcacccggcctggagtctagtttcattcttctgtatatggatatccagttttcccggcaccatttatttatttatttttatttattttatttttttttgagacagagtctcattccatcacccaggctggagtgcagtggtgtgatgtgggctcactgcaacctctgcctcccggattcaagcagttctcctgcctcagcctcccgagtagctgggattacaagctaatttttatattttgagtagagatggggtttcaccatgttggccaggctgatctcgaactcttgacctcaaatgatccacctgcctcggccccccaaattactgggattacaggcgtgagccaccgtgccgggccagcaccatttatttttattttattttacttatttttttgagagtgagtctccctatgttgcccaggctggagtgcagtggtgctatctcatctcactgcatgcagcctctgcctcctgcgttcaagcgattctcctgcctcagcctcccaagtagctgggattacaggcacccaccatgatgcccagctaatttttgtatttttagtagagacggggtttcaccatgttggccaggctggtctcaaactcctgacctcaggtgatccttccgccttggcctcccaaagtgctgggattacaggcatgagccaccatgcccagcctggagtctagtttcattcttccgtatatggatatccagttttcccggcaccgtttacttatttatatttatttattttattttttttgagacagagtctcatttcatcacccaggctggcgtgcagtggtgtgatctaggctcactgcaacctcttcctcctgggttcaagcaattctcctgcctcagcctcctgagtagctgggatgacaggtgtgtactaccaccatgcccaactaatttttgtatgtatgtatgtatgtatgtatgtatgtatgtatgtatgtatgtatgtatttgagacagaatcttgctcttttgtcgaggctggagtgcactggcacgatctcggctcactgcaacctccgcctcccaggttcaagcgattctcctgcctcagcctcctgaggagctgggattacaggtgcatgccaccacgcctggctaatttttttttcgtatttttagtagagatggagtttcaccatgttgcccaggctggtctcgaactcctgaccttgtgatctgctcacctcagcttcccaaagtgttgggattacaggtgtgagccagcgtgcctggccccagcaccttttattttatttattttatttatttttctgagagtgagtctcactgtgttgcccaggctggagtgcagtggtgctatctcccctcactgcaacctctgcctcctgggttcaagtgattcttctgcctcagccttccaagtagctgggattacaggtgcctgccaccatggctggctaattttttttttttttttttttttttttttagcatagatggggtttcaccctgttggccaggctggtctcaaactcctgacctcaagtgatccgtctgctttagccttccaaagttctgggattacagatgtgagccactgtgcctggccccagcatcatgtattgagcctttttcttttccccagcatatgttctcggcacctttctagaaatagaaaatgagttcaccgtagatgtgtggatttgtttctgagttctgtattctgtccattggtttatgtgtctgcttttatgccagaatcatgctgttttggttactataactctgtggtataatttgaagtctgataatgtgattcttccagttttgttctttctgcttagtatagttttgggaattctggaacttttgtagttccgtgtaagttttaggattgttttttctatttctgtgaagagtgtcattggtattttgatagggattgcattgaatctatagattgctttggatagtatggacagtttaacaatattgattcttccagtccatgaacatgaaatatctttacattttttggtgtcctcttcaatttcattcagtttgcttttcagattggtcactgtcgatgtttagaaatgctgctgatttttgtatattgattttttatactgacagtttactgaatttgtttatccgttctaatagtttttttgtagagtctgtaggtttttctaaatataagatcatatcatctgcaaataagggtaatttgacttcttcctttcccttatttctttctcttgtctggttgctgtagctaggacttccagtagtaccatgttgagtaactgctggaagtgggcattcttgtcgtgatctggatcttagaggaaaggcgttcagtttttcccctcagtttgataccagttgtgggtgtgttgtatatggcttttattatgttgaggtatgttcctcctaaacccatttttttgagggtttttatcatgaaggaatgttgaatattatcaaatagtttttaagcatcaattgatataatatggtttttgttcttcattctgttgatatgatgtatcacattgatttgcatatattgatcccctcttgcatccaagggataaactccacctggttacgatgaatgatctttttaatgtgtctgatttgctagtattttgttgaggatgtttgcagcaatatttatcagagatattggcctgtcattttctttttttgatgtgtttttgtcaggttttggtaacagggtaatactggcctcacagaatgtgtttggaagtattgcttccttttattttttggaatagtttgagtaggaatagtattgatgcaggaattttctcggcccctttgttggacttgtgacaggggcgaatgtttactcagcctgccgtgctcaaccccttgttggagggtgcatgtgagtgagtgagtgcgggacctggccagctggtgggggcactgacacagcagcaagccctgtgcagggaccacggccagaccaggcacaagcgagtgagtgtgggacccagctgttctgagcaccagcaggagcaggcctgtgcacagcacccaggttgatggggaggggggtggtgtctgtgaccccgaggcccctgagggggtgttaacagtgctcctttagttctgctgtctgctgatggctgtgtgttaacaagttggcctcttgccttgtcatgtggggtggctgccctccactggtgagggcaaagggctggtgtgacagtcttttttgggtacctgcactcagtgggtcctgagctcttgtctggcatccaagaagaatgaggttgagtggacacttgaaggatggtgaaggtgaagaattttattgagcagtgggaatggctcagtggagaggggagctggagaggggatgggaagggctgatctccctgaagtccggccgtttcttccctaagtcatgctgtctcctttcccaaagtttggccatcttctctccgaaattaagctgtttctctcctctctaccaactgaatctggggtctttataagcataggatcctctttataagcacaggatgggggcggggcaggctgtagaagttttggaaaaggcaacattctattggtaaagagacattattcaaacagaaccaatcgggagagagcggacaaacaggaatagaagttttcactttgggctgtgggtttcaggctttttggcttgaacgtggggtttcaccagggactgcccttgtcttcctagaatttctctgcctcctgcctctatcagtattagatcttctttaaatgtttggtagaattcagcagtgaagccatcaggtcccaggcttttatttactgggagaatttttattatggtgtcaatctcgttatttgttatagctgtgttcaggttgcagatttgttcatggttcaatcttggtagattgtgtctaggaatttgtccatttcttctaggttttccagttcattagcatatagtttttcatagtagccatgaatgaacctttttatttctgcagtattggttatcattgtaatgtctccattctcatctctggtttatatatttggatcttcttttttttttctttttttttttttactctggccaaaggtttttaaattttcttttaacttttacaaaaaccaacattttgttttattgatattttgtattattttctttatttcagtttcgtttgcttcactctgatctttattatttcttctaattttggggttggtttactcttgcttttcttattctttaagatgtgttgttaggttgtttatttgaagtatttcttcttttttcatgtaggcactcacagctataaacttcccttttagtaatgcttttgctgtatcccataggttttggtatgttgtgtttcagtatcatttgtttcaatgaattttccaattttcttcttaatttttgcattgacttactgatcattcaagaacatattgtttaatttacatgtatttgtatacttttcaaaatttctcattattgatttctagttttattccgttatcagaggagatgcttgatattatttcaatatttttaatgtcttaagacttgttttgttacttaacatatgttctatccttgagaataatccatgggctgaggagaagaatgtgtattctgcagcccttggatgaatttttctgtaaatatctattaggtccatttggcctctaatgcacattaagtctgatgcttcattgttggttttctttggaaggtctgtccaatgctgaaagtgggatattgaagtctccaagttttatcatattggggcctgtctctcccttttgctctaataatacttgctttatatatgtgagtgctccagtgttgggtgcatttatgtttaaaatggttacatcctcttgctgaattgactgctttatcattatatagtgaccctctttggcttttcctatagtttttgtcttgaaatctattttgtcttatattagtatagccacttctgcacttttttggtttccattggctttggaaaagatttctcgtaattctgtttgataaggacacatgttaggaggttttcaacacttcagtgagtagtaaacttgtaagtaaagcaggtatgaacagaatctcttgaattagtgaaaagtcaaaatcgttaattactgtttaatttaaaactgaaattataggtattaacaaataactatatgccttatactgtactttatttatttatttttccgagacggtcttgctctgttgcccaggctggagtgcggtgacgtgatcttggctcactgcagcctctgcctcccgggttcaagcaattttcatgcctcagcctaccgagtagctgggactacaggcatgcactggcacacccagctaagttttttgtatttttagtagagatgggatttcaccatgttgcccaggctggtctccaattcctgacctcaagtgatccacccaccttggcctcccaaagtgctgggattacaggcatgagccatcatgcccggccatataatgtactttaaacatgatgattttgaaactggaaacacacgcacatgtgagtaatttcttaaatggaattgaattaccttgaagaatcttagaaaaatgatgtttttaattttaaattagttttgcgtcatacatgtctttatttctcaaattttaaagaaaagtctatgaattaaagaaaataaaacttttcctgcatgaaagcaatgagtgtattatgtaccaaaaaggtagaagaaaaatatcttctgtaatattagctagatattacttactaaagatatttttggggtatatttattagcaatattttaatgcaattttaaacataattgtcatcatacttcatagacagtttatagcctgctatttttggttagcattgtagtatgagctattttccatattatttgaacttttaaaatttaatggttggtatgatattgtatgacttgtatgcatccttgtttacctagtctttattatacactttaattgattacagttttttttttttttttttgcttttgtgagcatctggcagataactttcttgagtaaagttattatgtagaaatattttctttgggccaggtgcggtggctcatgcctataatcccagcactttgggaggctgaggcaggtggaacatgaagtcaggagttcaagaccagcctggccaatatggtgaaaccccgtctatactaaaaatacaaaaatcagctgggcatggtggtgcatgcctgtagtcccaggtactcaggaggttgaggcaggagaattgcttgaacccgggaggtggagaggttgcagtgagccgagatcgaaccactgcactccagcctgggcgacagagcaagactccaactcaaaaaaaaaaaaagaaaagaaaagaaaagaaatactttcttactttctttgtatagataaagggagatagaattactagatcaaagtctcttgatggtttttgccaatttgttttgtaaatgtatgtatcaccacaggctatctatgagagtgtctatttcatggaaacttagcctacaatgaatagtcattttacccctaaatatttgataagttaaaaaatgctatcacatttaacatttcataggctttaagaagttgcagttttatattcatttcttcatgcattttgtgtactatttcaaaagtttctataggggaatgagagcaaagtaatgtgtttttcattatttattttgctaaccaaacatatttaattactaaccaaaaggatgatcctaattaagccaacacttggaattattttcatgtaaaatgtctgtgatagagataattgaatttaataatgaaaaaagtattacagaaatttgctcattaaactgagcttgttttcagctaatccttctgcgaagtgataatgactttttttttttttttttaaataaagatgggggctcgctatgttgaccaggctggtcttgaactcctggcctcaagtgatcctcccatctccgcctctcaaattgctaggaatacaggcatgagccaccacacttggtttaatagtggaatttttattacacttttttatggattcgaggagaggtggcattgtacataacacattctaccgctaattttccatctttcacttttctcattgtgctttccttcccattccgttcctggtgttgaaccaatgcatcatttgtaaatttgtagacagtctgagtttttctgccataatctgttgtttcttcagacttcttctctggtttataagaaaactgttgttttaaaactctcagttttgtattttttatttcttattatactttaagttctgggatatgtgagcagaacgtgcaagttttttacataagtatacatgtgccatggtggtttgctgcacccatcaacctatcatctccattgggtatttcttctaatgctatccctccccttgcccccaaccccccaacaggccccagtgtgatgttcccctccttgtgcccatatgttctcattgttcaactcccacttatgagtgagaacatgcagtgtttggttttctgttcctgtgttagtttgctgagagtgatggtttccagcttcatccatgtccctgcaaaatatatgaactgatcctttttttatggctgcatagtattccgtggtgtataggtgccacattttctttatccagtgtaccattgataggtatttgggttggttccaagtctttgctactgtgaatagtgctgcagtaaacatatgtgtgcatgtgtctttacagtagaatgatttataatcctttgggtatatacccagtaatgggattgctgggtcaaatggtatttctaattctagatcattgtggaatcgtcacactgtcttccacaatggttgaacgaatttatcctcccaccaacagtgtaaaagtgttcctatttctccacatcctctccagcatctgttgtttcctgacttcttaatgatcggcattctaattggcatgagatggtatctcattgtggttttgatttgcatttctctaatgaccagtgatgctgagctgtttttcatgtttgttggccatgtaaatgtcttctttggagaagtgtctattcatatcctatgcccactttttgatagggttatttgtttttttcttataaatttaagttctttgtagattctggatattagccctttgtcagatggataaaaaaacactatttttttaaaaaattttccaattcctcatcggtaaaaaagcagtaaaacattcatggtaatgatcatggcctatagttttttttttttttaagtgacattaggatttaaaactggtatgaaacctaatcatttattttagttagctaatatcaggatttagatttatttttttgacccaattgcagataggcagatcagatctcatagactgccatctgcctcaagctccttttgtagttatgtgaatgtgagcctgaaggctgaacccacttttctctaatggagatttttttttattacactttaagttctagggtacatgtgcacaacgtgcaggtttgttacatatgcatacatgtgccatgttggtgtgctgcacccattaactcgtcatttacattaggtatatctactaatgctatccctcccccctccccccaccccatgacaggccccggtgtgtgatgttccccttcctgtgtccaagtgttttcattgttgaattcccacctatgagtgagaacatgcggtgtttggttttttgtccttgcgatagtttgctgagaatgatggtttccagcttcatccatgtccctatataggacatgaactcatccttttttatggctgcatagtattccatggtgtgtatgtgccacattttcttaatccagtctgtcattgatggacatttgggttggttccaggtctttgctattgtgaatagtgctgcaataaacatacatgtgtgtgagtctttatagcagcatgattgataatcctttgggtatatacccagtaatggggtggctgggtcaaatggtatttctagttctagatccttgaggagtcaccacactgtcttccacaatggttgaactagtttacagtcccaccaacaatgtaaaagtgttcctatttctccacatcctctccagcatgtgttgtttcctgactttttaatgatcgccattctaactggcatgagatggtatctcattgtggttttgatttgcatttgtctgatgaccagtgatgatgagcatttttacatgtgtctttggctgcataaatgtcttcttttgagaagtgtctgttcatatcctttgcctactttttgatggggttgtttgatttttttcttgtaaatttgtttaagttctttgtagattctggatattagccctttgtcagatgagtagattgcaaaaattttctcccattctgtagtttgcctgttcactctgatggtagtttcttttgctgtgcagaagctcttgagtttaattagatcccatttgtcaattttggcttttgttgccattgcttttggtgttttagacatgaagtccttgcccatgcctatgtcctgaatggtattgcctaggttttcttctagggtttttatggttttaggtctgacgcttaagtctttaatccatcttgaattaatttttgtgtaaggtgtaaggaagggatccagtttcagctttctccatatggctagccagttttcccagcaccatttgttaaatagggaattctttccccattttttgtttttgtcaggtttgtcaaagatcaggtggttgtagatgtgtggtattatttctgagggctctgttttgttccattgttctatatctctgttttggtaccagtaccatgctgttttggttactgtagccttgtagtatagtttgaagtcaggtagcgtgatgcctccagctttgttctttttgcttaggattgttgtggcaatgcggtttaaccactctgaaaagatgtatttaaggacttttatctagactctatggtgaggtataacatagtgctggttgagtcagcttcaagtttttgtagagggaggaagagagtaacaaccatgtctggatttaataaaaagtttagcataagtaaatgtgtgctcttttgccttaagaaaatatttttcaatatataaaaaggattaatgagtgctgcctttcagatacttggtttggtgtgtttgaaacatcatttccaaagataggacatacacatttccagggatcatctctatgatatgactctagaaatgatgtagatttttaaaatcaatgtcagaacttatagacacaaatgtatgctttccttctaagtagtcactttgggagcccatatacataacagtggtgtcattcctgatgatatgttgggaactctcattttgtaaccagtttagaagtcatgcaagtaaataaatcttcaggattacttcagatttgggcaaaaaattagttttacccaacttgatcattttgcatttttcaccatatttgactctaagtgaaaactggctatttccaaaaatcatacccatcctgaggatgtgaagatatttttgggctgggcacggtagctcactcctgtaatcccagcagtttgggaggctgaggcagtagggttgtttgaggccagaatttgaagaccagcttggtcaacatagtgagactccctctctccaaaggaaaaaaaaaagtgaagttttttttttctttttcaaatgagtaggcagcattgtttagttatctgtttttttttcttttttttccactgttggacttctgtccattctctttatttgtttatttatttatttgagatggagttttgctctgttgtctaggccggagtgcagtggcgcgatcttggctcactgcagtctctccctcccggctcaagtgattctcctgcctcagcctcccaagtagctgggattacaggcatgcaccaccaggcccggctaattttgtgtttctaggggagacggggtttcaccatgttggccaggctggtctggaactcctgacctcaagtgatctgcctgtctagctcccaaagtgccggggttacaggtgtgagctaccgtgcctggcctgctgatcatactctcttgattttatttttgtactgtggtactgcggttgatggactgcactgatgttatccatatttttaaccttggtcacccacagtgtgaactcattaaatagctgactttgcaatttgattgctatgatttgggaatgagtgtggcagtcataattgtgcaggtttgctatcgtttcatttctagagaacttttctatggtgatctattgatgagataagatatagtatgacattatttattcctctttttgacttttggttctcaggaattttgggtgctgtgagttgacatgtagcatcatttcctcaggtctcattttctatctgagcacgattaaggacacagtgacctgatgataaatttttttgtacatctgactcttatctgaaagaatggttattggccaaatatggaaaccatacccacttggtacctttattctagaggcaaagtttgtttcaaaattttgtaaaacaaccctctccaccaaaagaaaacaaatacccacacaagatctctagttacggtgtctgttatatctcatttcttttccttccctaaatatactgagctattcttaactaaatacaggaaaattgtgcagaggaacacttactaagtgttcagtaaatgttttcatttttcttatgtgtatatctagaagtagaattgttgggtcattgagtaactgtttctgcgtaaatatctatacacgtgccatggtggtttgctgcacccatcaacccgtcatctacattacgtatttctcctaatgctatccctcccccaacccctaacaggccccagtgtgtgatgttcccctccctgtgtccatgtgttctcattgttcaactcccacttatgagtgagaacatgcagtatttggttttctgttcttgtgttagtttgctgagaatgatggtttccagctccatccatgtccctgcaaaggacataaacgcatccttttttatggctgcatagtattccatggggtatatgtgccacattttctttatccagtctatcactgatgggcatttgggttagttccaagtctttgctattgtgaatagtgctgcagtaaacatgtgtgcatgtgtctttatagtagaatgatttataatcctttgggtatatacccagtaatgggatggctgggtcaaatggtatttctagttctagatccttgaggaatcgccacactgtctgccacgatggttgaactaatttaccctcccatcaacagtgtaaaattgttcctatttctccacatcctctccagcatgtgttgttccctgactttttaatgttcgccattctaaccggcgtgaggtggtatctcattgtggtttttatttgcatttctctaatgaccagtgatgatgagttttttttcatatgtttgttggccacataaatgtcttcttttgagaaatgtctgttcatatcctttgcccactttttgttagggttgtttgcttttttcttgtaaatttgtttaagttctttgtagattctggatattagccctttgtcagatggatagatcacaaaaaagttctcccattctgtaggttgcctgttcactctgatgagatatatatatatattttttttttgctgtgcagaaggtctttagtttagttagatcccatttgtcaattttggcttttgttgtcattgcttttggtgttttagtcatgaagtctttgcccatgcctatgtcctgaatggtggtttgcctaggttttcttctagggtttttatggttttaggtcttatgtttaagtctttaatccatcttgagttaatttttatataatgtgtaaggaaggagtccagcttcagttttctgcatatggctagccagttttccaaacaccatttattaaatagggagtcctttctccattgcttgtttttgtcaggtttgtcaaagatcagatggttgtagatatgtggtgttatttctgaggcctcggttctgttccattgttctatatctctgttttggtaccagtaccatgctgttttggttactgtagccttgtagtatagtttgaagtcaggtagcatgatgcctccagctttgttctgtttgcttaggattgtcgtggccctgtggggtattttttggttccatatgaaatttaaagtagcttttttttccaattctgtgaagaaagtcagtggtagcttgatggggatagcattgaatgtatacattactttgggcagtatggccattttcatgatattgattcttcctatccatgagcatggaatgtttttccatttatttgagtcctctcttatttccttgagcagtggtttgtagttctccttgaagaggtccttcacatcccttgtaagttgtattcctaggtattttattgtctttgtagcagttgttaataggaattcactcatgatttggctctctatctgttattgttgtataagaatgcttgtgatttttgcacattgattttgtatcctgagacttcgctgaagttgcttgtcagcttaaggagattttgggctgagatggtggggttttctaaatatgcaatcatttcatctgcagacagagaatttgacttcctcttttccggattgaataccctttatttctttctgttgcctaaatgccctggccagaacttacaatactgtgttgaataggagtggtgagagtgggcatccttgtcttgtaccgggtttcaaagggaatgcttccagtttttgcccattcagtatgatgttggctgtggttttgtcataaatagctcttattattttgagatacgtttcatcggtacccagtttattgagagtttttagcgtgaaggagtgttgaattttattgaagtccttttctgcatctattgagataatcatgtggtttttgtcattggttctgtttatgtgatggattatgtttattgatttgcgtatgttgaaccagctgtgtatcacagggatgaagccgacttgatcgtggtggataagctttttgatgtgctgctggattcggcttgccagtattttattgaggatttttgcatcgatgttcatcagggatattggcctgaaattttctttatttgttgtgtctctgccaggttttggtatcaggatgatgctggcctcataaaatgagttagggaggattccctcgttttctattttttggaatagtttcagaaggaatggtaccagctcctctttgtacctctggtagaattcagctttgaatctgtctggtcctggacttattttgatcggtaggctattagttactgcctcaacttcagaactttttattggtttattcagggattcgacttcttccttgtttagtcttcggagggtgtatgtgtccaggcatttatccatttcctctagattttctagtttgtttgcatagaggtgcttatagtattctctgatggtagtttgtatttttgtgggatcagtggtgatatcccctttatcattttttattgcatctatttgattcttctctcttttgttctttattagtccggatagtggtctgttttgttgatcttctcaaaaaaacacctcctgaattcactgatagtttgaagggtttttcctgtctctatctctttgagttcttctctgatcttagttatttcttgtcttctcctagcttttgaagttgtttgctcttccttctctagttgttttaattatgatgttagggtgttgactttagatatttcctgctttctcttgtgggcatttagtgctataaatttccctgtacacactgctttaaatttgtcccagaaattctggtatgttgtctctttgttctcattggtttcaaagaacttctttatttctgccttaatttctttgtttacctagtagtcattcaggggcaggttgttcagtttccatgtagttgtgcggttttgaatgagtttcttaatcctgagttctaatttgattgcattatagtctgagagactgttatgatttccgttctttttcatttgcttaggagtgttttacttctaattatatggtcagttttagaataagcacgatgaggtgctgagaagaatgtatattctgttgctttggggtcaagagttctgtagatgtctgttaggtctgcttggtccagagctgagttcaagtgttgtatatccttgttaattttccgtcttgtcggtctgtctaatattgacagtgggttattaaaatctcccactattattgtgtgagagtctaagtctctttgtaggtctctaagaacttgctttatgttctgggtgctcccgtattgggtacatatatatttaggatagttagctcttctcgttgctttgatccctttaccattatgtaacacccttctttgtctgttttgatctttgttggtttaaagtctgttttatcagagactaggattgcagcccctggttttttttgctttccatttgcttggtaaatgtttctccatccctttattttgaacctatgtatgtctttaatttgtttttaaaattattatatccatcctacttagtataaattggtttcttgttgtggttttgatttgcatttccctgatatgactaatgatcttgagcattttttcatgtgcttattggccattggtatatattcttttgagaagtgtatatctaagtcttttccccatttaaaaaatagggttgtctttttgttgtttaattgtaagaagtctttatgtattctggttaccagaccctcatgagatacaggatttgaaaatcgttttctctcattgtgtttgctgtgttttcactttcttgatggtgccctttgacatgcaaaagttttgacttttattaaaaatggggctgggcatggtggctcacacttgtcatcccagtgctttgggaggctgaggtggaggatttcttgaggccaggagtttcagaccatcctgggcaacataactggaccccatctctacaaaaaattaaagaaaaaatttagctaagagtatagttgtgtgctgcacttcctcaactaagaacataggtgtgtgccacaggtactcaagatgctgaggcgggaggattgctttagcccaagagttttgagacctcagtgagtcaaggtcacgccactgtgctcaagcctgtgtgacagagcaagaggctaactctaaggaaaaaaaatggggtaaacttatactttccttatttaaagttttaactccttaaaaccctgttgaattacagatacatctattatataacttaagagttgatgctataggctgggcacagtggctcacgcctgtaatcccagcactttgggaggccgagatgggtggatcacgaggtcaggagatagagaccatcctggctaacacggtgaaacctcgtctctgctaaaaatacaaaaaaattagccgggcgtggtggcgggcgcctgtagtcccagctacttgggaggctgaggccggagaatggtgtgaacccgggaggcagagcttgcagtgagccaagatcacgccactgcactccagcctgggtgacagagcaagactccgtcttttaaaaaaaaaaaaaaaaaaaaagagttgatgctataaaacttagttaatgaaatatttccctgggcgatggagctcttgcaagtcctgttgtattttttgttcatctttatgccagtcagttagacagttcttctatgtcaagcagaggatggaataataaaccaaaacactgcttagggctttcagagagtaagtgttcagtaaatatattcgataaattactgaattatttttttaaatgatggaaaggaaaatcttgccctctctttttctgggtgttggctagtataaatctttcttgaagtgataatctacatctatgttttgatttctaaggatttcccaaatataagctatatataagtgagaggaaataataacttaggtgcctaatgataatatgacaagataagtacaagggtcagctatttgttgtgaaatagcaatggatataatttaaatatgaatacctttttgctgtttaatcccccaaattttcttttgatttcttttaaaattcttttgtggtaggtaggtttattgtttcttaagaattaacttaagggtagtattttctgatacatttttaagtaacatgaagtttaacttctgtttaaacacatcatatagagtacattgaaagacctcagtattttcgaaatgtttagtaagtaatatcagcagtttccttaaatgatattttaatcctaggtaagtgtacaggtaggttgtgttactcatatttttatattcttagtgaaatagaattcttttttttttttttttttgagacagggtctgactgttgccttggctagagtgcagtggcatgatcttggctcactgcaacctctgcctcacaaggctcaagccatcctcccacctcagcctcctgagtagctgagaccacaggcatgagccacccatgctctattatgagccaccacacctggcctaaaattcgttttctttaatattttttctttctacacccacaactgtaacatttcccttagtttttactttgaatgtgcatactcttacacgacttacagtatggctatattttcagtttgctagagctttacaattaatttaaaacatgaaaggctaattaagggaattctttaaattttgttttaatag

SEQ ID NO: 297 - DNA, 68601 bp, Homo sapiens
gtgagaagggtttcggggtatcggcgcaaggctccgacgggggtgggggtggggatggggtggggggaggtggggggggcgcggcctagggtatggggcgcttcttgcaatctcccctaaacggtgacgcttggtcgggctcctctgtttattctttggtgcctgtgggattgagacctcgaagtcggaggcggtctttggtatcccggtcatttttgctaatctttgggcctagaaactgcgtggggaagaagcggggggagggtgagaagagggggaggggtgggcgggcgcgaggatgtgagatcccaggacgacttagaggcgtttaggttgctggagatgggaagcacccgggccctgcgggattttttttctgcagccccaggagacaagcctttttttgattgggttgtggtgcagttccaggtatttaggtatcttttctactccatatcctgaaggatatccttgggtttatttctaggcgaggggggacttaacacagggttttgcttccagaggaccctagtatactactttttgtgatgtccagccttaatgggacctcaagtgtttccccactttctgggcaaatttcgaggagtaattaggccctatctttatttacttatttattccatgaaggatgaagggcaggttaacgtgggctgatgcgaagtaagatttattgcaagggaaaatgcctggcaggcctcctcttaaccaatcaagcacgtttattaggttgaagctgtttttctgtgtgcttctgatttgcctcttgacgggtctgaaaatttgggtagtcaatatgaaatgtatacacttttacccaggtggctggctggcgtttcagtttgacatttgaattttcatcccacaatgtgaattaagtaatttttttactcggagatgcatccttggcgtccagtggcaaaataaaattacaaggagcatgggtcagaattgcatttcaagttggcgaaatgtgcctttgagtaactcttagattggcatatgtttttagagcaatttagctagaatgtagaattgggcaatgagcctatgatacgtatgtctgtatttctgcatgaacaagcagtagattatattttctttaccttggggaaagatatgcttcagttcttagattgtagatctctagttgtgtacacgattgtggccttggtttctgaatttgtcagtaggctcaaatacaacaaatctttatctgtggggtattaggcacgtaagtggtacccagtataacttgttggcctgtaattaccaggcactcatgttcatatgcatggatggtgtaccttacagttaaattatgacctctagattttactaagtttcacaaagtctacatttgaaactatagtttgaagtcggatcttctcagtttctttagaatgaacaaattacgtatatagaatttctgaatagaataattaattttacacaagggtcagtttttcttactagtcttggatttttgtagatcttgatgataagagtaataatcataactaagttgagtgcttattgtcgttctttataatcttgatgaattctcaaacctgtgaggtaagtacttggttttgcccattttaccgatgaggaggaaagtgagacatagatcaagaacttgaccgaagttatacagcttgtaattggtggagctggaattgaaccccatcttgacttcacagcttatgttcttaaccacaaggcattaatgcccccttcagctgccaggtctaacctgattatgaccatttaaatttagcccaagtgttacaatgaaagaagttcatattacctactctgatttgttgcaggtctatgattttgtagctgtttataatgttacattttttgtgtccaggtgtactatgtagtgagataactgaaatatttaatgctaggagagtcttaagctacatgaaaaacctctagtaaagaactgcatatatgcatgtagggaattaattaaaaagtgtgacactccctgatgatttactatgaaagagctccaagtaggtgttcagaactgtctcaggctgaagtgtcatcgatctcctaaaccataatcatggttaaaggagaatctgacaggtaatgcttgagttgaacccacagtaccaaatccctcttgagtcttttctaatgtgaggcagaaataatataagcattattgttaatattattttacacagtagttccagattttctctttatcaaatattttgtcaagcacttaaaaagcaggaacaaagactagttctaatttttacttgtgtttataaaaaaaagtaatattctaggattctgtggtggaaaaatggccagaagacaagaggaaggaaaataaaccgatgacctggctaaaacatacactgactaatcagtggctcagtctttaaaggttttgttgtttttaaaggatttttttggttgtttgtgttgtttgaaataagattgacttgcttctggcattataaaagataaggtcttttataatcaccaagctctcaatgtagtacttgggtacctgggtgtcactgctgattattttttaatttttaaatttatttttttgagacagagtctcactttgttgcccaggctggagtgaaggggcgtgatcttggcttactgccgcctccgcctcccaggttcaagtgattctcatgcctcagcctcccaagtaactgggattaacaggtgtgtgccaccacgcctggctaatttttgtatttttagtagagagggagtttcaccatattggctaggctggtcctgaactcctggactcaagtgatctacctgccttggcctcccaaagtgctgggattacaggtgtgatccaccgcgcctggctctctgctggttattcagggcccaagggctcttcagttatcaggtgatgtatgctgctaggactgggaccttcccttcagggcagcagattcccttctggcccaggatgtgtctagaattgtcatcctggagctagggcctggaatggaggcttcatgactgatgaactttaatttgttttctttatttttattttttttgagatggagtctcactctgttgcccaggctggagtgcaatggcaccatcttggctcactacaacctttgcctcctgggttcaagcgattctcctgcctcagcctcccaagtagctgggattacaggcaagtgccaccacacctggccaatttttgtatttttagtagagacggggtttcaccatgttggccagccaggctggtctcaaactcctgacctcaggtgatctgcccgcctctgcctcccaaagtgctgggattacaggtgtgagccactgcgcttggccttaatttatttgcatataaagatttcagtattgggagatttggtgaaatttgtcattctaatccttatggcaattgattacttgaaaagctgacagctatattaccttgttattgatcttaaatataaaaaggcagaagttgtctaaattgagagattttgaatgtcttagaaagtatctgttaaggtggtagtttacaagcagttacattgtaacctaattgttgaaaaatgttatctgtgaaatacttgcatttccactatgaaaagcatgaaaccaggcccttggagggggaggagatgcaaattttataaaggtttttaaaaagcatttaaatatcaatggcttggttatgtaatgggttggggtgaaaagaaagacatttgtgaccttaatttttatcaggcccagttttattattggccacccttggcatagttggccttgagctttcagttatgtattgtatttctagagataagataaatgtagtacttaaaataatatttaagtattgatgtaggtgtgtgaaataattgtttcataagtaattgtatgtgtctttttcacttttggggtctgaataaacttatgggttgggtaataggatacgggcaattcttgaatttacatgaagtgctttcccccagaccgtgaatgttcttttggatatcagaaactatttaaatagttgaagccagtgaaaactgatgcatagatcttcctttagaaatgttgaatataacagggcagtgaaaggagggtctaagcagtctgtctctaattttatcctaatgcttgtcttatgatcagcttggaagctgacatgcaagatgtttaacttctatttttccatctgtaaaatgggaataagctcaaatgggagtaaatatcaatatttatcaataatagatattgataaagtctaaaggtattctgaaggaggtaacatgtttgtaacaatggttcttaaaagagaaactaaagctctggggtcctagttttttttttttttttttttttttgagacagagtctcactatgttgcccaggctggagtacagtggcacgatctcaggtcactgcaaactccgccctccgggttcacgccattctcctgcctcagcctcccgagtagccgggactacaggcacctgccaccatgtgcggctaattgtttgtatttttagtacagacagggtttcaccgtgttggccaggatggtctcgatctcctgacctcgtgatttccacccgcttcggcctccaaagtgctaggattacaggtgtgagccaccgcgcccggctgttaatttttaagagtgaaaagaggtgctgcgactaaatggtttgagaactgcttgtatagaggaatgaacactgaactgtgagccaagccttggtttttcagttatagctctgttgcttgattgtatgactgtggacaaatcatttatctgttccaggcttctgctttgtcatttgcagaacgaacaagactagatggtctgtagcattaatttttttttgggacaaggtctcactgtcacccaagctgtagtgcagtgacactgaacatggctcactgtagccttgacctcctggctcaagcaatcctcctgcttcagcctcccatgtagctgggaccacaggtgtgtcatcatgccccgctaattttttgatttttttgtagaaacagtggtctcactttgttgcccagtctggtcttgaactcctggacttaagcgatcctcctgccttggcctcccaaagtgctgggattacaggtgtaaaccaccataccctgcctaaagttagtttttaaaaaattctgcttacaggccacgtgcagtggctcacgcctgtaatcccagcactttgggaggccgaggcaggtggatcatgaggtcaggagttcaagaccagcctggccaagatggtgaaaccccatctctactaaaaatacaaaaaaaaatcatctcggtgtggtggtgggcacctgtaatctcagctactagggaggctgagacagagaattgcttgaacccaggaggcggaggttgcagtgagctgagattgcgccactgcagcctgggcgacagggtgagagtctgtctcaaaaacaaaaacaaaaacaaataagcaaaaaattctgcttatatgagtgtttatcattttctcttatctgccttttgtgggttagggagaagggtagtggtgagataaagtttctttattcagtgtatttatatctttttgccttaaaacttacatggttaggttacaggtgttttgttgctgatacttgtcatagtatcatgtatacctggttgtataaacatttattggaaaggaaaaaacatttttgttggaaagtttggtaattattgtggcttaggatatgttctattttgaaagattgctatatccagtatatttctgcccttttatgattgaagatgtacgtctgaaaatacctatgttagttctagccggttgttctttttgcgctgggaagtctttgaattttgcactgtagctgctattttcagatcctgtctctgaaactttgtctctcagttttagcttgaagtagccatttcctgtatctgtagtccagcactcttgttaactgtcccatacaatatttgttaagaaattattgttctggcagtagtattcacatgtatatatcctgcactccatattttgggggaatgctttattagttgatcaaatacttaagtatcaatttggggccaggcatggcactgtgttagggttatgccaaaggtaataaaattcctgccatcttaaggcattcttagtcaagtgagggagattggtaagtaaatgagcaattagaaagcagtgctaaaatatggaaatatattgattgcgctagggatcagaaatgaaagaaagcctaatttgggggatgtctaggaaagttttgcaaaggagatgttaactgtattgagtcttgaatgagttagcagttaagggttgactgtgagagggcagtccagacagctattagtatggttaaagattagtcttattttccatatatcagaggaaataagacatgtacacgattagttttggtgcaagatataaagtgataaatgctgcatgaagtaaaagtaagttgttgtgtgagttcaaagtagaaagacatttctggtggggaccaaggaaagctttatagagagatagcatttgagccgggcgccgtggctcacacctgtaatcctagcactttgggaggctgaggcgggtggatcacgaggtcaggagatcgagaccatcctggctaacatggtgaaaacccgtctctactaaaaatacaaaaaaaaaaaaaaaaaaaaaaaaatccgggcatggtggcgggcgcctgtagtgccagctgctcgggaagttgaggcaggagaacttcgtgaacctgggaggcggagcttgcagtgggccgagatcgcgccactgcactctagtctgggcaacagagcgagactccgtttcaaaaaaaagaaaaaagagagatagcatttgaatctagtccttggaatataggtacagttttgacaaaggagactgtgggagaattccagatgtgaggagtagcagcttgagcaaaggaatgttgtgtatattagcattttctatttggaagaaggtcaacatcgaattttaaacttaatttctggacaaatactgtataactattgtgcctttttttttttttttgagacgtagtctcgctctgtcacccaggctggagtgcagtggcatgatcttggctcactgcaacctccgcttcccgggttcaagcgattctcctgcctcagcttcccgagtagcttggactacaggcgtgtgccaccatgcctagctaatttttgtatttttagtagagatgggatttcaccgtgttggccaggatggtcttgatctcctgacctcatgatccgcccgccttggcctcccaaagtgctgggattacaggcgtgagccaccgcgccctgcctattgtgcttttttttttttttttaagagacagggacttcctctgtcacccagcctggagtgcagtggggtgatcatagctcatagcttactgcatcctagaactcccgggctcaagtgatcctcccacctgagcctcctgagtagctgggaccacaggcatgtgccactatgcccagctactattgtgcattttgtatggtagcttttgtggcttgatgatcttgtaaaaggtacatgtgcctttgtgaatgggcctgataattttagttcagaattgtcaaaagtattatctacttttttttttttttttgagacagagtctcactctgtcacccgggctcagtggcaccatctcagcttactgcaacctccacctcctgggttcaagcgattcttctgcctcagcctccgagtagctgggactacaggtgtgagccaccatgcctggctagtttttgtatttttagtagagacggggtgtcaccatattggccaggctggtctcgaactcctagacctcgtgatctgcccacctcggcctcccaaagtgctgggattacaggcatgagccaccgcgcctggccagtattacctacttttaaataagattgtgtaggatttaatgcacagattttgaatcactgtgataaaaatgcatccttagttgtcttcattttgctcatttgaagtgctcagttgacttttgggtgggtaacatttgacttatagaatctaagataaaaaattatttctgagtaatactggatttgttattttgcttatttggattatattagttattttttggtttatttgatagcattccagatttagttttgctataatgcttgttttgaaaatgtggattttttccaaaagggttgatatttcagggaacaatttgaagcatacgacaaaatttgcatttgcttatgggggattttgtctgcagggtcagggatcagcatactgtggcctaccaaccagtggcctgttttttgtaaataaagttctttttttttgtttttgatctttgttttgttttgttttgttttgttgagacggagtcttgctctgtcgcccaggctggagtgcggtggtgtgatgtccgctcactgcaacctccgcctcttgggttcaagcgattctcatgcctcagcctcacgagtaggtgggatttcaggcatttgccaccacgcctggctgatttttgtattttttttttttttttttttttttttttttttagtagagacagggttttaccacattggcctggctggtcttgaactcctgacctcaggtgatccgcctgccttggcctcccaaagtgcagggattatagatgtgagccatgtaaataaagttctattggaatacacctatgtccatttatttacattgtctgtggctgcttttgcactgtagttgcagagttgaatagctgcagcagagacctagtagcccacaaagcctaaaatgtttactgtctggccctgtattgaaagagtttgctgattattgtgctagatgaatgcaggatactacacccctctaaaaagagctgcatagaaatacatgcatatagatgcacacacgtctgacatctaccagctacctcatttcaccacttgggttataaaccacacatatttacatctgttgtacaattttcaatccgatttcagataaccttccttctaccacttcacaataattcatgagctgcaacccttttgatgcccacttcacaagcaaacttcaggtctttttcaaagtaaagtgccacatttattgttatatttgagcatttattatttaacatgtcaaactgtgctaccatttttctttggtttctttgttttaaaaaaagtcactgatgaaatttttgaatgttgtgcttctaacctcatttttcctatgagttctatggtgttaattgcacaattttacatagtttggtggtttttaggaacccatatgttacattattgaggaactgactaattatcatcctgtaaaaagtactaattcattcaccaaacatttctggggtgatgtaaatattaagtgagttaaatgggcataaagcacttatgtctttattgttactcaaatattagttattactgattactattaccatgtgtcaggaactgtaataagtagtgcattgatgaacaagacagataagggacctgtctccatgaagcttacattgtatttttaaaaatctattaatatacattttggctagtaaccgagcccttgccccacagaaaagttgtgctgttacacaaaataatattttaagatccatccacaagtcaaagacatttcacttaaaacagctttctcagcagtgtctccttgatagggtataatattttattgaattattgtttttggctgggtgcagtggctcatgcctgtaatcccaccactttgggtggccaaggcaggtggttctcctgaggtcaggagttcaagaccagcctggccaacatggtgaaaccccgtctctactaaaaatacaaaaattagccgggcgtggtggcgcatgcctgtaatcccagctactcaggaggctgaggcaaaattgcttgaagccgggaggcagaggttggagtgagccgagatatcaccaccgcactccggcctgggcgacagaatgagattccgtttcaaaaataaataaataaataaataaataaataaataaagaattattgtttttaatttttgtttttttctgagataggctgttactctgtcactcaggctggagtgcattggtgcagtcatggctcactgcagcctccgcctccctggttgcaggtgatactcccacctcagcctcccgaatatctgggactataggtgcatgccaccatgctgagttaatttttgtatttttttgtggagatgagtttttgccatgttgcccaggctggtatcgaactcctggactcaagctatctgccctctttggcctcccaaagtgctgggattataggcatgagccaccaaacctggccatgtgattgtttttttgtaactgtaacctcaggagatgaatccgatctatctttagggagataaagagtaatcatcccttcctttttttactgtataaaaggttacaaaatataatttcagacttgtagaaaatttgtaaaaatagcacaaagattctcagatgtgcttcatccagatgcagcaaggggtaacattttaccatgtttactttatcatcctctattattatttttctgaattgtttcagagtaaattgcagacatgatgtccctttactcccaaatactttaatacatatttctcgaaactaggaatagtctgttacatgatcccagtatagttagcaaaattaaaaattagcattaaggctgagtgcggcctcccacacctgttatcccagcactttgggaggctgaggtgggaggattgtttgaggccaggaattcaagaccagtcttctcaacatagaccctgtctctacaaaacaaacaaacaaacaaacaaacaaacaaacaaaagtactaaattagccggtgtggagcatgcctggagtcccagctactcagaaagctagagtcaggaggatcacttgagcctagaagttccaggctgccatgaactatgatcatgccactgcagtctagtgtgaatgacagagtgagacccccatctcttaaaataaaagagagattagcattgatacaataccatttttttttttttgagacagagtctcacactgtcgcccaggctggagtgcggtggcgcgatcttggctcactgcaagctccgcctgctgggttcacgccattctcctgcctcagcctcccgagtagctgggtctacaggttcccgccatcacgcccagctaattttttgtatttttagtcgagacgggttttcaccgtgttagccaggatggtctcgatctcctgacctcatgatccgcctgcctcggcctcccaaagtgctgggattacaggcgtgagccactgcacccggccgatacaataccatttttaatctacagaccttattcacattttaccaattgcttcatgacatccttcatgatgaaagacaaaaagttcttgttttctgatctaccatctaattctagaacactcattatatttcattgtcatctggaacagctcaccttgccatttttttttttttgagacagttttgctcttgttgcccaggctggagtgcaatggcatagtcttggctcactgcaacctccatctcccaggttcaagtgattctcctacctcagccacccgagtaactgggactacagacatgccccaccacgcacggctaattttgtatttttagtagagatggggttgcaccatattggtcaggctggtcttgaactcctgacctcaggtggtctgcccgcctcggactcccaaagtgctgggattacagatgtgagccactgcgcccggcctcttctccatttttaaaagaacacaggccagttgatttgaatttgtctgatgtttccctttgattatatattttggtaggaacactatgaagtgatgttttgtccttcacagcacattttatcaggaggtgtataatgcctttgcttttactatgttttagaatgattttgctttgtttttttttttctgagacagagtcttgctctgtcgcccaggctggtgtgcagacgtgcgatctcggctcactgcagcctccgcctcctgggtccaggcgattctcctgcctcagcctcctgagtagctgggactacaggcgtgcaccaccatgcccagctaatttttatatttttagtagagacggggtttcactgtgttgatcaggatggtctcgatatcctgacttcgtgatccgcccgccttggcctttcaaagtgctgggattacaggcgtgagccatcgtgcctggccgattttgcttctcatgctaaaattattaatcagctcattctctgccattttatttagaggtttgaagtttggcttgattaatttctacagaattggggagagttttcccacctcccatttttcttgctttttccatttcctccttcctcagatacccccaaagttcaaaaccaaccaccccgattatgaattttcattttgtattctgaacatatagctaaaagcagagaattaagggtgaatgtttcatgttaaagtgattggacctgttgttaagcatatgaaataatatatttccttcaaaggctgactatactatagtgcatccaacatagcttgttgaatatctcagttcttttttttttttttttttttttttagctgaaatttgccacagggaaatatctctccagcctgggcaacatagtgagactctgtctcaaaaaaaaaaaaaaaattagccaggtgtggtggtgcacaactgtagtcctaaatacttgggaggctgaggagggaggatcctttgagcacaggagtctgaggctgcagtgagctatgattataccactgtactctagcctgggagacagagcaagaccccgtctctcaaaaaaaaaaaaaaattggtggtgaaatacacataccacaagatttagcattttaaccattaaaaaagtttgtttttggctgggtgtggtgactcacgcctttgggagtgatcccagcactttgggaggccgaggcggatggatcacgaggtcaagagatggagaccatcctgtccaaaatggtgaaaccctgtctctactaaaaatacaaaaaaaaaaactagctgggcatggtggtgtatgcctgaagtcccagctactcgggaggctgaggcaggagaattgcttgaacccagggggcagaggttgcagtgagccgagatggcgccactgcccgccagcctggagacagaacgagactctgtctcaaaaaaaagcttttttttttttttttttgagagaagggatctcgctatgtttcccaggctggtctcaaacttctggcctcaagcaatccttctgcttcggcctcccaaagtactgggattacaagagtgagccactgtacctggcctcatttttctattttgataaacacttttttttttttttttgagacggattcttgctgtgttgcccaggctggagtgcagtggcatgatcttggctcactgcacctctgcctcccgggttctctgcctcccgggttcaagcaattctgcctcagcctcctgagtagccgggactacaggcgtatgccaccgtgcccagctaattttttttgtagttttagtagagacgggttttccccatgttggtcaggatggtctcgaactcctgacctcaggtgatccgcccgcctcggcctcccacagtgctgggattacaggcgtgagccaccatgcctggctgataaacacttttaaggcttaacatgagctaagtattattttagaacagattgtctcaaccttggcactatagacattttgtccagaaaattttttgttagaggctgtcctgtgaatgcattttatccctgacctctacccactagataccagtaacacccctaccctgagttgtgacaagcaaaaatatttccagaaattgccagatgttccctgtgggcggtatgggtttgagaaccacttttctagataataggcatttgtagataatgaatactgagctaagtggaggagtaaatggttgaaatagactatgtggttaagtacagttacagagatataaaccaagagatgtggaagaatagcaaaaaatttccttagagagttgatagcaagtattttcccaagagagacagcaattctgagttgggtcattggggatggtggggggaaatgtgctgaggagggggaaatattctaggtggtggaacgggttatgtctagagatacggtagaggagcccttgggtgccttgagaaaaatgagataataagtatgattggagagaatatgggaggtagaattggaaagaaggatgctagttggggtcaggtttgagaaaggcttttttttttttttgagacggagtcttgccctgtcacccaggctggagtgcagtgcctcactcggctcactgcaacctccgccttctgggtttaagtgattcttctgcctcagcctcttgagtagctggcattacaggtgcgtgccaccacttccggctaattttgtatttttagtagagaccgggtttcaccatgttggccagactagtctcagaactcctgaccttgtgatccgccagcctcggcctcccaaagtgctgggattacaggcatgaaccaccacgcccggccgagaaaggctttttatgctatgctaaaatgtttcattttccccctttcattatagaaaatcaacaaatacttttaaagtctgtagagttatatgatcagctttttaaaagaatagtgatacagtgaaatggtaaaaatggtcaatggtgaatattaaactcaagaagataactctagcctgtaaagtaggaaaataggaagggatggagatttatataaaactaaaactagatgtcatatgttgcccttaaatcacatcaccctgtgtgtagacttcttcatcctcatttgtcaaaattctgacatattgtcaatactgatgaagattcttgatattcaaagcaggagtgaagtgggcaaaaatctgtattctaattttcattaccctaataatgtccttttaatttggagcagttctgtggcctctctttgtctgtcctgatcttgacatttttgaagagtatagaacaattattttttagaatgtatctctatttgggtttgtgtgatgcttctttatgattagatgaagggtatgcatttttggaagaaataacagaagtgatggtatgttgttttcagtgcctctgtaacaggagatgcatgacattggttggtcccattactgatgatggtaattttaatcacttgggtggtttccagtagatttttctatgtaaagtttatcatttttggccgggcatggtggctcacgcctgtaatgccagcactttgggaggctgaggcaagcagattacttgaggtcaggagtttgagaccagtctgaccaatgtggtgaaaccccatctctaaaaaaatacataaattagccaggcatggtggcatgcgtctgtaatcccagctgctcaggaggctgaggcaggagaatcacttgaaccctggaggtggaggttgcagtgagccgagattgtgccactgcacttcagcctgggtgacagagtgagactccgtgtcaaaaaaaaaaaaaagtttatcatttcccatttttattttgaaacagtcttgctctgttgcctaggctggagtgcattggcacaatctcagctcactgcagcctcaacctcctgggctcaagtgatcctcccacctcagtctcctcagtagcgtgttccaccacacccggctgctttttgtattttttggtagaggtggagtttcaccatgttgctcaggctggtctggaacccctgagctcaagggcactgatcacctcagcctcccaaagtgttgggattacaggtgtgagccaccacgcctggccctgaaaaatatttttaacggttacattatcatggagaattggatggtataaaacaatagcagttctcatatttgaaaataaattgatgtaatgaaacaaatgagaggatcaaataatattgtaaaaagaataaaaacccacatatggacaggtctgtggaaattgtattaaagcctacctctcccagattgtttccgtttgttgcaatccatttaagaacagtttttgggctgggcacggtggctcacgcctgtcatcccagcactttgggaggcccaggcaggtgtatcatgaggtcagatttcaagaccagcctggccaacatggtgaaaccctgtctctactaaaaatataaaaattagctgggcatggtggcatgcacttgtaatcccaggtactcgggaggctgaggcaggagaattgcttgaaccaggactcgggaggtggaggttgcagtgagccaagatagcaccactgcactccagcctggcctgggctacagggtgagactcagtctcaaaaaaaaaaaaaacaaacaaaaaacagtttgtgggaaaaaacaatccttgtgtatgacataatttgctgcttttcccatttagaaaatttaaaaaatacttatttgagatggggtctcactatgttgtccaggctagggtgcagtggctattcacaggtgtgaacatagtacactacagcctcgtactcctggccttagcatcttgagtagctgggactgcaggtgcacatcacagtgcctcgcttactttttccatttttgtctgttgatcctctctctcttcctttggggtaaaaattgtggcttgtgatggtggtttgtggggaaagaaaaagttggtaagctacaagctctgagcctttaatgtgtttttgttaaccatgcagacagacattagatacatagatacaacatagatgagttaaatttgaaagaaggcaccaaactttgttactttaaagcaggatttctcaaagggacactgttgacattgatttcagaagtgagattttcatggtttttaatgttattattataatggtatggatagtgttttgccctctaagaagtagctaggagtgtttccatagatgcatttagtttatatcacttatgtattctgtctctattttgtaagaaaattgcctatgaacagaattttttctgtatgtggatttaatgtcttcttctaaaggaaacatgggtgtggttcacatttccttagttttgagtagcatggcttaagttgtgatccaattttaaaaaatcagttgaataaataaatagaaaataaaaggataatttctgtactaaaaaagtcagctggacagttaaaacatctccttttattcgtaagtttttcaataaaaattgttaaaagcagtattcatttgtgtaatgatataatctttgttattgttttatgtgcttttctaaaatgcaggaaacataaggtaaggagaagtctttccttaccctgggaccagatgtctatgaggactgttgacttttctgctataaacaggatgataaattaacagtggtgtgataggtaaagtagatttgttatgacatatcttccattaagcgataataacttgatttttacttagttgatgaaataaaataactttgaaaccttgggtaacatgaaattgaatcaaaatattttcaagttatggaacatagtgttattaatagaatggagtgttgaaaaagcactggattatgctttctgtaacttttagttctgggtcttatgataactgtgaccctgagcctcagtgttttccttttaatctgtagtgatattttttagttcagtctctcattttaaactgcttttagctctaaaattttatctcagtgacctgttgagttatataacaatcgtatcaggtaacctagataagaagaggaaggcagtaacatttcagaaatacagtttggggttgggaatccttaagtgatccagacttctcctttggtccgaagatagtgtgaataaaacagctgagggatgtgggcatcaatatattgcagaggaaaaggttatttccaggagtggatttgcagctactcttaaatctattatgttggggctgggcactggggctcatggctgtaatcccagcactttgggaggctgaggcgggcggatcacctgaggtcaggagttcaagaccagcctggccaacgtggtgaaaccctgtctctacaaaaatacaaaattttgccgagcatgatggcgggtgcctataattccagctacttgggaggctgaggtgagagaattgcttgaacccaggagtcggaggttgcagtgagctgagattgtgccattgcactcctgcctgggtgacagagcgagactctgtctcaaaaagaaaaaaaaaatctattatgttggatagatggtcttttccagaagcaaattttatagatggaaagcattttaattaatctagtaaaattctctcattttacaaatgaggctccctctacctctctccccctctccccctctccctctctccctctctccctctctccctctccccacggtctccctctccctctctttccacggtctccctctgatgccgagccgaagctggactgtactgctgccatctcggctcactgcaacctccctgcctgattctcctgcctcagcctgccgagtgcctgcgattgcaggcgcgcgccaccacacctgactggttttcgtatttttttggtggagatggggtttcgctgtgttggccgggctggtctccagctcctaaccgcgagtgatccgccagcctcggcctcccgaggtgccgggattgcagacggagtctcgttcactcagtgctcaatggtgcccaggctggagtgcagtggcgtgatctcggctcgctacaacctcacctcccagccacctgccttggcctcccaaagtgccgagattgcagcctctgcccggccgccaccccgtctgggaagtgaggagcgtctctgcctggccgcccatcgtctgggatgtgaggagcccctctgcctggctgcccagtctggaaagtgaggagcgtctctgcccggccgccatcccatctaggaagtgaggagcgccttttcccggccgccatcccatctaggaagtgaggagcgtctctgcccggccgctcatcgtctgagatgtggggagcgcctctgccccgccgccccgtctgggatgtgaggagcgcctctgcccggctgcgaccccgtctgggaggtgaggagcgtctctgcctggccgccccgtctgagaagtgaggagaccctctgcgtggcaaccgcctcgtctgagaattgaggagcccctccgcctggcagccgccccgtctgagaagtgaggagcccctctgccccgctgccaccccgtctgggaagtgaggagcgtctccgcccggcagccaccccgtccaggagggaggtgggggggtcagccccccgcccggccagccgccccgtcggggaggtgaggggcgcctctgcccggccgcccctgctgggaagtgaggagcccctctgcccggccaccaccccgtctgggaggtgtgcccagcggctcattgagaacgggccatgatgacagtggcggttttgtggaatagaaaggggggaaaggtggggaaaagattgagaaatcggatggttgccgtgtctgtgtagaaagaggtagacatgggagacttcattttgttctgtactaagaaaaattcttctgccttgggatcctgttgatctgtgaccttacccccaaccctgtgctctctgaaacatgtgctgtgtccactcagggttaaatggattaagggcggtgcaagatgtgctttgttaaacagatgcttgaaggcagcatgctcgttaagaatcatcaccactccctaatctcaagtacccagggacacaaacactgtggaaggccgcagggtcctctgcctaggaaaaccagagacctttgttcacttgtttatctgctgaccttccctccactattgtcctatgaccctgccaaatccccctctgcgagaaacacccaagaatgatcaataaaaaaaataaaaataaaaataaaaaaaattaaaaaaaaatgagaaaattgagctctcctgaggttgcagtttgcttaacagcatagatctaattagtaattaggactagaaccaaggttatctgactcccagttcaaggttcttggtacagtaccgtgtttttaactagtccattaggttgttttctgtgtattttataacacttctgtaagaaagtggaatatttttctctaaggtatgttaaaactcttgttcgagaaaatacagtaaaggatacctgttgtatcttaaagtgatttttatgtttttctgtcaatgccacaatctgaagaaagtaaattagctacacttctattgctgtgacaatagattatttagaatcttcttgattacttgtattattgttcccgtgcttcagagctgtttccttgctatttaaaatcattatggtatagcccagaggctaagggggttttctaagagtatgcaatttgtcattgacatagtttttttgtttgtttttgtttgttttgtttgtttttgagacagagtttttgctctgttgcccaggctggagtgcaatggtgtgatctcggctcactgcaacctccacctcctgggttaaagcaattctcctgcctcagcctcccgagtagctgggattacaggcacccaccaccacacctgactaatttttgtagaggcagggtttcaccatgtcggcgaggctggtcttgaactcttgacctcatgtgatccacctgcctcggcctgtgaggattacaggcatgagccaccgcaccctgccaacacagttgtttttgattggaaaagtttattttcctaatctcaaagtagcttgtatctgttctttattgtgaaatgcagtttctacattgaatttgtgtagtctgtagttttgactgttttaagttcaataactagcttagtagtatacttgttagaggtcagagtaggttaactactagaaagaacagtccttctgcttactgtactaggaggaagtctgtggtggagggaaaaaaggagtaaaacaattccagtcttctgtaaaatttgagtaatttctttctctactccttctacatgaaaaatacatcttatttgatttttgcatcacatgccttctatatgtgttggaatctggatcaccatttcttcattacttgtgggtttttgttgtgaaaaatgtggagtaagttagaagttgactgtagaataggtaacattctcttaaattctttgatcagagtgagcagagtccagaagcttggctcagacttagggaactcatgacacttctcttaatatcctaagttcatgacatgtctcttaataccctaagtgtacaatacaatagtagatcaaggaaggcagaggtatctggcagacttagaagtaactgttcataaaaacaaggatcagtatgtttctacaagataatgatttaaagttgagccaggattagttatacctttaatataaaaaattgaaatagcttatttaatctgttctaggctatagtatacggagctaggtattaaaacattctctatatatttaactcttttttttgagacagggtctcactctgtctcccaggctagagtacagtggcatgatcttggatcactgcagcctagacctcctgggcacaagtgattctcccaccttagcctccacagtagctgggactacaggcctttgccaccacacctggctcatttttgtattttttgttgagacggggtttcaccttgttgcccaggctggtcttaaacccctaagctcaagtgatccgcttgcctcagcctcccaaagtgctgggattacaggtgtgcaccactgcgcccaggctatttgacttttttattctgtaaaattgcaagcatattcagaaataagaaaatagtataacggggccgggtgtggtggctcacgcctgtaatcccagcactttgggaggctgaggcaggtagatcacgaggtcaggagttcgagaccagcctggccaacatggtgaaaccccgtctctactaaaaatacaaaaattagccaggcgtggtggtgggcgcctgtaatcctagctactcgggaggccgaggcaggagaatttcttgaaccagggaggcggaggttgcagtgagccgagatcgtgccactgcactccagcctgggtgacagagcaagactcattttttttttttttttttttaaaaaaaagaaaaaagaaaatagtataatgggttgggcccggtggctcacgcctgtaatccagcactttgggaggccaaggtgggcggatcacctgaggtcaggagttcaagaccagcctggccaacatggtgaactcttgtttctactaaaaacacaaaaattagctgggcatggtggcaggcacctgtaatcccagctacttgggaggctgagttaggagactcacttgaacctgggaggtggaggtttcagtgagccaagattgtgccattgcagtccagcctgggcaacaagagcgagactccatcccaaaaaaaacaaaaaacaaaagacaactatatatatatatataaaataacgaaaccccctaagtacctgtcacccagcttcaacaattatcatcttgcagttagttgaatttggttaacacttacccttcagtggattattctagactaaatttccaaacataatcatattgtattgaagtgttttttgaacaaactatactatggggtatttacctaaaatgaactatttgcaaaaagataagttgattttttttcttctggtgccagtacacatcataattgtagttaaaagctattatcctcacattaaagtttaatttttaacacattatgaaaatttaaaacttacagcaaagctttaaaaattttacactgaacaccaatattattaacatctagattctacctttaacattttactcttcttttttttttactcttcttgttttatcacatattgatccatctgtccaactctccattgatgtaacatttcattttattttcttattcatttcaaagtaaattacagatattagtatagttgaggttcagtttttaaagtcatattttcaactaattgtttttcctgttttgaaagactgttatatctgaagttccacattatgacaactcatagtctctatggttccagtgcttcccattttgaacttttctttcatgttctacgaacctttattaaaatatttagagctatgtacaagtaatatatacagtatttagctaaaactaagtagaatgaatgagggttttgcttgtgtgtttattgcagtctttaaaaaaaatctcttctagtgagtcaatgtgtatcttttttttttttttttttttttttgagacagagtcttgctctgtcgcccaggctggagtgcagtggcgtgatctctgctcactgcaaagctccacctcccggattcatgccattctcctgcctcagcctcccgagtagctgcgactacaggcgcctgccaccacgcctggctaattttttttgtattttttgtagagatggggtttcattatgttagccaggatggtcttgatctcctgacctcgtgatctgcccgcctcggcctcccaaaatgctgggattacaggcatgagccaccgcgcctggccaagtcattgcgtatcttaagatggtacactaaactaatatgcttgccattggtgacaacatagatgaacctggaggacattatggcaagtgaagttagccagacgtggaaaaaataatacttcatgacttcaacctatatgtggaatctaagaatgccaagtctgcaaaagaagagagtagaaaagtagttaaatgggtaggaaggtgggagaaatggggagatattggttaaaggttaccaagttggaatcacgtaggatgactaggtctagagatctaatgtacagcatgaacactatagttaataatactgtatcatgtactggaaagttgttaaaagagtagatttcaggtgttttcagcacacacagaaaaagataactatatgtggagatgggacattttgcttgaccatagtaatcatttcactatgtatatgtatatcaaaacattcatgttgtacactttattgattgattgattgagacagggtctctcgctgttgcctcagctggagtgcagaggcatgatcacagttcactgcctgcttgacctcccaggctcaagcgatcatcccacctcagccccccaagtagctgggactacaggtgtatgctaccatgcctggctaatttttatagtttttgtagagatgggttttgccgtgttgcccaggctggtattgaactcctgagctcaagcaatctgcccgcctctgcctcccaaagtgctaggattacagatatgagccactgcgcctggccataccctttaaatatatacataaaaagaagaatgcctttaaaaattttccatttaacaattactctcagggccaaaactcactgtttaagtattttgctcttttactttgatcttggtgttctatgtagtgctaaaatatactttcatctccatatgactgcttgtaacaaaaagctgttcaccacattatgaactccctgaatacacacaataatcatatagtaaatgcttgttgaataaacaagacaaaattcatcagtttttatccttacttaattttttgaacttttccttgaacttctgttatcaaacttaatacatgaacaacagaaagatgctacggatctatgtagtacaaagtaaaatatgaaatttacacactaaatatttctgtagcatattttcagaagtaagtaattgaatataaacagaagcaagcatattctatttttttattatttaagtgggaaatattttaaaatcttatgtcatatttgctttagatttcttttaaagaattaaaacattacagatagagttgaagcctcatgggttattttaatgttttctacataaacatgtttccatatacataaaccttatttagaattttttcagtttatttatttatttttattattatactttaagttttagggtacatgtgcacattgtgcaggttacatacgtatacatgtgccatgctggtgtgctgcacccactaacttgtcatctagcattaggtatatctcccaatgctatccctcccccctcccccctccccccaccccacaacagtccccagagtgtgatgttccccttcctgtgtccatgtgatctcattgttcagttcccacctatgaatgagaatatgtggtgtttggttttttgttcttgcgatagtttactgagaatgaaattttttcagttttatacgtttatgtaagtggcaccatacagtacatattattttgcaacttgccttttttttttttgtttgtttgctcaatgttgtttttaggattttgatgtaactccagatctgcactgtccaatacaatagccactaactatctgtggctattgagtactggaaatgtagctagtccacattgagatgtgctagaaatatatttgtacatggaatttcaaatatttagtattaaaaacatgtaaaatatctcactaaaagtttagtatccctaagaatctgaaatagaaaatgctccaaaacccaaaattttttgattactgacatgactctcaaaggaaatgctcaaaggtttaatgcaaatattccaaaatctgaaaaaatctgatatattgaccacatatggaactgataatagtttggatgtattggattaaataaaatgtaaaaattttaccagtggtttccttttttaaaatatggctactagaaaatttaaatatatatttgaaatgccttacattatatgtctgttgggcagcactgatctatattgcccacttttcattcctgtttatttattattattttatttttatttttattttttgagacagagtctcgctgggtcgcccaggctggagtgcagtggtgctatctttgctcactgcagctgctgcctcccaggtccaagcaattctcttgccttggcctcccaagcagctgcgattacagctgtgcaccaccacacttggctaatttttgtatttttagtagagacggggtttctctgtgttggccaggctggtctcgaactcctgacctcaagtgatccacctgccttggcctcccaaagtgctgggattacaggtgtgagtcactgctcccagccttcactcctgtttagtattaagttatatagataatagtttgctactggtggatagttgttgttttttttttttacgaatttggtgctactaaagactgttctcatgagcattcttaaacatgtctcctttgcacatatgctagagtttctttctccctaatggttcttctgatttatacttccactggcagtttgagaatgttcttgttctgcagttcttcatcctggtcgatgtttttgtgtagataactgtaatttaatacttaaagtcaaaagcataaggaagcattggtaattatttaagtgaatataaaatgtcagcttatttttctcagtgaatcttttgtaatagtcaactcacattgcctattttttattgtagtgcttctgatctgaataaataaatttaaaatttaacagccatgttatgtatcttattagtaggcagctgcagttatgcaaccaaagaatgtcccatctttaagttccattagcttgaaaaagaaatggcagctttacgtcatggaatactgtgctgccactaaaaatgatgttttagaagaatatttaatgatgcagaaaaatattcacagtatcttaatggaaagaaaagattataaagcagtaaccatttcgttttgttaaaatcaggtctatgttagctttttttttttgagatggaatctcgctctgtcacccaggctaaagtgcagtggcgtgatctcggctcactgcaacctccgcctcctgggttcaagtgatgctcctgcctcagcctccctagtagctgggattacaggagcatgccaccacacccggctaatttttttgtatttttagtagagatggggtttcaccatgttggccaggctggtcttgaactcctgacctcaagtgatccacccgccttggcctcccaaagtgctgggattacaggtgtgagccaccgtgcccggcgagcatttccttacatgcttatctctggatggtcagattgtaggtaacttctattttgcacttcacactttttttttttttcttgagatggagtttcgctcttgttgcccaggctagagtgcaatggcgtcatcttggcccactgcaaactccgtgtcccgggttcaagcgattctcctgcctcagcttccagagtagctgggattacaggcgcccgccaccacacctgcctaatttttagtatttttagtagagacagaggttcaccatgttggccaggctggtctcgaactcctgacctcaagtgatccactcgcctcggcctcccaaagtgctgggattacaggcgtgagccaccgtgcccagcctgtacttcacacttttaatatttcattttctgtagtggatttactattaccagggaaggggaatgcaaggaggagggaagagttcttaacctaaaattttcatagttggaatattattataggaaagaagagattgaatgaggtgtcactgttcccatgtttaaagataagtcaattgggaggccgaggcaggtgaatcacgaggtcaggagttcaagaccagcctggccaatatggagaaaccccatctctactaaaaatacaaaaattagctgagcgtggtggcaggggcctgtaatcccagctactcgggaggctgagggaggagaatggcttgaacccagagggtggaggttgcagtgagctgagatcgtgccactgcactccagcctgggcgacagagtgagactttgtctccaaaaaaaaaaaaaaagataatactttccttctattcaatttcaggcttttcttaagttacaaatggaaccagccaaactatgttattgcttacccattgtttttccagcgttagaggagtttttcaaagaatattttttgatttagagattattttatttattatctatttagagattattcatcatttagagattgccatttaatttcagtaagagttccatttgcatctgatattttttagtttcggagaaaggaaatggtggagaaatggattcatctccaatcctttggaataaaattcagacagtttaagctctagtctcaacttgatttaatttggaattgcatgatgtggtgtcagatttgggttcacatccagttctcttgctgtgtaaccttgggaaatttacccagcatctgagttgtttcttcatgtgtgcagtggagacaataccaagatgaagatttcatgagatgtctagtgtagacatctatttttcagagtggatgcatttaacagttggatgctgaatttataagagtatggatttcataaaaagagcataaatttcatgatatgatgtatatatcaaaagatataggtcgggtgcagtggttcatgcctgtagtcccagcactttgggaagttgaagcggatggatcacttgatgccaggagttcgagaccagcctggccaacatggtgaaacttcgtctctactaaaaatacaaaaattagccaggcgtggtggtgtgtgcctgtaatcccagctacttgggaggctgaggcaggagaattgcttgaacccaggaggcagtggttgcagtgagccgattttgtgccactgcactccagcctgagtgacagattgagactccatcttaaaaaaaaaaaaatgatggctgaataggaacagctctggtctgcagctcccagtgagaccaaaatgtagaaggcgggggatttcttcatttccaactgaggtacccagttcatctcattgggactggttaggcagtgggtgcagcccatggagggtagcagaagcagggtggggcgtcgcctctcccggaagtgcaaggagcgagagatctcccttccccaagccaaaggaacccgtgagtctatgctatccggcacagatactacacttttcccatgatttttgcagtccgcagacccggagattccttagtgtgccaactccaccagccctgggtttcaagcacaaaactgggcatctgggcagacagtgagctagctgcaggagttttttttttttccccctcttcataccccagtggtgcctggaaccccagtgagatagacccattcactcccctggaaagggggctgaagccagggagctaggtggtcttgcttagcgggtcccactcccacagaacccagcaagctaagaaccactggcttgaaattctcattgccaacacagcagtctgaagctgacctgtgaagattgagcttggtgaggggaggggcgtctgccattactgaggcttgagtaggcagttttcccctgacagcactaaggaggctgggaagttcagactgggcagaactcaccacagcgtggcaaagtggctatggccagactgcgtctctagattcttcctctctgggcagggcatctctgaaagaaaggcagcagccccagtcaggggcttatagataaaactcacatcttcctgggacagataacctgtgggaaggtgcagctgtgggcgcagcttcagcagacttaaatgttcctgcctgctaggtctgaagaaagcagtggatcctgacaaggaggattctcctagcacagcacttgagctctgctaggggacagactgcctcctcaagcgggtccctgaccccagtgcctcctgactgggagagacctcccagcaggggttgacagacacgtcacacaggagagctcccgtgggcatcaggctggtgcccttctgggacgaagctcccagaggaaggagcaggcagcaatatttgctgttctccagcctccgctggtgatacccaggcaaacagggtcaggagtggacctttagcaaattgcagcagacctgcataagaggggcctgttagatgaaaaactaacaaatagaaagcaataatatcaacatcaacaaaaaggacccccacacaaaaaccccatcaaaaggtcatcagcctcaaagatcaaaggtagataaatccacgaagatgaggaaaacccagtgcaaaaatgctggaaattccaaaaacccgaatgcctcttctccttcaaatgaacacagctcctctctagcaaggccgcaaaactggacggagaatgagtttgacgaattgacagaactaggcttcagaaggtgggtaataacaaactcctctgagctaaaggagcatgttctaatccaatggaaggaagccaaggaacttgataaaaggttacaagaactgctaactagaataaccagtttagaggacataaatgacctgatggagctgaaaaacacagcacaagaacttcgtgaagcatacacatgtatcaatagtcaaatcgctgaagcggaaaaaaggatatcagatattgaagatgaacttactgaaataaggcatgaagacaagattagagaaaaaaggttgaaaaggaacaaacaaagcctctgaaaaaatatgggactatgtgaaaagaccaaacctatgattgattggggtccctgaaagtgatggggagaatggacccaagttggaaaacacacttcagggtattatccaggagaacttccacagcctaccaagacaggccaacgttcaaatcaggaaatacagagaacaccacaaagatactccttgagaagaccaaccccaagacacataatcgtcagattctccaaggttgaaatgaaggaaaaaatgttaagggcagccagagagaaaggtcgggttacccacaaagggaagctcccagaggaaggatatctgggcagaaaccctacaagccagaagagagtgggggccaatagtcaacattcttaaagaaaaaacttttcaacccagaatttcacatccagccaaactaagcttcgtaagcgaaggaggaataaaatcctttacggacaatcaaatgctaagagattttgtcaccactagacctgccttataagagctcccgaaggaagcactaaatacagaaaggaaaaactggtactagccactgcaaaaacattccaaattgtaaagaccatcgacactataaagaaactgcatcaactaacggtcagaataaccagctagcatcataatgacaggatcaaattcacacataataatatgaaccttaaatgtaaaagggctaaatgccccaattaaaaggcacagactggcaaattggataaagagtcaagacccattggtgtgctgtattcagaagacccatctgatgtgcaaagacacacataggctcaaaataaagggttggaggaatattaaccaagcaaatggaaaaaacaaaaaaaaaaggggtgttgtaatcctagtctctgataaaacagactttaaaccaacaaagttcaaaaaaggacaaagaagggcattacataatggttaagggatcgatgcaacaagaagagctattttaaatgtatatgcttccaatacaggagcacccagattcataaagcaagttcttagagacctacaaagagacttagattcccacacaataatagtgggagactttaacaccacactgtcaatattagacagatcactgagacagaaaattaacaaaaatattcaggacgtgaactcagctctggaccaagcagacctaatagtaacctacagaactctctaccacagatcaacagaatatacgttcttctcagcacatcacacttattcactcaaaaccccacaactacatggaaactgaacaacctgctcctgaatgactgctggtaaataacgaaattaaggcagaaataaagaagttctttgaaaccaatgagaacaaagagacaacgtaccagaaatctctgggacacagataaagcagtgtttagaggggaatttatatcactaaatgcccccatcagaaagcaggaaagatctaaaatgaacaccctgatatcacaattaaaagaactagagaaaaagagcaaacaaattcaaaagccagcagaagacaagaaataactaagttcagagcagaactgaaggagatagagacatgaaaacctctccaaaaatcaatgaatcaaggagctggttttttgaaaagattaacaaaatagaccatgagccagactaataaagaagaaaagagagaagaattaaatagacacaataaagaatgataaaggggatatcaccactgatcccacagaaatacagactaccatcagataatattataaacacctctacgcaaataaactagaaaatctagaagaaatggataaattcctggaaacatataccctcccaaggctaaaccaggaagaagttgactccctgaatagaccaataacaagttctgaaattgaggcagtaattaatagcctaccaaccaaaaaaagcccaggagcagatggattcacagccgaatgataccagaggtacaaagaggagctggtaccattccctctgaaactattccaagcaatagaaaaagaaggattccttcctaactcattttatgaggcaagcatcatcctgataccaaaacctgtcagagacacaaccaaaaaaggaaatttcaggccaatatccctgatgaccatcgatgtgaaaatcctcaataaaatactggcaaacagaatccagcagcacatcaaaaagcttatccaccattatcaagtctgcttcatctctgtgatgcaaggctggttcaacatacgcaaatcaataaaagtaatcaatcacataaacggaaccagtgacaagaaccacatgattatctcaatggatgccgaaaaggccttcgataaaattcaacaccccttcatgctagaaactctcaataaattacgtattgatggaacatatttcaaaataataagagctatttatgacaacccatagccagtatcatactgaatgggcaaaagttggaagcattccttttgaaaaccagcacaagacaaggatgccctctctcaccactcctattcaacatagtgttggaagttctggctaggcaagagaaagaaataaaggttattcaaatagcaagacaggaaatcaaattttctctgtttgcagatgacatgattgtatatttagaaaaccccatcatctcaacccaaaaactccttgagctgataagcaacttcagcaaagtctcaggatacaaaatcagtgtgcaaaaatcataagcattcctatgtaccaataatagacaaacagccaaattatgaaggaactccctttcacaattactacaaagagaataaaatacctaggaatgcaacttacaaggggtgtgaagggcctcttcaaggagaactacaaaccactgcttgaggaaataaggacgcaaacaaatggaaaaacattccatgctcatggatgggaagaatcaatatcgtgaaaatggccatactgcccaaagtaatttacagagtcaatgctattcctatcaagctaccattgactttcttcacagaactaggaaaaactacgtagagccaaaacaatcctaagcaaaaagaacaaagctggaggcatcctgctacctgacctcaaactatactacaaggctccagtaaccaaaacagcatggtactggtaccaaaacagatatatagaacaatggaacagaaccgaggcctcagaaataacaccacacatctacaaccatctgatcttcaacaaatctgacaaagacaagcaatggggaaaggattccctgttttataaatggtgctgggaaaactggctagccatatgcagaaaacagaaactggaccccttctttagagcttatacaaaaattaactcaagatcgattaaagacttaaatgtaaaacctaaaaccataaaaaccctagaagaaaacctaggcaataccgttcaggacataggcatgggcaaagacttccatgactaaaacaccaaaagcaatggcaacaaaagccaaaattgacaaatgagatctaattaaagagcttccacacagcaaaaaaactatcattggagtgaacaggcagcctacagaatgtgagaaaatttttgcaatctatgcatctgacaaagggctaatatccagaatctacaaggaacttaaattacaagaagaaaacaactccatcaaaaagtgggtaaaggatatgaacagacatttctcaaaagaagacatttatgtggccaacaaatgtgaaaaaaagctcatcatcactggtcattagagaaatgcaaattaaaaccacaatgagataccatctcacgccagttagaatggcgattattaaaaaggcaggaaacaacagatgctggagaggatgtggagaaataggaacacttttacacttttggtggaagggtaaattagttcaaccattgtggaagacagtgtggctattcctcaaggatctagaaaccagaaatacaatttgacccagcaatcccattactgggtatatacccaaaggattataaatcattctactataaagacacatgtacctgtatgtttattgcagcactatttacaatagcaaagacttggaaccaactcaaatgcccatcaatgacagactggataaggaaaatggggcacatatacaccatgaaatactatgcagccataaaaaagattgagttcgtgtcttttgcaggtacatggatgaagctgtaagccatcattgtcagcagagtaacacagtaacagaaaaccaaacactgcacgttctcactcataagtgggagtcgaacagtgagaacacatgggcacagggaggggaacgttacacattggggcctgtcaggggttggggggcaaggggagggagtgcattaggacaaatataatgcatgtggggcttaaaacctagatgatgggttgataggtgcagcaaaccaccatggcacatctatacctgtgtaacaaacctgcatgttctgcacatgtatttcagatcgtaaagtaaaaaaaaaaagatatggaagttactatgcgcgttaataaaatatgtttatacctcctcccttaggtgtctattatgtagaacaagtttattacattctaatgataaagtaaacactctgttttcaaaggtggtgttatacgtttgtgtatcttttgccccgggcatgatgatttcatcgtttgtgtaataaatttaatactaccatagtctccccttattcacacgggataagttccaagaccccaatggatgcctgaaactgtggatagtactgaatcctatatacacttatgtttttttcctgtacactcatatttatgataaagtttaacttataaattgtgcacagtgagagactgacaataactataataaaatagaacaattataacaatatactgtaataaaatttatgtgaatttggtttcaaaatatcttattgtactgtactcacccttatgatgatgatgttagatgataaaatgcttatgtgatgtgatgaaggtaggtgaattatgttaggcattgtaatgcagcatgaagctactattgaccttctggtgttacatcagaaggaggatcatctgcttgggtggtcctgaatcatcacgtcctgatgatgtctgttgctggttgtcaggagcagacagtgtccatgactaatgggcaggcagcgtatatagcatgtatacactggacaaagggatgtctcatgtccacggctggacagagcaggagagtgcaagattttgtcacactactcagaatcgtgcagtttaaaacttaccaattgtttatttctggaattttccgtttaatatttttggactgcagttgaccacaggtaactgaattcatggaaagcaaaacaaccatggacaaagtgggattactgtattatttcagattttaattagcatttttcaaaactctgtctagctagtgcttgcattgtagaatttgtctgatttcatttttattgattagggaaataagctttatttttatctggagtgatttgtttctttgtgcttcctcaaaattgagtagtggctactgagtatatatcgaaaaggaaataaattattatgtcaaaaagatacctacatttgtatgttgattgtagcactgttcacaagattaaagatatggaatcaacctaagtgatgaagaaaattggtgtgtgtgtgtgtttgtgtgtatacatacacactgtggaataatactattcagccacaaaaaagaaaaaaaaatcatgtcttttgcagcaacatggatgggactggaggccattatcctaactgaaataactcagaaagtcaaatactacatgttctcacttacaggtgggaacttaaatggttacacatagaatagagtagaataatagacattggagactccaaaaggtgagagggtggcaggggggtgagggttgaaaaattacctattgagtactttgttcagtatttgggtgatgggtacactaaaatcccactttaccaccatgcaatatatgcatgtacgaaatctgcacttgtaccccctaaatatatacaaataaaagttttttaaaacacttagtaaatagcctgtcatagggaataattgaaaccatttcgtatctcactttaaaacctttaggctgggtgctgttgcttatgcctataatcctagcactctgggaggccgaggtgggtggatcacctgaggtcaggagttcgagaccagcctggccaacatggcgaaatcccatctctactaaaaatataaaaattagccagtcatggtggcacacgcctgtaatgccagctccttgggaggctgaggcgggaaaatcacttgaacccaggaggcggaggttacagtgagccgagatcacaccactgcactccagtctgggcaacagagcgagactccatctccaaaaaaaaaaataaaaataaaaataaaaaacctttttagttctgtttcaatgttatcttctttttatttaattatttttggaataagaaataatatttatatggtttgaacaccaaaaggtataaaagatatttttaaaggtataaagtataaaagttagaaatttcccccacttccctgttctctgttcccacagctgccagcagcttaccaccccccagcccaatcactgctactgatgcctaacctatctttccagagttctttgtgtgttcagtagcagttaaccacagatctttaatcattcccctttataccataaaaggtggcatgttatgtacacttgcctcccctttgctttttccacttaatgtgtcttgagaagctttccatatatcagtacatggaaaactttcttatattgttttattttaaatttatatacaataaatgcatggatcagaaaaataattgaatagtgggccccaaattaaatgattactctaatgatttgtagatgggtttagttaaagcactgggatatttagctacaggtataggaatgcatgattattttctgtcaggaaacctagattttgttcttctccccttctttatcaaaggtgaaatcagactcttatttaaaccaggattaagtattctttgcataataatatatatttgctttcccaagttattcttcaggaaagtcttgactctctagcaaactttgtttcttaaaatggaggttagcaggtgttggaaataaggtgagagttttaacacttaaaggaaactatataaagattagatatagtcagaaatttagaaaacattaggaaattcacagagagatggatcccccttttctaccctagattacccctgggctgcttaatggcttgtctttactattagattgtgagctccttgaggtcaggttttatctgttttttatttcaataccaagtgccaagaatatattcagcatttggtgtaaatattataaaatgagtaaatgaatgtgctcttgaatagaagttaactctgattttgggttaagtcccccgccccctttttttgagacagtctcactctatagctcaggctggagtgcagtagcgcagtctcagctcactgcaacccccttctccggggttcaagcaattcttatgcctcagcctcccaagtagctgggattacaggtgtgtgccaccacacccggctgatttttgtatttttagtagagatggggtttcaccatgttggccaggctggtcctgatctcctgaccttaggtgatctgcctgccttggcctctcaaagtgctgggattacaagtatgatctactgcgtctggctgattttgtgttaaaatcctttatgtcagttccagaagaggttaaatggaagttttcgaggcaagagatacttgtgaatttgacatgagtggcctttgttttgaaattttaatgctacacagatgctgtaaaaggattttttcaggccgggcgcggtggctcacgcctgtaatcccagcactttgggaggccgaagcgggtggatcacgaggttaggagatcgagaccatcctggccaacatggtgaaacctcatctctactaaaaatacaaaaattagccgggcgtggtggtgtgcgcctgtagtctcagctactcaggaggctgaggcaggagaattgcttgaacccgggaggtggaggttgcagtagagccgagatcgcgccactgcaactccagcctgggccacagagcaagactccatctcaaaaaaagggtttttcaaaaaatcatgtacaattagaaaattgtgtctcttaaatctatttgcttatgttattaatcccagattatgactgttctttcccctaaggcattagcctgttgaaagaaacagacctataggacttttgttgatgttaaagccagaccagaaatttagaaaatcaggatatttgccattttgataagaaaaccatttaatagttgaatataggaatttgcattttgagagtgtgtactaatttagattctccaggaatagaaccatcatctgaaaataaataagtttaaccagacggacaaggagtgatatgtagttttaggtggtaagactgtgatattgttaggttacatgtatctagggcaagatgctcaaatacaataagtatatacagactaggaactctagttgtctttttttaattaatgaaaagagggttttatgcttcatttctaaacattctcaaaggaatttatgttttgttgatgatctttttttatttatataaatttacgggggtacttgtgcactttttttttaaacatggatagattacagagccgtcaagtcaagcctttagagtttccatcacccaaataacacacattgtattcattaagtaatttctcatgatctcccacctcctgctctctcacctttccaagtctgttatctatcattccatgctctacgtccatgtgtacacatttttcagcatccacatgtgaatgagaacatgtgttattcccaccaacagtgtatgagtgttcccttttctctgcaacctcaccaacttgtgttattttttgtctttttagtaatagtcattctaactggggctggatgatacctcattgtgggtatttttaaaataaaaaaaaatttgtgtgtacataggtatatttatttatggggtacatgagataatattgatacagacatacaatgttcaataactacatcagggttgtatccatcaccaagcatttatcctttcttggtgttagaaacaatctagtttctaatctctaatagtttctaatctctagtagttatattaaaatgcataatgaattattattgactgtagtcaccccattgtgctatcaaatgctaggtcttattcattctatctaactatatttttatacatattagccatccccactgtgccaccatccccattagtgccctggcccccactacccgtcctagcctctggtaaccatcattctactctctatctctatgagttcaattgttttgatttttagataccacaaataagtgagaacatgtgaagtttgtttttctatgtctagattatttcacttaatataatgacctacagttccatccatgttgttgcaatgacaggatctcatacttttttaagggctgaataggactccattgtgtatgtgtaacacattttctttattcgtccgtctgttgatggacactcaggttacttccaaatcttggttattgtgaatagtgctgcagtaatcatgggagtgcagataactctttgatatactgatttcctttctttggggtacatatttagcagtggaattgctggattatatggtagctctctagtttttttttttttttttttttttcatttttgagacagggtctcactctgttgcccaggctggaatgcagtggcggaggttcacttcagcctcaacctcgcaggcttaggggatccacccacttcagtcttccaagtagctgggactataggcgcataccaccatgcccagctaggtttttgttgttgttgttgttgttgttgaggcagagtctcactctgtcacccaggctggagtgcagtggtgcgatctcggctcactgcaacctctgcctcctcggttcaagccattctcctgccttagcctcccaagcagctgggattacaggcgcccaccaccatgcctggctaacccagctagtttttaattgttcgtagagatggggtttcaccatgttgtctagactggtctcgaactcctcgactcaagtgatcctcctgcgttggtgtctcaaagtgctgggattgcaggcacaaggcaccgtgcctggtcagaatttttttttaagggtttctcctttgtaaatttcttattcatatcttgaattgattttctgagtttcttgtattggttttcagacttttcttgcatctcagtgacccttaaaatcaatattttgaatattttatctgggattttgtggatttcattttggttaagatctgttgctgcagaatcgtgttcctttgacagtgtcatattaccttggtttctgatgtttcctttgtcttttcattgatttctgtgcatgtgctgtaacagtcacttcttatctttgaatttactttcatggtgaggggagatttcttcctgaagatgtgactataatgttggttgggccttgcttctgggtgcgtgcagtagtgaagtctctgtatgatttattttgagacagctctgttgcccaggctggagtgcagtggcacattcatagcttgcttcagcctcaaagtcctgggcataagtgatccttctgcctcagcctcctgagtacctaggactacaggcgtgtgccaccatgcctggctaattttcaattttcttttagagatgggggtctcattatattgcccaggctggtcttgaactcctggtctcaagcaatcctctctccttggcctcccaaaatgttaggattacaggcatgaaccaccgtgcccagcctctgtatgatttctttggctataaatagcattaatggtgtctgtggtttccttgatgtcttagcttgagtttatttgtggaggctgaagttgcgctggggattggaatgcctaataggcctgtctttaggtttcaatggtagtgatggtgggctaagcatgtctatccatgtgccctggggcagtgtgtgctggtaactgtgttggcagttccaggcaggctgattcttgggcttctgagtgactttctcagatgcctgttgtaatggtgtaccaggtgggtgagctggctcttgagctcctgggcaactggcatggcatagtttatggtggtagtagttttgttgagatactcttgtgggtcccaagcactttgcatttgtgttagcagtggttacaatgagatccaggccagtaaggtggtacttgcaggcatgaggcagctgaggcggtactggtagggtgttatccctgacctctgtcccctgggagaagtactctggtgtttcagagtgtttcaggtagtgggtttggttgtggaatcccctggtaacctggatcctgcactgtttctcagccaggtcaaagcctggtagagctggactgggaaagcttgcactcaggcccccacagtggtgtaatgtcatgataggcggggtggaatgatcttcaggctgctggcaaaatgcttgggtgagggatgagtgccactgctgagatcctgccatggggaagttgggcctggtcccaggagtgagttgtgttcctttcatgccccagtccaggcggagttccttcctcttgtccctgctgttcagtcagaactctgcagttcttgcctagtccctaaatcatcccagggtcgggtcatataagccccatccagctcaagacttaagcctccagggcaattaatcgtgctcaaatcctgggggtggtgtttgcttctagcactggtggtggctgcatcccacaccaggcagagccaccccatccccgcccctactcacactctgcctctccaaacagcagcccaagtttccctaatggctaggactggccctgttgcttccccgtactgctcacagttatgagctgagatcctgcatcgtgtcttgttacagctgcttaggtttcaaaaatggcatgggacacagaatgtgttccctccctgaaacagttctttctcacagtcttccagtcattccctaaattaattagattcagggcttaagagggtcagggtgctctactgaggactggattgtatggtagtggaccacagaaaaatactcaccctctcccatattggggaatcacttctggttccctgtgggtcccagccacacaggctctctgttttccttttgcttcctagattttggtttttgctgtcgcttttctgttgaactcctgtgttccctctgggataatatatccaaagtgtcattgtctacacaattttagctcttgtacctggatgaggcacgcttgaaattcttgcagtcatccatcttttcctgatcttgtttcttctgccccattccccaggttcctccagggtctcacagttcccctgtatgtgggaaaggcagttttctttctgcccaatcctgcttctcctttgtccacccagatgaggtttccgctagaattgctacttaaagtggttctgtggaacattttgtagcagagaaaatcagggctgagggagcaccataaaggttagaaaagattagaacattaggttagaaaatctgaactactctacctgtcttgattaggaggattagagttgatgttggatgggtttgttggtttattttccacttatctatcagaatgaagaacttactgccttttcttcttagttggtctaatatttatcactttaattatttttaagtgtacaattcagtggcattaaatatatttataatgtatcatgatcattactacctatgcccaaaactttttcatcatccccaacaaaactctatatccaaaaaaaaataaaaccctctatatgtacatggaacaattaagttgggcccctatcttgcaccatataaaacagttaaatgcatcaaagatcttaacgttaacagctaaaattataaaactcttagcagaaaacatttgggctgattttcatgacctgggatttggcaatgatttcataaacataatgtagaaagcacaggcagcaaaagaataagtaagttggacttcattaaaaatttaaaaatttttttacatcagaggtcactatcggctggatgtggtggctcacacctgtaatcccagcactttgagaggctgaggcgggtggatcacttgaggtcaggagttcgagaccagcctgaccaacatggtgaaaccctgtctctactaaaaatacaaaaattagctgggcatggtggcgcgcacctgtagtcccagctacttgagaggctgtggcaggagaatcacttgagcatgggaggtggaggttgtagtgagctgagatcgtgccactgcactagaacctgggcgagagcgcaagactccatctcaaaacaaacaaacaaacaaaatgaagcaatcccccccccaaaaaaaaggtcactatcaagagaataaaaagaaagacaactcagaatgggagaaaatatttgcaaatcatatgactgatgagggtttaatatccagaatgtgtaaagaacttttactgagcagcgaaaagaaaacccaatgaagaaatgaacaaaggccttcaagaaatgaacaaaggccttcaatagccatgactttacttttttaaatttaaatttaaattttttgagacaaagtcttactctcttgcttgggctggagtgcagtggtgtgactgtggctcactgcagccttgatctcccagactcaagtgattctcctacctcagtctctggagtagctaggatgacagactcacactaccacatgtgactttgtgtgtgtgtgtgtgtgtgtgtgtgtagagacagggtctcactatgttgctcaggctggtcttgacctcctgggctcaagtgagcctctcacttttatttttatttgtagtagagatgagatcttgctaatgttccccaagctggtctcgaactcctgagctcaagcaatcctaccttcctcggcctcccaaagggctgggattataggcgtgattcactgtgcctggcctagtttctttgttttaatttttttcctccccatttgtcttttgagtttccctgagaatctgtcttgctgctgtctcagttgtcattcactgttattacactggaaccctattgatgtagtggtaaggaattagggaggggaagtgttttgtaatctcatgattaaatgtcatttcttttttttttaattggtcctgagtccctgaattgtgactctcagaagtgtttcttagcccttgccctcccacttagatgagacaggaaggctataagcctcgggggttttctaattgtctttcctcttggtagataatggtgtgagcatatttgaatatagtttctttcctctcctcctgctcaaggcacaaggaaattttcctcaaatatttgcagtgaaaacatactaaaacccttgtaggattcctggaggtaaaacctaggaaagtgtaggggcccctctaagactgggatgtcaggatttttaaactctcaaactaatccatatttggcctccagaagttgtcagtttctacttgagtgtttctgttctaggaaagctgtgatattctgtatctgtctttctagttttttttggtggtggtttgccttgtgacctcagtttttggattgatctaagataaattactgattttcagttttctcagcgttttttcttgtcaggatagaagtgaggacctccaaaatccttacatattatagctgcctggtgagttttgtttgtttctttttttaaaaattttttttttttttttttttttttgggatggagttttgcgcttcttccccaggctggagtgcagtggcgcaatctcggctcactaaaacctctgcctcccaggttcaagcaattctcctgcctcagcctcccaagtagctgaaattacaggtgcccgccactatatctggctaattttttttatatttttgatagagatggggtttcgtcatgttggccaggctggtcttgaaatcctgacctcaggtgatctacccacctcggcctcccaaagtgctgggattacaagtatgagccaccttgcctggcccgttttttcttacttttagtaaaaataacctcacgtaaactgtcataggtgtctgtgggcttatttttgatgttctcctttgttggaaattcttgtgaaataccttccaggtcttagtctttgtgaggatcaggttctgctttcaattggatgttttaagaattagttttaaaataatttgtttttcttattattagcaccctatgtttagttgctgtacttatttggatagtgtggtaagcacagtggcttaggcatgagaaatataactagagatctcataattttatgtgtttataaagtgttttatttaaaaattaaataattgcaaatgagtggataaagaaactgatatatatatatctgattatatatatatatatctgattatgtatatatatctgattatatatatatgatggaatactacccggctataagaatgaatgaattaatggcatttgcagtaacctggatgggattggagactattattctaagtgaagtaactcaggaatggaaaaccaaacatcgttatgttctcgctcataagtaggagctaagctataaggatgcaaaggcataagaatgacacagtggcttttggggactcagagggaaagggtaggaaggagatgagggataaaagactacaaattgggttcatgtgtactgcttgggagatgggtgcaacaaaatctcagaaattaccactaaagaatttactcgtgtaaccaaataccacgtattccccagaagcctgtggaaataaaaaattaaaaaaattgcaaatgtaaataagacagtaacaaagatggcaaagaacaaagatgaaaaagtatgctgtattacctgaaagtgcttttatggatatcttagcttatccttcgtccatttaaatattgttagttttagccgggaacatgcctgtaatcccagcaccttgggaagctgaggcgggcagaccacttgagaccaggagtttgagaccagccaggccaacatggtgaaacccgtctctactgaaaatataaaaattagccgggcgttggggcgcatacctgtaatcccagctatttaggaggctgaggcaggacaatcacttgaacctgggaggcggaggttgcagtgagacgagattgtgccactgaactccagcatgggtgacagagtaagaccctgtctccaaaaaaaaaaaaaaaaaaaaaagacacaaaagagaaacaaaaaaaacatattgttagttttgatgattatctactagggtaagtacttttctactcattaaattccattagtgactgtgccttgatttccctgaaaggatgcagtatagagtaggcttttgattggagatagacttcctgattttccacttagtatttaggagtgaaaattattattattattatttattgttttttttttttttggagacagggtgtcactgtatcgcctaggctggagtgcagtggcttgatcctgactcactgtagccttgacttcctagggtcaagcaatcttcccacctcagcctcctgagtagctgggactacaggcacgtgccaccacagccggctaatttaaaaaaattctgtagagatgggatctcactatgttgttcaggcttgtctcaaactcttgggctcaaatcatcttcccacctcagcctccctaagtgctgggattataggtgtgagccactgcacccagccggaagtgcaaattatttaactcctttattttattcagcaaataaatgtctttctgagcctcagtttcctgtaataaggttcttataagttttaaatgaggtcagtgtgcattaaatgtacatgttagaatttggtaaggttagtaagaaaaccaaagacatgtggaccctttacaaaaaattccagcatttaccctaagagatgctttttaagtggttgaaatttggtggcatggaggaaatgtatatgggctcgtatcacatttgggagtaaaattaaggcatgaaatttaaacaaaaaataaaattgtgggtacatagtaggtgtatatatttatgggatttatgagattctgagacaggcatgaaatgtgtactaatcacatcatgtaaaatgggctgtccatcccctcaagcatgtatcctttgagttgaaaaacaatccaattttattctttcaggtattaaaaaatgtacaattaatttaatacagtaaataatacattaatttgatctcaaactcctgacctcaaatgattaattagattaattaatgtattatctattatttattatatacaccctgttgtgccatcaaatactaggccccccccccccttttttttttttggagacagagtcttgccctgtcgcctaagctggagtgcaatggtgcgatcttggctcactgtaacctccgcctcctgggttcaaatgattctgctgcctcagcctcccgagtagctgggattacaggcgcccaccaccaagcccagctaatttttgtatttttagtagagacggggtttcaccatgttggccaggctgctatcgaactcctgaccgcgtggttcgcccgccgcggcctcctaaagtgctgggagtacaggtgtgagccactgcgcctggccaaatactaggtcttattcatgctttccaactgtttttttttttgtacccattaaacgtcaccacatcttgccccccctcgcacttctcttttctttctactctgtgtctccatgagtttgttttgatttttagattccacaaataagtgagaatatgcaatgttggtctttctgtgcctggcttatttcacttagcataataacctctagttccatccatgttgttgcaaatgacgggatctcattcttttttatggctgaatagtagtccattttgtgtaactaccacattttctttatccattcatctcttttgatggatacttaggttgcatccaaacctggctattgggaacagtgctgtaataaacatgggaatgcaggtatccctttgatatgctgatttgctttatttctggtgtatacccaagcagctggattgctggatcatatggtagctcaatttttagttttataaggaacctccaaactgttcttcgtagtggttgtcctatttcacgttgttgccaactgtgtatgaggattttcttttctttacatcattgccaacatttgttattgcctgtcttttggatataagccatttcaactcaggcaagatggtatctcatggtagctttgatttgcatttctctgatgatcagtgatgtagaatgctttttcatatgcctatttgcaatttgtatgtcttcttttgagaaatgtgtatccacattttttgcccatttttgattggattattagatttttattctgtagagttgtttgagctacttacatattctggttattaatcgcttgttagatggatagtttgcaaatactttctcccattctttgggttgtttgttcactttgttgattgtttcttttgttatgcaaaagctttttaacttgatgtgatcccatttgtcaagttttgtttggttacctgtgcttgtggggtattgttcaagaaaattttgcccagactaatggcctagagagtttccccaatgttttcttgtagaggattcataaattgaagttttagataaaattctttaatccattttgattttatttatgtatagagcaagagataggagtctagtttctttttctttttttttttttgaggtggagtttcggctcttgttgcccatactggagtgcaatggcacggtctcagctcactgcaacctccgtctcccaggttcaagcgattctcctgcctcagcctcccgagtagctgggattacaagagcccaccaccatgcccgtctgatttttgtatttatttatttttatttatttatttatttatttatttagttttttgagacggagtcttgctctgtcacccaggctggagtgcagtggcacgatctcggctcactgcaagctccgcctcccgggttcacgccattctccagcctcagcctcccgagtagctgggattacaagagcccaccaccatgcccgtctgatttttgtatttatttttatttatttatttatttatttatttatttatttatttagttttttgagacggagtcttgctctgtcacccaggctggagtgcagtggcacgatctcggctcactgcaagctccgcctcccgggttcacgccattctccagcctcagcctcccgagtagctgggactacaggcgtccgtcactgtgccggctaattttttgtatttttattagagacggggtttcaccgtagccagaatggtctcgatctcctgacctcgtgatccgcctgccttggcctcccaaagtgctgggattacaggcgtgagtcattgcgccaggctaatttttgtatttttaatagagaccggatttcaccatgttggccaggctggccttgaactcctgacctcaggtggtctggccgtctcggcctcccaaactgctgagattacaggtatgagccactgcacccggcctggagtctagtttcattcttctgtatatggatatccagttttcccggcaccatttatttatttatttttatttattttatttttttttgagacagagtctcattccatcacccaggctggagtgcagtggtgtgatgtgggctcactgcaacctctgcctcccggattcaagcagttctcctgcctcagcctcccgagtagctgggattacaagctaatttttatattttgagtagagatggggtttcaccatgttggccaggctgatctcgaactcttgacctcaaatgatccacctgcctcggccccccaaattactgggattacaggcgtgagccaccgtgccgggccagcaccatttatttttattttattttacttatttttttgagagtgagtctccctatgttgcccaggctggagtgcagtggtgctatctcatctcactgcatgcagcctctgcctcctgcgttcaagcgattctcctgcctcagcctcccaagtagctgggattacaggcacccaccatgatgcccagctaatttttgtatttttagtagagacggggtttcaccatgttggccaggctggtctcaaactcctgacctcaggtgatccttccgccttggcctcccaaagtgctgggattacaggcatgagccaccatgcccagcctggagtctagtttcattcttccgtatatggatatccagttttcccggcaccgtttacttatttatatttatttattttattttttttgagacagagtctcatttcatcacccaggctggcgtgcagtggtgtgatctaggctcactgcaacctcttcctcctgggttcaagcaattctcctgcctcagcctcctgagtagctgggatgacaggtgtgtactaccaccatgcccaactaatttttgtatgtatgtatgtatgtatgtatgtatgtatgtatgtatgtatgtatgtatttgagacagaatcttgctcttttgtcgaggctggagtgcactggcacgatctcggctcactgcaacctccgcctcccaggttcaagcgattctcctgcctcagcctcctgaggagctgggattacaggtgcatgccaccacgcctggctaatttttttttcgtatttttagtagagatggagtttcaccatgttgcccaggctggtctcgaactcctgaccttgtgatctgctcacctcagcttcccaaagtgttgggattacaggtgtgagccagcgtgcctggccccagcaccttttattttatttattttatttatttttctgagagtgagtctcactgtgttgcccaggctggagtgcagtggtgctatctcccctcactgcaacctctgcctcctgggttcaagtgattcttctgcctcagccttccaagtagctgggattacaggtgcctgccaccatggctggctaattttttttttttttttttttttttttttagcatagatggggtttcaccctgttggccaggctggtctcaaactcctgacctcaagtgatccgtctgctttagccttccaaagttctgggattacagatgtgagccactgtgcctggccccagcatcatgtattgagcctttttcttttccccagcatatgttctcggcacctttctagaaatagaaaatgagttcaccgtagatgtgtggatttgtttctgagttctgtattctgtccattggtttatgtgtctgcttttatgccagaatcatgctgttttggttactataactctgtggtataatttgaagtctgataatgtgattcttccagttttgttctttctgcttagtatagttttgggaattctggaacttttgtagttccgtgtaagttttaggattgttttttctatttctgtgaagagtgtcattggtattttgatagggattgcattgaatctatagattgctttggatagtatggacagtttaacaatattgattcttccagtccatgaacatgaaatatctttacattttttggtgtcctcttcaatttcattcagtttgcttttcagattggtcactgtcgatgtttagaaatgctgctgatttttgtatattgattttttatactgacagtttactgaatttgtttatccgttctaatagtttttttgtagagtctgtaggtttttctaaatataagatcatatcatctgcaaataagggtaatttgacttcttcctttcccttatttctttctcttgtctggttgctgtagctaggacttccagtagtaccatgttgagtaactgctggaagtgggcattcttgtcgtgatctggatcttagaggaaaggcgttcagtttttcccctcagtttgataccagttgtgggtgtgttgtatatggcttttattatgttgaggtatgttcctcctaaacccatttttttgagggtttttatcatgaaggaatgttgaatattatcaaatagtttttaagcatcaattgatataatatggtttttgttcttcattctgttgatatgatgtatcacattgatttgcatatattgatcccctcttgcatccaagggataaactccacctggttacgatgaatgatctttttaatgtgtctgatttgctagtattttgttgaggatgtttgcagcaatatttatcagagatattggcctgtcattttctttttttgatgtgtttttgtcaggttttggtaacagggtaatactggcctcacagaatgtgtttggaagtattgcttccttttattttttggaatagtttgagtaggaatagtattgatgcaggaattttctcggcccctttgttggacttgtgacaggggcgaatgtttactcagcctgccgtgctcaaccccttgttggagggtgcatgtgagtgagtgagtgcgggacctggccagctggtgggggcactgacacagcagcaagccctgtgcagggaccacggccagaccaggcacaagcgagtgagtgtgggacccagctgttctgagcaccagcaggagcaggcctgtgcacagcacccaggttgatggggaggggggtggtgtctgtgaccccgaggcccctgagggggtgttaacagtgctcctttagttctgctgtctgctgatggctgtgtgttaacaagttggcctcttgccttgtcatgtggggtggctgccctccactggtgagggcaaagggctggtgtgacagtcttttttgggtacctgcactcagtgggtcctgagctcttgtctggcatccaagaagaatgaggttgagtggacacttgaaggatggtgaaggtgaagaattttattgagcagtgggaatggctcagtggagaggggagctggagaggggatgggaagggctgatctccctgaagtccggccgtttcttccctaagtcatgctgtctcctttcccaaagtttggccatcttctctccgaaattaagctgtttctctcctctctaccaactgaatctggggtctttataagcataggatcctctttataagcacaggatgggggcggggcaggctgtagaagttttggaaaaggcaacattctattggtaaagagacattattcaaacagaaccaatcgggagagagcggacaaacaggaatagaagttttcactttgggctgtgggtttcaggctttttggcttgaacgtggggtttcaccagggactgcccttgtcttcctagaatttctctgcctcctgcctctatcagtattagatcttctttaaatgtttggtagaattcagcagtgaagccatcaggtcccaggcttttatttactgggagaatttttattatggtgtcaatctcgttatttgttatagctgtgttcaggttgcagatttgttcatggttcaatcttggtagattgtgtctaggaatttgtccatttcttctaggttttccagttcattagcatatagtttttcatagtagccatgaatgaacctttttatttctgcagtattggttatcattgtaatgtctccattctcatctctggtttatatatttggatcttcttttttttttctttttttttttttactctggccaaaggtttttaaattttcttttaacttttacaaaaaccaacattttgttttattgatattttgtattattttctttatttcagtttcgtttgcttcactctgatctttattatttcttctaattttggggttggtttactcttgcttttcttattctttaagatgtgttgttaggttgtttatttgaagtatttcttcttttttcatgtaggcactcacagctataaacttcccttttagtaatgcttttgctgtatcccataggttttggtatgttgtgtttcagtatcatttgtttcaatgaattttccaattttcttcttaatttttgcattgacttactgatcattcaagaacatattgtttaatttacatgtatttgtatacttttcaaaatttctcattattgatttctagttttattccgttatcagaggagatgcttgatattatttcaatatttttaatgtcttaagacttgttttgttacttaacatatgttctatccttgagaataatccatgggctgaggagaagaatgtgtattctgcagcccttggatgaatttttctgtaaatatctattaggtccatttggcctctaatgcacattaagtctgatgcttcattgttggttttctttggaaggtctgtccaatgctgaaagtgggatattgaagtctccaagttttatcatattggggcctgtctctcccttttgctctaataatacttgctttatatatgtgagtgctccagtgttgggtgcatttatgtttaaaatggttacatcctcttgctgaattgactgctttatcattatatagtgaccctctttggcttttcctatagtttttgtcttgaaatctattttgtcttatattagtatagccacttctgcacttttttggtttccattggctttggaaaagatttctcgtaattctgtttgataaggacacatgttaggaggttttcaacacttcagtgagtagtaaacttgtaagtaaagcaggtatgaacagaatctcttgaattagtgaaaagtcaaaatcgttaattactgtttaatttaaaactgaaattataggtattaacaaataactatatgccttatactgtactttatttatttatttttccgagacggtcttgctctgttgcccaggctggagtgcggtgacgtgatcttggctcactgcagcctctgcctcccgggttcaagcaattttcatgcctcagcctaccgagtagctgggactacaggcatgcactggcacacccagctaagttttttgtatttttagtagagatgggatttcaccatgttgcccaggctggtctccaattcctgacctcaagtgatccacccaccttggcctcccaaagtgctgggattacaggcatgagccatcatgcccggccatataatgtactttaaacatgatgattttgaaactggaaacacacgcacatgtgagtaatttcttaaatggaattgaattaccttgaagaatcttagaaaaatgatgtttttaattttaaattagttttgcgtcatacatgtctttatttctcaaattttaaagaaaagtctatgaattaaagaaaataaaacttttcctgcatgaaagcaatgagtgtattatgtaccaaaaaggtagaagaaaaatatcttctgtaatattagctagatattacttactaaagatatttttggggtatatttattagcaatattttaatgcaattttaaacataattgtcatcatacttcatagacagtttatagcctgctatttttggttagcattgtagtatgagctattttccatattatttgaacttttaaaatttaatggttggtatgatattgtatgacttgtatgcatccttgtttacctagtctttattatacactttaattgattacagttttttttttttttttttgcttttgtgagcatctggcagataactttcttgagtaaagttattatgtagaaatattttctttgggccaggtgcggtggctcatgcctataatcccagcactttgggaggctgaggcaggtggaacatgaagtcaggagttcaagaccagcctggccaatatggtgaaaccccgtctatactaaaaatacaaaaatcagctgggcatggtggtgcatgcctgtagtcccaggtactcaggaggttgaggcaggagaattgcttgaacccgggaggtggagaggttgcagtgagccgagatcgaaccactgcactccagcctgggcgacagagcaagactccaactcaaaaaaaaaaaaagaaaagaaaagaaaagaaatactttcttactttctttgtatagataaagggagatagaattactagatcaaagtctcttgatggtttttgccaatttgttttgtaaatgtatgtatcaccacaggctatctatgagagtgtctatttcatggaaacttagcctacaatgaatagtcattttacccctaaatatttgataagttaaaaaatgctatcacatttaacatttcataggctttaagaagttgcagttttatattcatttcttcatgcattttgtgtactatttcaaaagtttctataggggaatgagagcaaagtaatgtgtttttcattatttattttgctaaccaaacatatttaattactaaccaaaaggatgatcctaattaagccaacacttggaattattttcatgtaaaatgtctgtgatagagataattgaatttaataatgaaaaaagtattacagaaatttgctcattaaactgagcttgttttcagctaatccttctgcgaagtgataatgactttttttttttttttttaaataaagatgggggctcgctatgttgaccaggctggtcttgaactcctggcctcaagtgatcctcccatctccgcctctcaaattgctaggaatacaggcatgagccaccacacttggtttaatagtggaatttttattacacttttttatggattcgaggagaggtggcattgtacataacacattctaccgctaattttccatctttcacttttctcattgtgctttccttcccattccgttcctggtgttgaaccaatgcatcatttgtaaatttgtagacagtctgagtttttctgccataatctgttgtttcttcagacttcttctctggtttataagaaaactgttgttttaaaactctcagttttgtattttttatttcttattatactttaagttctgggatatgtgagcagaacgtgcaagttttttacataagtatacatgtgccatggtggtttgctgcacccatcaacctatcatctccattgggtatttcttctaatgctatccctccccttgcccccaaccccccaacaggccccagtgtgatgttcccctccttgtgcccatatgttctcattgttcaactcccacttatgagtgagaacatgcagtgtttggttttctgttcctgtgttagtttgctgagagtgatggtttccagcttcatccatgtccctgcaaaatatatgaactgatcctttttttatggctgcatagtattccgtggtgtataggtgccacattttctttatccagtgtaccattgataggtatttgggttggttccaagtctttgctactgtgaatagtgctgcagtaaacatatgtgtgcatgtgtctttacagtagaatgatttataatcctttgggtatatacccagtaatgggattgctgggtcaaatggtatttctaattctagatcattgtggaatcgtcacactgtcttccacaatggttgaacgaatttatcctcccaccaacagtgtaaaagtgttcctatttctccacatcctctccagcatctgttgtttcctgacttcttaatgatcggcattctaattggcatgagatggtatctcattgtggttttgatttgcatttctctaatgaccagtgatgctgagctgtttttcatgtttgttggccatgtaaatgtcttctttggagaagtgtctattcatatcctatgcccactttttgatagggttatttgtttttttcttataaatttaagttctttgtagattctggatattagccctttgtcagatggataaaaaaacactatttttttaaaaaattttccaattcctcatcggtaaaaaagcagtaaaacattcatggtaatgatcatggcctatagttttttttttttttaagtgacattaggatttaaaactggtatgaaacctaatcatttattttagttagctaatatcaggatttagatttatttttttgacccaattgcagataggcagatcagatctcatagactgccatctgcctcaagctccttttgtagttatgtgaatgtgagcctgaaggctgaacccacttttctctaatggagatttttttttattacactttaagttctagggtacatgtgcacaacgtgcaggtttgttacatatgcatacatgtgccatgttggtgtgctgcacccattaactcgtcatttacattaggtatatctactaatgctatccctcccccctccccccaccccatgacaggccccggtgtgtgatgttccccttcctgtgtccaagtgttttcattgttgaattcccacctatgagtgagaacatgcggtgtttggttttttgtccttgcgatagtttgctgagaatgatggtttccagcttcatccatgtccctatataggacatgaactcatccttttttatggctgcatagtattccatggtgtgtatgtgccacattttcttaatccagtctgtcattgatggacatttgggttggttccaggtctttgctattgtgaatagtgctgcaataaacatacatgtgtgtgagtctttatagcagcatgattgataatcctttgggtatatacccagtaatggggtggctgggtcaaatggtatttctagttctagatccttgaggagtcaccacactgtcttccacaatggttgaactagtttacagtcccaccaacaatgtaaaagtgttcctatttctccacatcctctccagcatgtgttgtttcctgactttttaatgatcgccattctaactggcatgagatggtatctcattgtggttttgatttgcatttgtctgatgaccagtgatgatgagcatttttacatgtgtctttggctgcataaatgtcttcttttgagaagtgtctgttcatatcctttgcctactttttgatggggttgtttgatttttttcttgtaaatttgtttaagttctttgtagattctggatattagccctttgtcagatgagtagattgcaaaaattttctcccattctgtagtttgcctgttcactctgatggtagtttcttttgctgtgcagaagctcttgagtttaattagatcccatttgtcaattttggcttttgttgccattgcttttggtgttttagacatgaagtccttgcccatgcctatgtcctgaatggtattgcctaggttttcttctagggtttttatggttttaggtctgacgcttaagtctttaatccatcttgaattaatttttgtgtaaggtgtaaggaagggatccagtttcagctttctccatatggctagccagttttcccagcaccatttgttaaatagggaattctttccccattttttgtttttgtcaggtttgtcaaagatcaggtggttgtagatgtgtggtattatttctgagggctctgttttgttccattgttctatatctctgttttggtaccagtaccatgctgttttggttactgtagccttgtagtatagtttgaagtcaggtagcgtgatgcctccagctttgttctttttgcttaggattgttgtggcaatgcggtttaaccactctgaaaagatgtatttaaggacttttatctagactctatggtgaggtataacatagtgctggttgagtcagcttcaagtttttgtagagggaggaagagagtaacaaccatgtctggatttaataaaaagtttagcataagtaaatgtgtgctcttttgccttaagaaaatatttttcaatatataaaaaggattaatgagtgctgcctttcagatacttggtttggtgtgtttgaaacatcatttccaaagataggacatacacatttccagggatcatctctatgatatgactctagaaatgatgtagatttttaaaatcaatgtcagaacttatagacacaaatgtatgctttccttctaagtagtcactttgggagcccatatacataacagtggtgtcattcctgatgatatgttgggaactctcattttgtaaccagtttagaagtcatgcaagtaaataaatcttcaggattacttcagatttgggcaaaaaattagttttacccaacttgatcattttgcatttttcaccatatttgactctaagtgaaaactggctatttccaaaaatcatacccatcctgaggatgtgaagatatttttgggctgggcacggtagctcactcctgtaatcccagcagtttgggaggctgaggcagtagggttgtttgaggccagaatttgaagaccagcttggtcaacatagtgagactccctctctccaaaggaaaaaaaaaagtgaagttttttttttctttttcaaatgagtaggcagcattgtttagttatctgtttttttttcttttttttccactgttggacttctgtccattctctttatttgtttatttatttatttgagatggagttttgctctgttgtctaggccggagtgcagtggcgcgatcttggctcactgcagtctctccctcccggctcaagtgattctcctgcctcagcctcccaagtagctgggattacaggcatgcaccaccaggcccggctaattttgtgtttctaggggagacggggtttcaccatgttggccaggctggtctggaactcctgacctcaagtgatctgcctgtctagctcccaaagtgccggggttacaggtgtgagctaccgtgcctggcctgctgatcatactctcttgattttatttttgtactgtggtactgcggttgatggactgcactgatgttatccatatttttaaccttggtcacccacagtgtgaactcattaaatagctgactttgcaatttgattgctatgatttgggaatgagtgtggcagtcataattgtgcaggtttgctatcgtttcatttctagagaacttttctatggtgatctattgatgagataagatatagtatgacattatttattcctctttttgacttttggttctcaggaattttgggtgctgtgagttgacatgtagcatcatttcctcaggtctcattttctatctgagcacgattaaggacacagtgacctgatgataaatttttttgtacatctgactcttatctgaaagaatggttattggccaaatatggaaaccatacccacttggtacctttattctagaggcaaagtttgtttcaaaattttgtaaaacaaccctctccaccaaaagaaaacaaatacccacacaagatctctagttacggtgtctgttatatctcatttcttttccttccctaaatatactgagctattcttaactaaatacaggaaaattgtgcagaggaacacttactaagtgttcagtaaatgttttcatttttcttatgtgtatatctagaagtagaattgttgggtcattgagtaactgtttctgcgtaaatatctatacacgtgccatggtggtttgctgcacccatcaacccgtcatctacattacgtatttctcctaatgctatccctcccccaacccctaacaggccccagtgtgtgatgttcccctccctgtgtccatgtgttctcattgttcaactcccacttatgagtgagaacatgcagtatttggttttctgttcttgtgttagtttgctgagaatgatggtttccagctccatccatgtccctgcaaaggacataaacgcatccttttttatggctgcatagtattccatggggtatatgtgccacattttctttatccagtctatcactgatgggcatttgggttagttccaagtctttgctattgtgaatagtgctgcagtaaacatgtgtgcatgtgtctttatagtagaatgatttataatcctttgggtatatacccagtaatgggatggctgggtcaaatggtatttctagttctagatccttgaggaatcgccacactgtctgccacgatggttgaactaatttaccctcccatcaacagtgtaaaattgttcctatttctccacatcctctccagcatgtgttgttccctgactttttaatgttcgccattctaaccggcgtgaggtggtatctcattgtggtttttatttgcatttctctaatgaccagtgatgatgagttttttttcatatgtttgttggccacataaatgtcttcttttgagaaatgtctgttcatatcctttgcccactttttgttagggttgtttgcttttttcttgtaaatttgtttaagttctttgtagattctggatattagccctttgtcagatggatagatcacaaaaaagttctcccattctgtaggttgcctgttcactctgatgagatatatatatatattttttttttgctgtgcagaaggtctttagtttagttagatcccatttgtcaattttggcttttgttgtcattgcttttggtgttttagtcatgaagtctttgcccatgcctatgtcctgaatggtggtttgcctaggttttcttctagggtttttatggttttaggtcttatgtttaagtctttaatccatcttgagttaatttttatataatgtgtaaggaaggagtccagcttcagttttctgcatatggctagccagttttccaaacaccatttattaaatagggagtcctttctccattgcttgtttttgtcaggtttgtcaaagatcagatggttgtagatatgtggtgttatttctgaggcctcggttctgttccattgttctatatctctgttttggtaccagtaccatgctgttttggttactgtagccttgtagtatagtttgaagtcaggtagcatgatgcctccagctttgttctgtttgcttaggattgtcgtggccctgtggggtattttttggttccatatgaaatttaaagtagcttttttttccaattctgtgaagaaagtcagtggtagcttgatggggatagcattgaatgtatacattactttgggcagtatggccattttcatgatattgattcttcctatccatgagcatggaatgtttttccatttatttgagtcctctcttatttccttgagcagtggtttgtagttctccttgaagaggtccttcacatcccttgtaagttgtattcctaggtattttattgtctttgtagcagttgttaataggaattcactcatgatttggctctctatctgttattgttgtataagaatgcttgtgatttttgcacattgattttgtatcctgagacttcgctgaagttgcttgtcagcttaaggagattttgggctgagatggtggggttttctaaatatgcaatcatttcatctgcagacagagaatttgacttcctcttttccggattgaataccctttatttctttctgttgcctaaatgccctggccagaacttacaatactgtgttgaataggagtggtgagagtgggcatccttgtcttgtaccgggtttcaaagggaatgcttccagtttttgcccattcagtatgatgttggctgtggttttgtcataaatagctcttattattttgagatacgtttcatcggtacccagtttattgagagtttttagcgtgaaggagtgttgaattttattgaagtccttttctgcatctattgagataatcatgtggtttttgtcattggttctgtttatgtgatggattatgtttattgatttgcgtatgttgaaccagctgtgtatcacagggatgaagccgacttgatcgtggtggataagctttttgatgtgctgctggattcggcttgccagtattttattgaggatttttgcatcgatgttcatcagggatattggcctgaaattttctttatttgttgtgtctctgccaggttttggtatcaggatgatgctggcctcataaaatgagttagggaggattccctcgttttctattttttggaatagtttcagaaggaatggtaccagctcctctttgtacctctggtagaattcagctttgaatctgtctggtcctggacttattttgatcggtaggctattagttactgcctcaacttcagaactttttattggtttattcagggattcgacttcttccttgtttagtcttcggagggtgtatgtgtccaggcatttatccatttcctctagattttctagtttgtttgcatagaggtgcttatagtattctctgatggtagtttgtatttttgtgggatcagtggtgatatcccctttatcattttttattgcatctatttgattcttctctcttttgttctttattagtccggatagtggtctgttttgttgatcttctcaaaaaaacacctcctgaattcactgatagtttgaagggtttttcctgtctctatctctttgagttcttctctgatcttagttatttcttgtcttctcctagcttttgaagttgtttgctcttccttctctagttgttttaattatgatgttagggtgttgactttagatatttcctgctttctcttgtgggcatttagtgctataaatttccctgtacacactgctttaaatttgtcccagaaattctggtatgttgtctctttgttctcattggtttcaaagaacttctttatttctgccttaatttctttgtttacctagtagtcattcaggggcaggttgttcagtttccatgtagttgtgcggttttgaatgagtttcttaatcctgagttctaatttgattgcattatagtctgagagactgttatgatttccgttctttttcatttgcttaggagtgttttacttctaattatatggtcagttttagaataagcacgatgaggtgctgagaagaatgtatattctgttgctttggggtcaagagttctgtagatgtctgttaggtctgcttggtccagagctgagttcaagtgttgtatatccttgttaattttccgtcttgtcggtctgtctaatattgacagtgggttattaaaatctcccactattattgtgtgagagtctaagtctctttgtaggtctctaagaacttgctttatgttctgggtgctcccgtattgggtacatatatatttaggatagttagctcttctcgttgctttgatccctttaccattatgtaacacccttctttgtctgttttgatctttgttggtttaaagtctgttttatcagagactaggattgcagcccctggttttttttgctttccatttgcttggtaaatgtttctccatccctttattttgaacctatgtatgtctttaatttgtttttaaaattattatatccatcctacttagtataaattggtttcttgttgtggttttgatttgcatttccctgatatgactaatgatcttgagcattttttcatgtgcttattggccattggtatatattcttttgagaagtgtatatctaagtcttttccccatttaaaaaatagggttgtctttttgttgtttaattgtaagaagtctttatgtattctggttaccagaccctcatgagatacaggatttgaaaatcgttttctctcattgtgtttgctgtgttttcactttcttgatggtgccctttgacatgcaaaagttttgacttttattaaaaatggggctgggcatggtggctcacacttgtcatcccagtgctttgggaggctgaggtggaggatttcttgaggccaggagtttcagaccatcctgggcaacataactggaccccatctctacaaaaaattaaagaaaaaatttagctaagagtatagttgtgtgctgcacttcctcaactaagaacataggtgtgtgccacaggtactcaagatgctgaggcgggaggattgctttagcccaagagttttgagacctcagtgagtcaaggtcacgccactgtgctcaagcctgtgtgacagagcaagaggctaactctaaggaaaaaaaatggggtaaacttatactttccttatttaaagttttaactccttaaaaccctgttgaattacagatacatctattatataacttaagagttgatgctataggctgggcacagtggctcacgcctgtaatcccagcactttgggaggccgagatgggtggatcacgaggtcaggagatagagaccatcctggctaacacggtgaaacctcgtctctgctaaaaatacaaaaaaattagccgggcgtggtggcgggcgcctgtagtcccagctacttgggaggctgaggccggagaatggtgtgaacccgggaggcagagcttgcagtgagccaagatcacgccactgcactccagcctgggtgacagagcaagactccgtcttttaaaaaaaaaaaaaaaaaaaaagagttgatgctataaaacttagttaatgaaatatttccctgggcgatggagctcttgcaagtcctgttgtattttttgttcatctttatgccagtcagttagacagttcttctatgtcaagcagaggatggaataataaaccaaaacactgcttagggctttcagagagtaagtgttcagtaaatatattcgataaattactgaattatttttttaaatgatggaaaggaaaatcttgccctctctttttctgggtgttggctagtataaatctttcttgaagtgataatctacatctatgttttgatttctaaggatttcccaaatataagctatatataagtgagaggaaataataacttaggtgcctaatgataatatgacaagataagtacaagggtcagctatttgttgtgaaatagcaatggatataatttaaatatgaatacctttttgctgtttaatcccccaaattttcttttgatttcttttaaaattcttttgtggtaggtaggtttattgtttcttaagaattaacttaagggtagtattttctgatacatttttaagtaacatgaagtttaacttctgtttaaacacatcatatagagtacattgaaagacctcagtattttcgaaatgtttagtaagtaatatcagcagtttccttaaatgatattttaatcctaggtaagtgtacaggtaggttgtgttactcatatttttatattcttagtgaaatagaattcttttttttttttttttttgagacagggtctgactgttgccttggctagagtgcagtggcatgatcttggctcactgcaacctctgcctcacaaggctcaagccatcctcccacctcagcctcctgagtagctgagaccacaggcatgagccacccatgctctattatgagccaccacacctggcctaaaattcgttttctttaatattttttctttctacacccacaactgtaacatttcccttagtttttactttgaatgtgcatactcttacacgacttacagtatggctatattttcagtttgctagagctttacaattaatttaaaacatgaaaggctaattaagggaattctttaaattttgttttaatag

SEQ ID NO: 298 - DNA, 132 bp, Homo sapiens
gttgttgtatggctcggtcagaactttctgttaccagaagacactcacattcagaatgctccatttcaagtgtgtttcacatctttacggaatggcggccacctgcatataaaaataaaacttagtggagag

SEQ ID NO: 299 - DNA, 257 bp, Homo sapiens
taaaactagaaagaaggagaactcttccctcaagaatggctgtaccttcatatctagaggcacattaaaaaaaagaacgtctgtaccttaaaaatggaggtcatttcattgtgttcattttcaaggttgttgtatggctcggtcagaactttctgttaccagaagacactcacattcagaatgctccatttcaagtgtgtttcacatctttacggaatggcggccacctgcatataaaaataaaacttagtggagag

SEQ ID NO: 300 - DNA, 1209 bp, Homo sapiens
gtgagtatctcgcttttctctttcaatgcttttacacagtagaatcctttagatgttatttcatagaaagggaaaattacattaatgtgttatattggtagcagtaaatatgatatgaaagaattctctaacttgggggtggcttgtaacctgtaataaaaatattgctaaaataccttctctcactttgaaaaagcatctgagcaatcctcagttattggtgaattcttaccagtgtttaattcctctctttccgttatggtcttagtgtggttgtcctggtgtagtatttcaagaggaacctgcagcaagatgaaaagagagtgggacttggagctaagaacgtttttggctttaagtgctacgttaactcattaaattcttagtgatcttggggaagtcccctcaccagtgtgagcctcagttttcttatctaataagtaaggataatcttacccaccttattgcgggggcccgaggattacatgattggtgtaacagtagcaccttgtacatttgaaaggactaataccagtggactttaaccttggctgggctttggaattcttggtgggactttttaatcatgtagattctcaggcccctgcctggcctgtggaaccacagactctataggtgggcccttccagaaggcctcatgggtggttctcatgtggaacctgtgttgcaagccactgcatggtgttactgctattaacattaaaacttatattttccttattgtgtggatatatctgtggtgtttgcccatgtatacttcattttacatttcttaaagaatagaatggaatggttttaagcacgctacattgtccaggttatacccacagaagagctgttgtgtaacagaatcagcatcatacctgaatcatttgtacattgcatataagactatgtctaagtagaagatgctatgaaatcatgtctgctgtggggccaggcataattatgaatgttacttaagagcataggtgaggtgagaaaagggaatgtgactagtgttttagtattttcttggtgtgggatgaagtataattcttttttttttttctcaacaaagcagtaaaactagaaagaaggagaactcttccctcaagaatggctgtaccttcatatctagaggcacattaaaaaaaagaacgtctgtaccttaaaaatggaggtcatttcattgtgttcattttcaag

SEQ ID NO: 301 - DNA, 1084 bp, Homo sapiens
gtgagtatctcgcttttctctttcaatgcttttacacagtagaatcctttagatgttatttcatagaaagggaaaattacattaatgtgttatattggtagcagtaaatatgatatgaaagaattctctaacttgggggtggcttgtaacctgtaataaaaatattgctaaaataccttctctcactttgaaaaagcatctgagcaatcctcagttattggtgaattcttaccagtgtttaattcctctctttccgttatggtcttagtgtggttgtcctggtgtagtatttcaagaggaacctgcagcaagatgaaaagagagtgggacttggagctaagaacgtttttggctttaagtgctacgttaactcattaaattcttagtgatcttggggaagtcccctcaccagtgtgagcctcagttttcttatctaataagtaaggataatcttacccaccttattgcgggggcccgaggattacatgattggtgtaacagtagcaccttgtacatttgaaaggactaataccagtggactttaaccttggctgggctttggaattcttggtgggactttttaatcatgtagattctcaggcccctgcctggcctgtggaaccacagactctataggtgggcccttccagaaggcctcatgggtggttctcatgtggaacctgtgttgcaagccactgcatggtgttactgctattaacattaaaacttatattttccttattgtgtggatatatctgtggtgtttgcccatgtatacttcattttacatttcttaaagaatagaatggaatggttttaagcacgctacattgtccaggttatacccacagaagagctgttgtgtaacagaatcagcatcatacctgaatcatttgtacattgcatataagactatgtctaagtagaagatgctatgaaatcatgtctgctgtggggccaggcataattatgaatgttacttaagagcataggtgaggtgagaaaagggaatgtgactagtgttttagtattttcttggtgtgggatgaagtataattcttttttttttttctcaacaaagcag

SEQ ID NO: 302 - DNA, 73 bp, Homo sapiens
gtctgggaaaccgccgacttccggccgcgcagcggtgggctgagctaaaatggctgaggagagagtcgcgacg

SEQ ID NO: 303 - DNA, 45 bp, Homo sapiens
gcagcggtgggctgagctaaaatggctgaggagagagtcgcgacg

SEQ ID NO: 304 - DNA, 15 bp, Homo sapiens
gagagagtcgcgacg

SEQ ID NO: 305 - DNA, 386 bp, Homo sapiens
gtctgggaaaccgccgacttccggccgcgcagcggtgggctgagctaaaatggctgaggagagagtcgcgacggtgagcgccgagattctctttagttgcccggccgcagggcaaggcaagctggcgggtggcttttgtcccatgcagcggttcctggagagaggcggagctgggtgccgagcgtctcagggtgggcggggcgacacggtcccctttttactgtcccgggaactggtcgcctggggcaagtctggatacttagcagcacaggtcctgttctaggactgtagtccctcttggggtgcgctggacggagaagggagacttttcaccagtaatggctcttaccgtagtgccatctttttctgtctcgggggtttggaag

SEQ ID NO: 306 - DNA, 358 bp, Homo sapiens
gcagcggtgggctgagctaaaatggctgaggagagagtcgcgacggtgagcgccgagattctctttagttgcccggccgcagggcaaggcaagctggcgggtggcttttgtcccatgcagcggttcctggagagaggcggagctgggtgccgagcgtctcagggtgggcggggcgacacggtcccctttttactgtcccgggaactggtcgcctggggcaagtctggatacttagcagcacaggtcctgttctaggactgtagtccctcttggggtgcgctggacggagaagggagacttttcaccagtaatggctcttaccgtagtgccatctttttctgtctcgggggtttggaag

SEQ ID NO: 307 - DNA, 328 bp, Homo sapiens
gagagagtcgcgacggtgagcgccgagattctctttagttgcccggccgcagggcaaggcaagctggcgggtggcttttgtcccatgcagcggttcctggagagaggcggagctgggtgccgagcgtctcagggtgggcggggcgacacggtcccctttttactgtcccgggaactggtcgcctggggcaagtctggatacttagcagcacaggtcctgttctaggactgtagtccctcttggggtgcgctggacggagaagggagacttttcaccagtaatggctcttaccgtagtgccatctttttctgtctcgggggtttggaag

SEQ ID NO: 308 - DNA, 8925 bp, Homo sapiens
gtgagcgccgagattctctttagttgcccggccgcagggcaaggcaagctggcgggtggcttttgtcccatgcagcggttcctggagagaggcggagctgggtgccgagcgtctcagggtgggcggggcgacacggtcccctttttactgtcccgggaactggtcgcctggggcaagtctggatacttagcagcacaggtcctgttctaggactgtagtccctcttggggtgcgctggacggagaagggagacttttcaccagtaatggctcttaccgtagtgccatctttttctgtctcgggggtttggaaggtaatgactagcacttgtgtagacagttcctgttaatcccgtgaattgggaatttaacatgcctggaagcttgcagcgtcactgccttctgccagtggagcgggactgtgttttttctgtggtgattaagtttaggaaagtacggttttggaattcatctgaaggctgagttgggcgttcactccacagaactgctaatatagaggaacccgatgaattcaggatgacctagtcgctattttttgaggcatatatctataattggatctaatttcggtaaagtgccaagtgtgaagctttgtttaccttgctttagtgttgggtttgaaagcctgttctgtccatttgttagaatgattttaggtattcggaatttattgtctttcgaaaaacgccctggaaaacagtacaaatagcagcctttggctgttttacaacttagttttggctaagcagcaaggttagtgttattgttagagggccttttgtttgttttctactctcatttgcagagtagtcatattattctagtctaattagaaaactctgaagacagaaacttttttttttgagacggagtgtcgctgttgtcggcccgggctggagtgcaatggcgcgatctcggctcactgcaacctccgcctcccaggttccagcaattctcctgcctcagcctccggattagctgagaatacaggcgcctgccaccacgcccggccgaaacatttttattaagctaagaaatttaaaatagctaggccggacgcggtgcatcacgcctgtaatcccagcactttgggaggccgagacgggtggatcacttgaggtcatgagtttgagaccatcctggccaacatggtgaaaccccgtctctactaaaaatacaaaaattagcggggcatcgtggcgctcgcctgtaatcccaggtacctggaaggctgaggcaggagaatcgcttgaaccccggaggcggaggttgcagtgagccgagatcatgccattgcactccagcatgagcgacagagacagactccttctcaaaaaaaaagaaagaaaaaacagattttaaaataattaaataggccaggctcagtggctcacgcctgtaatcctagcaccttgggaggctgaggtgggtggatcgcctgaggtcaggagttcgagaccagcctggccaacgtagtgaaaccctgtccctactaaaaaaatacaaaaaattagctggacgtggtggcgggcgctggtaatcccagctactagggaggctgaggcaggagaatcgcttagaacccaggaggcagaggttgcagtgagccgagatcgtgccatttcactgcagcctgggcatccagagcaaaactccgtctcagaaaaaaaaaaaaagtaaatagcatggttaatgttactgggttttaaatattaaaaacataggaaagaaaatacttccactccagcctgggtgacagagcaagactccgtctcaaaaaaaaaaaaaaaaaaaaaaagaaaatacttctaagtaatcttaaagtgtaaaagataatgggtaacataacattgctacaaatatagcttatcctctagtgctcatcacaagtgtttgtgtaatagaatatgaacttgagtctgtgacggcagaattgtcatgtacatttgaatgtctaatactgttttaaagagaatagcttttgtttcgatatgacttagcaattaagcctgaagttaactgttttcattgttgtcaaatttattgctagtagtgttacgtttatagtaattttcatcttttcaagttaccaatgcatggaaatgtgaatttctgtccttttaggaagtggtattttatcttttttttttttttttttttgagacggagtctcactttgtcgccctgtctggagtgcagtggcgtgatctcagctcagtggaacctctgcctcccgggttcaagtgatttttctgcctcagcctcccgagtagctggggttacaggccctcaccaccatgcctggcttatttttgtggagatggggtttcaccacgttggccaggctggtcttgaactcctgaccttgtgatctgcacgcctcggtctcccaaagtgttgggattacaggcgtgagccatggccccctgccttattttttaatacaattaaaagaacccagtaatcctactcctagacctgtgtcccacagaaaaaagtgttaaacatgagcgtgtagtactagggcattcgttgtagtactatccgtagtggcaaaacgctggaagcaaattaaatgcccattaatagggtaattgatgacttcagatatttccatactgtggaatattatgcagtcattaaaaagaatgttacaactaattgcttttcctctcagaagcccctctctctcactagagaaagctgttctcctttctttcttctgcctattaaacctccattcctaaactcagaaagaaaaaaaaaaaaagagaatgttacgactaattgacttggagggacttccatggtgtacatttaaataaaaggtagatgtgaagtggggtatattatgtgatcttaatttcataacacaaaggaaaacatatagatccgtagataaggatatatggatatggaggagagaaaaggaaaagactcaaaactcacagaatttttgaagaaatgtatagctaaaaatctaagaaggctacagtcaaggccttgaggccagaagacaccccatcaaaactgagtaaaactagcccagtgtgggacgcagaaattctagtatgctaccaaaattacttacggattgctaccagttccttagaaggaaaactgaggactaatatttgtattttcagtatagtttagaattcttaaaaaatgagcaaacaggctgtacttggtggctcatgcctgtaatgccaggacttgtggaaactgaggtgagaggataacttgagtccagaggtttgagaccagtctgggcaacatgttggagccccatttctacaaaaaacacaaaaattagccagacgtggtggcacgcgcctgtcttcccagctactggggaggatcatctgagcctgggggaagttgaggctccagtgagccatgatcatgccactggactccagcaggggcagagtgagactttgtctgaaaaaaacaaaaaatgaatgagcaactaactctggctttcatgatttgtgcttataaatctttttatttatttatttatttatttatttatttatttatttatttattttgagacggagtcttgctctgtcgcccaggctggagcgcagtggcgcgatctcggctcactgcaacctccgcctcccgggttcacgccattctccagcctgagcctccggagtagctgggactacaggcgcctgccaccacgcccagctaattttttgtatttttagtagagacggggtttcaccgtgttagccaggatggtttcaatctcctgaccttgtgatccgcccgactcagcctcccaaagtgctgggattacaggcgagccactgtacccagcctataaattttttttataatgccctgattcccattatttgatgtatttggataaatatgtcatcctgtaaattgaaggattaaactgataagagcagaaaacagaaattagtacactagttgatctggctcagatatagtgcctatgtatcaggtgctccatgaatatttgttggatgaataaatgatcataaaactatataaaaatgaagaaataacagaataaaataatttgttctatataaatcctatgaatgagattgagtgggctaatagaatcctttccatctcaaaatgttctggaaagtcttgagtaaaagactcatcaaaaaaataattctgctttgtgcagaaagaagggttgctgacctttgaaggtgctttttgagtctttaacattctttagtagtatattccccaaagttaagaaattctagttagattttaaaaaattgagttaacatttaaaaaacagttttgttgaggtataatacacgtaccataaaatttactcaatttaagtacaaagtttgatcagttttagtaaatttatatagttgcacagctgtcatcagaggctgcttttaaaacatgtccatcactccagaagggttcctgtgtcaatggaattgctgggttatattgtttaagtatttgtttaaaaaaacagaaacaaatctgcctaacttctgcaggctatatacgagttaacatttccatgagcaatgcatgagggttgtgatttttccacatccctgtcaacacttggtttgtcagtttgtttttatttagctgttgtagtggatgggtagtgatggtgtatggtggttttaatttgtatttccttcatgaataatgatattgaagattttttatatgtttattttccacccgtatctctttggtgaaatgtctttataaatttttgtgaatttttaaatcaagatcattaaccaaatgagcccctcatttgggctcaagtgatccttccacctcaacctcccgagtagctgggaccacaggtgcaggccacgcttggctaatttttgtatattttgtagaggcggggttttgccatgttgcccaggctggtcttaaactcctgaactcaagcaattggcctgcctcacataagtattctcttttattttgaggattaatttttgttgttgtgaaatatatcctacctgtaaaagagtgcttaaaatgtcgtatgtgtgctttaaaggataatataatggaaacttgtgttcctactgcccaggttaggaaatgggttattaataactttgaaacctcctaaatgcctctctcctactgcattttccttcctccacatcagatgtagtgtttcttcaattttatattaatattttgtactttttatagttttaccatatatgtttatatatatccttaatatattagtttttaaaatttgttattaaccttcagtttattcattatttcaacactgtatagtatcttattgtagtaaagtatgtcaattaacttatccattccactagatggagatcgggattatttctggtttttagttattaaaaacaatgctgctgctgggtgcagtggcttacgcctgtaatcctagcactttgggaggccgaggctgcggatcatgaggtcaagagatcgagatcatcctggccaacatggtgcaactccgtctctactaaaaatacaaaaattagcaggatgcggtgctgcgcgcctgtagtccctgctactcgggaggctgaggcgggagaatcacttgaacccaggaggcggaggttgcagtgagccgagattgtgccactgcacttcagcttggcagagcgagacttcgtctcaaaaaaaaaaaaaaaaaaagctgctataaatatggccaagactaaggaaaggtaagtgaggtgcttagggttcacattttatggagtaagagtaagtaccttcttaaggtttataccctaggttcttcacatgcctcactttagtcctagccctgagcattattatgtaggtcttctgatgcaatatctaagagtttctctaaggtatacctagaaatagattgctaggtaatggagtaactttattacttacaggaaactatatggtggttgtaacaatttatgcttctgccaccagtcatggtggatatgaaattatgtcttaatgtgataatttacattgcaatttttttttttttttttttttttttttttgagacagagtcttgctctgtcacccaggctggagtgcagtggcgtgatcttggctcactgcaacctctgcctcctgggctcaagtgatccttccacctcagcctcccgagtagctgagaccacaggcgcaggccacacttggctaatttttgtatattctgtagaggcggggtttcgtcatgttacccaggctggtcttaaactcctgaactcaagcaatcggcctgcctcagcctaccgaagtgctgggattagaggtgtgagccaccacacctggctgtttgtttgttttgagcctgttcctcaggctggagtgcagtggtccaatcatggcttgctgcaactccgcttcctgggcttaagagatcctcccacctcagccttctgagtagctaggactaagggcacctgccactatgcctggctaatttctaaagttttttttatagaggcagagtctcgctgttttgcccaagctgttctcaaatttctaggctcgtgtgatcctcctgcctcagcctcccaaagtgctgggattataggtgtgagccaccacacctggctgatctatctgtcttaaactggagaattgcatttttttctacctcctttcttttttttaaaaaaactgaatttccatctgttacccctccctttctgctcctcttatttcatgccttggaagttatactttgccttcctttaatgagtaccaaagaaattaaaaaatacatgtttactgtaagtccaggcctaaatgttgctactacagggaccatcaaatgctttactaccatctattgccatctgcaaatgtatgccattgttgtttagttttgtagttcttaatgtattttaattaaacaccacaaattatgctttttgtttgttttattcagtcagtagatgcttagaatacttgcttattttaccaattcctttgcttattccactcctttgttctgggattatttttctttttcctaatatattttcattaaaagtttatttggtgagaatctaaaaactctcaaattctgaaagttttaaaaatttgcctttgttgttgaaaattagttttgatgggtgagagaatctagatcaggtgttagcaaacctttttttgtaaagggccagatagtaaatattgtgggctttgtgggccatagagtctctctgacaactactcagcaatgctgttgtaggacaaaagcaaccatagacattatgtaaacatgagtgtgggtatgttctcacaaattttgtttatagacactgaaatttgactcaattttcatgtgttaaaaattattattttttgaatttttttaaccatataaaaatgtaaaaatcattcgtagcttgtagaccaaataaacaggatggatttgacctgtgggccatagtttgctgacctctggtctaaattaacattcattttacttagtacctgacactggagtaattattcttatgatgtcttattgtgatattgtcttccatttttaattgttgaagagccagctgtcagtcttttttgtttttctttttcttcttcttttttttttgaaatggagttttgctcttatcgcccaagctggagtgcagtggtgtgatcttggcccactgcaacctctgccttctgggttcaagcgattttcctgcctcagcctcccaagtagctgggattacaggtgcctgccaccacacccagctaatttttgtatttttagtagagatggggcttcaccatgttggccaggctggtgttgaactcctaacctcaggtgatccacctgccttggcctcccaaagtgctgcaattacaggcatgaggcacggcgtctggcctttctttcctttttttttttttttgagacgtagtcttgctctgttgcccaggccggggggcgatggtacgatcttggctcattgcaacctctgcttcccaagttcaagccattctcctgcctcagcctcccaagtagctgggactataggcacgtgccaccatgccgagctaatttttgtatatttagtagagacggggtttcaccatgttgtccaggctggtcttgaactcctgacctcaagtgatcctctcgccttggcctctcaaataactgtcctttctttgttggtaatctggtgatatgttttcttgtttggctgcttttaagagctgcttcttgtctctggtgcagttcgctatgatgtatctaagtatgtatttattttcatttaacctggtcaggatttgttgagtatccagaaactaaggattggtgtttctcattacatctggaaaaatttgagccattatttttgcttatattgtggtatgtcataggaagttgagaaaagaaaaattcatttgatggttttctatgaggttatagtggaaaataactatctcccttttagaattgagtgctagacagtttctgtgtagatgatctcataagcttccttttatcaaacagcgatcacttttttggtttggctgctgagaagtatggcatcaagtataatactcatatgaggtgtttaagaactgagtatatttcttatgcacattttactatatactataattatacattaaaaatgcacattgtaaatattataaatatgtgttatacattgttaatagtttggatagcaaaagtatgacttgacatttgttttttaaaccatatttaaagtaactctatcacaatatggatttaatggattaattgcataattggtgagctactgattattcttgttatttggatgcttctttaagttagcaagtttatattgtggtgcttcaatatagactacttatttcatttcag

SEQ ID NO: 309 - DNA, 8612 bp, Homo sapiens
gtaatgactagcacttgtgtagacagttcctgttaatcccgtgaattgggaatttaacatgcctggaagcttgcagcgtcactgccttctgccagtggagcgggactgtgttttttctgtggtgattaagtttaggaaagtacggttttggaattcatctgaaggctgagttgggcgttcactccacagaactgctaatatagaggaacccgatgaattcaggatgacctagtcgctattttttgaggcatatatctataattggatctaatttcggtaaagtgccaagtgtgaagctttgtttaccttgctttagtgttgggtttgaaagcctgttctgtccatttgttagaatgattttaggtattcggaatttattgtctttcgaaaaacgccctggaaaacagtacaaatagcagcctttggctgttttacaacttagttttggctaagcagcaaggttagtgttattgttagagggccttttgtttgttttctactctcatttgcagagtagtcatattattctagtctaattagaaaactctgaagacagaaacttttttttttgagacggagtgtcgctgttgtcggcccgggctggagtgcaatggcgcgatctcggctcactgcaacctccgcctcccaggttccagcaattctcctgcctcagcctccggattagctgagaatacaggcgcctgccaccacgcccggccgaaacatttttattaagctaagaaatttaaaatagctaggccggacgcggtgcatcacgcctgtaatcccagcactttgggaggccgagacgggtggatcacttgaggtcatgagtttgagaccatcctggccaacatggtgaaaccccgtctctactaaaaatacaaaaattagcggggcatcgtggcgctcgcctgtaatcccaggtacctggaaggctgaggcaggagaatcgcttgaaccccggaggcggaggttgcagtgagccgagatcatgccattgcactccagcatgagcgacagagacagactccttctcaaaaaaaaagaaagaaaaaacagattttaaaataattaaataggccaggctcagtggctcacgcctgtaatcctagcaccttgggaggctgaggtgggtggatcgcctgaggtcaggagttcgagaccagcctggccaacgtagtgaaaccctgtccctactaaaaaaatacaaaaaattagctggacgtggtggcgggcgctggtaatcccagctactagggaggctgaggcaggagaatcgcttagaacccaggaggcagaggttgcagtgagccgagatcgtgccatttcactgcagcctgggcatccagagcaaaactccgtctcagaaaaaaaaaaaaagtaaatagcatggttaatgttactgggttttaaatattaaaaacataggaaagaaaatacttccactccagcctgggtgacagagcaagactccgtctcaaaaaaaaaaaaaaaaaaaaaaagaaaatacttctaagtaatcttaaagtgtaaaagataatgggtaacataacattgctacaaatatagcttatcctctagtgctcatcacaagtgtttgtgtaatagaatatgaacttgagtctgtgacggcagaattgtcatgtacatttgaatgtctaatactgttttaaagagaatagcttttgtttcgatatgacttagcaattaagcctgaagttaactgttttcattgttgtcaaatttattgctagtagtgttacgtttatagtaattttcatcttttcaagttaccaatgcatggaaatgtgaatttctgtccttttaggaagtggtattttatcttttttttttttttttttttgagacggagtctcactttgtcgccctgtctggagtgcagtggcgtgatctcagctcagtggaacctctgcctcccgggttcaagtgatttttctgcctcagcctcccgagtagctggggttacaggccctcaccaccatgcctggcttatttttgtggagatggggtttcaccacgttggccaggctggtcttgaactcctgaccttgtgatctgcacgcctcggtctcccaaagtgttgggattacaggcgtgagccatggccccctgccttattttttaatacaattaaaagaacccagtaatcctactcctagacctgtgtcccacagaaaaaagtgttaaacatgagcgtgtagtactagggcattcgttgtagtactatccgtagtggcaaaacgctggaagcaaattaaatgcccattaatagggtaattgatgacttcagatatttccatactgtggaatattatgcagtcattaaaaagaatgttacaactaattgcttttcctctcagaagcccctctctctcactagagaaagctgttctcctttctttcttctgcctattaaacctccattcctaaactcagaaagaaaaaaaaaaaaagagaatgttacgactaattgacttggagggacttccatggtgtacatttaaataaaaggtagatgtgaagtggggtatattatgtgatcttaatttcataacacaaaggaaaacatatagatccgtagataaggatatatggatatggaggagagaaaaggaaaagactcaaaactcacagaatttttgaagaaatgtatagctaaaaatctaagaaggctacagtcaaggccttgaggccagaagacaccccatcaaaactgagtaaaactagcccagtgtgggacgcagaaattctagtatgctaccaaaattacttacggattgctaccagttccttagaaggaaaactgaggactaatatttgtattttcagtatagtttagaattcttaaaaaatgagcaaacaggctgtacttggtggctcatgcctgtaatgccaggacttgtggaaactgaggtgagaggataacttgagtccagaggtttgagaccagtctgggcaacatgttggagccccatttctacaaaaaacacaaaaattagccagacgtggtggcacgcgcctgtcttcccagctactggggaggatcatctgagcctgggggaagttgaggctccagtgagccatgatcatgccactggactccagcaggggcagagtgagactttgtctgaaaaaaacaaaaaatgaatgagcaactaactctggctttcatgatttgtgcttataaatctttttatttatttatttatttatttatttatttatttatttatttattttgagacggagtcttgctctgtcgcccaggctggagcgcagtggcgcgatctcggctcactgcaacctccgcctcccgggttcacgccattctccagcctgagcctccggagtagctgggactacaggcgcctgccaccacgcccagctaattttttgtatttttagtagagacggggtttcaccgtgttagccaggatggtttcaatctcctgaccttgtgatccgcccgactcagcctcccaaagtgctgggattacaggcgagccactgtacccagcctataaattttttttataatgccctgattcccattatttgatgtatttggataaatatgtcatcctgtaaattgaaggattaaactgataagagcagaaaacagaaattagtacactagttgatctggctcagatatagtgcctatgtatcaggtgctccatgaatatttgttggatgaataaatgatcataaaactatataaaaatgaagaaataacagaataaaataatttgttctatataaatcctatgaatgagattgagtgggctaatagaatcctttccatctcaaaatgttctggaaagtcttgagtaaaagactcatcaaaaaaataattctgctttgtgcagaaagaagggttgctgacctttgaaggtgctttttgagtctttaacattctttagtagtatattccccaaagttaagaaattctagttagattttaaaaaattgagttaacatttaaaaaacagttttgttgaggtataatacacgtaccataaaatttactcaatttaagtacaaagtttgatcagttttagtaaatttatatagttgcacagctgtcatcagaggctgcttttaaaacatgtccatcactccagaagggttcctgtgtcaatggaattgctgggttatattgtttaagtatttgtttaaaaaaacagaaacaaatctgcctaacttctgcaggctatatacgagttaacatttccatgagcaatgcatgagggttgtgatttttccacatccctgtcaacacttggtttgtcagtttgtttttatttagctgttgtagtggatgggtagtgatggtgtatggtggttttaatttgtatttccttcatgaataatgatattgaagattttttatatgtttattttccacccgtatctctttggtgaaatgtctttataaatttttgtgaatttttaaatcaagatcattaaccaaatgagcccctcatttgggctcaagtgatccttccacctcaacctcccgagtagctgggaccacaggtgcaggccacgcttggctaatttttgtatattttgtagaggcggggttttgccatgttgcccaggctggtcttaaactcctgaactcaagcaattggcctgcctcacataagtattctcttttattttgaggattaatttttgttgttgtgaaatatatcctacctgtaaaagagtgcttaaaatgtcgtatgtgtgctttaaaggataatataatggaaacttgtgttcctactgcccaggttaggaaatgggttattaataactttgaaacctcctaaatgcctctctcctactgcattttccttcctccacatcagatgtagtgtttcttcaattttatattaatattttgtactttttatagttttaccatatatgtttatatatatccttaatatattagtttttaaaatttgttattaaccttcagtttattcattatttcaacactgtatagtatcttattgtagtaaagtatgtcaattaacttatccattccactagatggagatcgggattatttctggtttttagttattaaaaacaatgctgctgctgggtgcagtggcttacgcctgtaatcctagcactttgggaggccgaggctgcggatcatgaggtcaagagatcgagatcatcctggccaacatggtgcaactccgtctctactaaaaatacaaaaattagcaggatgcggtgctgcgcgcctgtagtccctgctactcgggaggctgaggcgggagaatcacttgaacccaggaggcggaggttgcagtgagccgagattgtgccactgcacttcagcttggcagagcgagacttcgtctcaaaaaaaaaaaaaaaaaaagctgctataaatatggccaagactaaggaaaggtaagtgaggtgcttagggttcacattttatggagtaagagtaagtaccttcttaaggtttataccctaggttcttcacatgcctcactttagtcctagccctgagcattattatgtaggtcttctgatgcaatatctaagagtttctctaaggtatacctagaaatagattgctaggtaatggagtaactttattacttacaggaaactatatggtggttgtaacaatttatgcttctgccaccagtcatggtggatatgaaattatgtcttaatgtgataatttacattgcaatttttttttttttttttttttttttttttgagacagagtcttgctctgtcacccaggctggagtgcagtggcgtgatcttggctcactgcaacctctgcctcctgggctcaagtgatccttccacctcagcctcccgagtagctgagaccacaggcgcaggccacacttggctaatttttgtatattctgtagaggcggggtttcgtcatgttacccaggctggtcttaaactcctgaactcaagcaatcggcctgcctcagcctaccgaagtgctgggattagaggtgtgagccaccacacctggctgtttgtttgttttgagcctgttcctcaggctggagtgcagtggtccaatcatggcttgctgcaactccgcttcctgggcttaagagatcctcccacctcagccttctgagtagctaggactaagggcacctgccactatgcctggctaatttctaaagttttttttatagaggcagagtctcgctgttttgcccaagctgttctcaaatttctaggctcgtgtgatcctcctgcctcagcctcccaaagtgctgggattataggtgtgagccaccacacctggctgatctatctgtcttaaactggagaattgcatttttttctacctcctttcttttttttaaaaaaactgaatttccatctgttacccctccctttctgctcctcttatttcatgccttggaagttatactttgccttcctttaatgagtaccaaagaaattaaaaaatacatgtttactgtaagtccaggcctaaatgttgctactacagggaccatcaaatgctttactaccatctattgccatctgcaaatgtatgccattgttgtttagttttgtagttcttaatgtattttaattaaacaccacaaattatgctttttgtttgttttattcagtcagtagatgcttagaatacttgcttattttaccaattcctttgcttattccactcctttgttctgggattatttttctttttcctaatatattttcattaaaagtttatttggtgagaatctaaaaactctcaaattctgaaagttttaaaaatttgcctttgttgttgaaaattagttttgatgggtgagagaatctagatcaggtgttagcaaacctttttttgtaaagggccagatagtaaatattgtgggctttgtgggccatagagtctctctgacaactactcagcaatgctgttgtaggacaaaagcaaccatagacattatgtaaacatgagtgtgggtatgttctcacaaattttgtttatagacactgaaatttgactcaattttcatgtgttaaaaattattattttttgaatttttttaaccatataaaaatgtaaaaatcattcgtagcttgtagaccaaataaacaggatggatttgacctgtgggccatagtttgctgacctctggtctaaattaacattcattttacttagtacctgacactggagtaattattcttatgatgtcttattgtgatattgtcttccatttttaattgttgaagagccagctgtcagtcttttttgtttttctttttcttcttcttttttttttgaaatggagttttgctcttatcgcccaagctggagtgcagtggtgtgatcttggcccactgcaacctctgccttctgggttcaagcgattttcctgcctcagcctcccaagtagctgggattacaggtgcctgccaccacacccagctaatttttgtatttttagtagagatggggcttcaccatgttggccaggctggtgttgaactcctaacctcaggtgatccacctgccttggcctcccaaagtgctgcaattacaggcatgaggcacggcgtctggcctttctttcctttttttttttttttgagacgtagtcttgctctgttgcccaggccggggggcgatggtacgatcttggctcattgcaacctctgcttcccaagttcaagccattctcctgcctcagcctcccaagtagctgggactataggcacgtgccaccatgccgagctaatttttgtatatttagtagagacggggtttcaccatgttgtccaggctggtcttgaactcctgacctcaagtgatcctctcgccttggcctctcaaataactgtcctttctttgttggtaatctggtgatatgttttcttgtttggctgcttttaagagctgcttcttgtctctggtgcagttcgctatgatgtatctaagtatgtatttattttcatttaacctggtcaggatttgttgagtatccagaaactaaggattggtgtttctcattacatctggaaaaatttgagccattatttttgcttatattgtggtatgtcataggaagttgagaaaagaaaaattcatttgatggttttctatgaggttatagtggaaaataactatctcccttttagaattgagtgctagacagtttctgtgtagatgatctcataagcttccttttatcaaacagcgatcacttttttggtttggctgctgagaagtatggcatcaagtataatactcatatgaggtgtttaagaactgagtatatttcttatgcacattttactatatactataattatacattaaaaatgcacattgtaaatattataaatatgtgttatacattgttaatagtttggatagcaaaagtatgacttgacatttgttttttaaaccatatttaaagtaactctatcacaatatggatttaatggattaattgcataattggtgagctactgattattcttgttatttggatgcttctttaagttagcaagtttatattgtggtgcttcaatatagactacttatttcatttcag

SEQ ID NO: 310 - DNA, 61 bp, Homo sapiens
ccgaaaatgagagcacacctattcagcaactcctggaacacttcctccgccagcttcagag

SEQ ID NO: 311 - DNA, 180 bp, Homo sapiens
ttctcggtggaacttaaaatgctgtgagacaccagacagacagatactgtgaacttggagctctctaatgaagggataccaaagtcttgtattcaatttttttttccttaaattgtcagccgaaaatgagagcacacctattcagcaactcctggaacacttcctccgccagcttcagag

SEQ ID NO: 312 - DNA, 1507 bp, Homo sapiens
gcaagggtgcacttttagagactctcctggtgttcacagctcatcgttgtaaatgaggggtcggcaccgtgtcctgttgctttggggagaagcatgggagggaggagagctggtatttccagggcctcatcccaggtgtcctctggcctgaggtttcctccggtgtctctgaatgtctagagcaaggcgtggccagttaccactggtgcccttcagttttgttttttaacttgttagctaaggatggcttatatgttttttaagcgttcataaaaagaaacaaaaaggcatctccacagagaccaatcgtatgtgacccgcaaagcctagactgttttttgtctggcctttatgtaaaaagtttgccagccctgggtcttgaagtttggttttgtttgcacttaagacagtattggaacagtagccccatctgggtcagactggtaagagagatgcatgtcagtgaaaacgcaggtaattccccttgggaagaagggacctcgaggcccaaatggtgggtctgaagttgctgaaagtgaccataggctgagacaaaggaagctggaggcctttagtagaatctctgtcgtgggcaccatctgcgaaggatggcatttggctggaatttccagttgacaaggacttgccctctgagttctctttgtccccagccttcctgtgcacaactcacagtgatgaggcatttgtacctaagacaaggggtgtctcttcccagcaactctcagcatccagtggttcctggattatagggaaacagacggctgggctttgggacatgggacatcagggagtggggaggctagtgctgcgatcattcaggccgtcagaaactgtctgaggcctgctggctccactgaaggaaagttctggaaagctggtggccttctgagctcctgtggtcatttggctcttcaggcactttctttttttaatttatttttgaaacatggtcttgctgtgtcgcctaggctggagtgcagtgtcgtgattcactcctgggctcagataaccctgggctcaagcgatcctcccacctcagcctcccaagttgctgggactacaggcacgcaccaccacgccggccatttatttactttttgttgaattttaagggacctcaagtgaaataataatcggtgaattcaggatcaacctttatgtccagagcgtttgttccgtcgtccatttcttgtctagagtagtggtatgagctgaaaacattgctaagtgatcaccacatattgttgatgtaagggctaccggttattacaagagatttttatgactcctgctgtgggggtgccctttctacccggctgagcttggtgggagccaaggctgagtcggatgtatctttatatccccagttctcggtggaacttaaaatgctgtgagacaccagacagacagatactgtgaacttggagctctctaatgaagggataccaaagtcttgtattcaatttttttttccttaaattgtcag

SEQ ID NO: 313 - DNA, 1388 bp, Homo sapiens
gcaagggtgcacttttagagactctcctggtgttcacagctcatcgttgtaaatgaggggtcggcaccgtgtcctgttgctttggggagaagcatgggagggaggagagctggtatttccagggcctcatcccaggtgtcctctggcctgaggtttcctccggtgtctctgaatgtctagagcaaggcgtggccagttaccactggtgcccttcagttttgttttttaacttgttagctaaggatggcttatatgttttttaagcgttcataaaaagaaacaaaaaggcatctccacagagaccaatcgtatgtgacccgcaaagcctagactgttttttgtctggcctttatgtaaaaagtttgccagccctgggtcttgaagtttggttttgtttgcacttaagacagtattggaacagtagccccatctgggtcagactggtaagagagatgcatgtcagtgaaaacgcaggtaattccccttgggaagaagggacctcgaggcccaaatggtgggtctgaagttgctgaaagtgaccataggctgagacaaaggaagctggaggcctttagtagaatctctgtcgtgggcaccatctgcgaaggatggcatttggctggaatttccagttgacaaggacttgccctctgagttctctttgtccccagccttcctgtgcacaactcacagtgatgaggcatttgtacctaagacaaggggtgtctcttcccagcaactctcagcatccagtggttcctggattatagggaaacagacggctgggctttgggacatgggacatcagggagtggggaggctagtgctgcgatcattcaggccgtcagaaactgtctgaggcctgctggctccactgaaggaaagttctggaaagctggtggccttctgagctcctgtggtcatttggctcttcaggcactttctttttttaatttatttttgaaacatggtcttgctgtgtcgcctaggctggagtgcagtgtcgtgattcactcctgggctcagataaccctgggctcaagcgatcctcccacctcagcctcccaagttgctgggactacaggcacgcaccaccacgccggccatttatttactttttgttgaattttaagggacctcaagtgaaataataatcggtgaattcaggatcaacctttatgtccagagcgtttgttccgtcgtccatttcttgtctagagtagtggtatgagctgaaaacattgctaagtgatcaccacatattgttgatgtaagggctaccggttattacaagagatttttatgactcctgctgtgggggtgccctttctacccggctgagcttggtgggagccaaggctgagtcggatgtatctttatatccccag

SEQ ID NO: 314 - DNA, 58 bp, Homo sapiens
gtggatgagatgatcagggaggctgacatcgatggagatggccaggtcaattatgaag

SEQ ID NO: 315 - DNA, 500 bp, Homo sapiens
ggaacgggaccattgacttcccggagttcctgaccatgatggccagaaagatgaaggacacagacagtgaggaggagatccgagaggcgttccgtgtctttgacaaggtaagcagccctctccaggggcggctctgagactgacgccagccttcaggcagacaggcggaactggagccacggagctaccacttccaggaggtccgggtcccggtgccagcctcattgccaacctgctctgccacctcaggcagcctccctcactgtgctcactgctgagggatggtgatgacagccacccctctcactgcctctctccccaccgggagaagtgcccagtgaaaggctttatccccaacccccaggatgggaatggctacatcagcgccgcagagctgcgtcacgtaatgacgaacctgggggagaagctgaccgatgaggaggtggatgagatgatcagggaggctgacatcgatggagatggccaggtcaattatgaag

SEQ ID NO: 316 - DNA, 596 bp, Homo sapiens
gtggatgcagatggtgagccccacagagcgcgtgggcagccctgctcctggtcaccccgagtgactgcagggagcctctctcagggtgatggatgagcccgtgtctctcagggcccaggccaagagcattctccatcctttccccaccttccagggaacgggaccattgacttcccggagttcctgaccatgatggccagaaagatgaaggacacagacagtgaggaggagatccgagaggcgttccgtgtctttgacaaggtaagcagccctctccaggggcggctctgagactgacgccagccttcaggcagacaggcggaactggagccacggagctaccacttccaggaggtccgggtcccggtgccagcctcattgccaacctgctctgccacctcaggcagcctccctcactgtgctcactgctgagggatggtgatgacagccacccctctcactgcctctctccccaccgggagaagtgcccagtgaaaggctttatccccaacccccaggatgggaatggctacatcagcgccgcagagctgcgtcacgtaatgacgaacctgggggagaagctgaccgatgaggag

SEQ ID NO: 317 - DNA, 154 bp, Homo sapiens
gtggatgcagatggtgagccccacagagcgcgtgggcagccctgctcctggtcaccccgagtgactgcagggagcctctctcagggtgatggatgagcccgtgtctctcagggcccaggccaagagcattctccatcctttccccaccttccag

SEQ ID NO: 318 - DNA, 89 bp, Homo sapiens
gaagtgttcatacctcaagatgggaaaaaggtgacgtggtattgctgtgggccaaccgtctatgacgcatctcacatggggcacgccag

SEQ ID NO: 319 - DNA, 1180 bp, Homo sapiens
gtaaggagaacacagatgccgtggcacacgcacacaatggggaggcaggaggcaggacagcccatgtgccttgtcgcacaacagacttctctgttccttgtgttgggatctggagttccataaatccaggtttaagatccttcagtcacttccatgttatagtctctgtggcccagaggcagagctgtcctctgaaacccagacacgtgaagtatcatgcctcatgtggaagcctgcccatgacttctgggcatggatcaccctggcttgtctctcggactctgcccaaccatgagtacttgaggtcatccacagccacgcctttcaggaggacgcgtggttgcagcaggtggcactgtatgagccaagcaggatggacaaaacggcaaactggctggatgttgttgggagcacagcaggttttgagaagaaggcaggattggttcctaacagaatggggtttgcatggtttgcttggctcagggcatggccagtgactccagtgatttcagaccaggctctgggcggggctgcttggatttccatcagggagcatgtttggcagacagagagtcaggtgtgagggagttcatggccttccttgggaaactggttgaggatgatgcccccagagaggtctgagggtgctgggatgttggggagtggtgccagagcagcaccacgattcaggggtcctggcctccaagccgcgctcccccaacagggactgaccctggccaagtgttgtctgcctcagtttcttcatccgtaaaaagaaaatgacataacctacgtcctagagtgtactgcatattgaatatttagctcagggcctggcacatggtaggtactcagtaaatattagctgtgttattgttaaataagcagcatttcaacaatcaataaaatcattgattccctttatcgcctccctccatagatgagtagaaccccagggaggaagaggccccacccacccagggctcagttggtgggaggtgccgtacatctcactgggctcccactgagactgtgacttttcacagtaaaacaaaatggtctctgttgaattgtttacactaaacacaaaccacactgtgatgtttgttgctgtttttggtaatcctgtgcagtgtttcttgcatttcttgtgatcgtcattccttcattcctaacaaag

SEQ ID NO: 320 - DNA, 136 bp, Homo sapiens
tgtttcttgcatttcttgtgatcgtcattccttcattcctaacaaaggaagtgttcatacctcaagatgggaaaaaggtgacgtggtattgctgtgggccaaccgtctatgacgcatctcacatggggcacgccag

SEQ ID NO: 321 - DNA, 1133 bp, Homo sapiens
gtaaggagaacacagatgccgtggcacacgcacacaatggggaggcaggaggcaggacagcccatgtgccttgtcgcacaacagacttctctgttccttgtgttgggatctggagttccataaatccaggtttaagatccttcagtcacttccatgttatagtctctgtggcccagaggcagagctgtcctctgaaacccagacacgtgaagtatcatgcctcatgtggaagcctgcccatgacttctgggcatggatcaccctggcttgtctctcggactctgcccaaccatgagtacttgaggtcatccacagccacgcctttcaggaggacgcgtggttgcagcaggtggcactgtatgagccaagcaggatggacaaaacggcaaactggctggatgttgttgggagcacagcaggttttgagaagaaggcaggattggttcctaacagaatggggtttgcatggtttgcttggctcagggcatggccagtgactccagtgatttcagaccaggctctgggcggggctgcttggatttccatcagggagcatgtttggcagacagagagtcaggtgtgagggagttcatggccttccttgggaaactggttgaggatgatgcccccagagaggtctgagggtgctgggatgttggggagtggtgccagagcagcaccacgattcaggggtcctggcctccaagccgcgctcccccaacagggactgaccctggccaagtgttgtctgcctcagtttcttcatccgtaaaaagaaaatgacataacctacgtcctagagtgtactgcatattgaatatttagctcagggcctggcacatggtaggtactcagtaaatattagctgtgttattgttaaataagcagcatttcaacaatcaataaaatcattgattccctttatcgcctccctccatagatgagtagaaccccagggaggaagaggccccacccacccagggctcagttggtgggaggtgccgtacatctcactgggctcccactgagactgtgacttttcacagtaaaacaaaatggtctctgttgaattgtttacactaaacacaaaccacactgtgatgtttgttgctgtttttggtaatcctgtgcag

SEQ ID NO: 322 - DNA, 177 bp, Homo sapiens
gcttacatcctgagcatggagccctgtggccactgcctcattatcaacaatgtgaacttctgccgtgagtccgggctccgcacccgcactggctccaacatcgactgtgagaagttgcggcgtcgcttctcctcgctgcatttcatggtggaggtgaagggcgacctgactgccaag

SEQ ID NO: 323 - DNA, 235 bp, Homo sapiens
actgtcctctagggagcgtggggagagcccgggtttacgtgggtccctgtgctggcaggcttacatcctgagcatggagccctgtggccactgcctcattatcaacaatgtgaacttctgccgtgagtccgggctccgcacccgcactggctccaacatcgactgtgagaagttgcggcgtcgcttctcctcgctgcatttcatggtggaggtgaagggcgacctgactgccaag

SEQ ID NO: 324 - DNA, 797 bp, Homo sapiens
gtgagtctccatgaaatttgggccagtagctcgggctctgggcccttccctccccacccctcaggtccttccctgcaggtgtgtcaggagcccagggaacccaaccctaggcagtgcagtgggggtctggtctcagcctccctgactccggcccagcgcctgctggggcagattgttcatctctgcgcttcctcatctgcaaagctgacagcagaagcagggcagacctgatgaggggcagtcatcgggatccagaccaagtcgccactctctcattcacaagtatttattgtgtggctcccatgctctgtgctggggccacctgggaaggagccatcagtcagttaggcgagagagaagttagacaaatgagtatataaatagaaatagtgataagtaccatcaacaaaagaacaggctgccttgagagaattacaaggggactgagcctggggagagggcagccttgggtgcctccaggtggcctgggcatggttctgctgacagagttctcaggtacaccccggcctaggtgacccgtgaggtcctttgggatgaatgctcatggctgttggatttccaggttaccagctcccttcccttaataccaagatgggggggtcaccttctagtgctagtcttccctgcagttgcttctcttttgccctggaatgccgggtggagaccctgctactccttgtgcgagagggcagaccccgttttcttcccgcctctccagactgtcctctagggagcgtggggagagcccgggtttacgtgggtccctgtgctggcag

SEQ ID NO: 325 - DNA, 739 bp, Homo sapiens
gtgagtctccatgaaatttgggccagtagctcgggctctgggcccttccctccccacccctcaggtccttccctgcaggtgtgtcaggagcccagggaacccaaccctaggcagtgcagtgggggtctggtctcagcctccctgactccggcccagcgcctgctggggcagattgttcatctctgcgcttcctcatctgcaaagctgacagcagaagcagggcagacctgatgaggggcagtcatcgggatccagaccaagtcgccactctctcattcacaagtatttattgtgtggctcccatgctctgtgctggggccacctgggaaggagccatcagtcagttaggcgagagagaagttagacaaatgagtatataaatagaaatagtgataagtaccatcaacaaaagaacaggctgccttgagagaattacaaggggactgagcctggggagagggcagccttgggtgcctccaggtggcctgggcatggttctgctgacagagttctcaggtacaccccggcctaggtgacccgtgaggtcctttgggatgaatgctcatggctgttggatttccaggttaccagctcccttcccttaataccaagatgggggggtcaccttctagtgctagtcttccctgcagttgcttctcttttgccctggaatgccgggtggagaccctgctactccttgtgcgagagggcagaccccgttttcttcccgcctctccag

SEQ ID NO: 326 - DNA, 76 bp, Homo sapiens
agcccaaagaggtggcgagtgaaggcaccatgctgaagcggctcatcgagaaaaagtttgggaccatgactgagaa

SEQ ID NO: 327 - DNA, 1652 bp, Homo sapiens
gtgaggagacaggaagggagcgaggcctggggtctgagggtgaggcctgggggcctggctggagggctggagggaaagggacattgcctgcccctctagaaggggatggagcgctgaggcttgtggatgagcctgtgggtgcaacgaggagaccctgggtggcttctgcacatccagaggtgtgtgtgccacctggctaatcccagcagcaggggtgccacccattccttcaccccagaaccatccccaacctttgtcaagtctgggccctgtgagggctccagggacccaaagaggacacagattcagcccctgcccatgaggaccccacctctaaagacctgtgttgggccatggagaatgagtagacttcagccaagtggagggataatgaggcggttggaggaacagcttagatcaaggcctggaggtccgatgctcaacctccattcctgtccacttgagtggccagctgggccaggacatctggggactcatgctgtccccatgagaaggatctctggggagccaggcctgggagcaccaggagccctgcccaagcctggtaaaccctcatgtatctttctctttttttcttttttcttttttttttttttttgagacagggtctcactctgtcacccaggctggagtgcagtggcacaatctaggctcactgcaacctccgcctcctgggttcaagcgattctcccacctcaccctcccgagtagctgggattacaggtgcatgtcaccacacccagctatttgtgtgtgtgtatatttttttagtagagacagggtttcaccatgttggccagactggtctggaactcctgacctcaaatgatccacctgccttgacctcccaaagtgttgggattacaggcatgagccaccgcgcctgggctctcacttatctttcaaactcagctcattgacgctgcctccagaagtctttccaggtcgccagcatcaggcgaggtttccctcctctgggcccctcagaacccaatttcatgcctcaaagtgtcagcagctgtctggctctgagggcaagctgtctctcattcatctccatctcctcggagtaccttgctgtgttcattgtttccagtgttctttgatgaatgggttgacaagatggcggggagggtgtgaatgggacaatgggtaatgtggtgggcagatgagtgggtggagggacaggtgggtgactgactacacagcatgatgaaggtgtcaatgggtgggtggggggtggctacagggaagagcaggtgggtggagggggaggtgagttgtgagtggctggagggccagatgggtgagtgactggataaggaggtgggtggatggatgggtggatggtcgagtgggcgtatggggaggaatggggctgacaaatgggtgggtggagggatgggtggttaggaagataaacaaagccagaagcctctgcgctacaggcagacttgggctctttctcatatctggaaaaggagacctcctggaaatgcaggtctgcagtcatataaattttgtggggaggaggcaggcaagaagagcctctgggtggttctggggtgcagtaggcccagccagcaggtcagcccagcccctgtctctgcgacccccccgcccacccgcag

SEQ ID NO: 328 - DNA, 115 bp, Homo sapiens
agcccaaagaggtggcgagtgaaggcaccatgctgaagcggctcatcgagaaaaagtttgggaccatgactgagaagtgaggagacaggaagggagcgaggcctggggtctgagg

SEQ ID NO: 329 - DNA, 1613 bp, Homo sapiens
gtgaggcctgggggcctggctggagggctggagggaaagggacattgcctgcccctctagaaggggatggagcgctgaggcttgtggatgagcctgtgggtgcaacgaggagaccctgggtggcttctgcacatccagaggtgtgtgtgccacctggctaatcccagcagcaggggtgccacccattccttcaccccagaaccatccccaacctttgtcaagtctgggccctgtgagggctccagggacccaaagaggacacagattcagcccctgcccatgaggaccccacctctaaagacctgtgttgggccatggagaatgagtagacttcagccaagtggagggataatgaggcggttggaggaacagcttagatcaaggcctggaggtccgatgctcaacctccattcctgtccacttgagtggccagctgggccaggacatctggggactcatgctgtccccatgagaaggatctctggggagccaggcctgggagcaccaggagccctgcccaagcctggtaaaccctcatgtatctttctctttttttcttttttcttttttttttttttttgagacagggtctcactctgtcacccaggctggagtgcagtggcacaatctaggctcactgcaacctccgcctcctgggttcaagcgattctcccacctcaccctcccgagtagctgggattacaggtgcatgtcaccacacccagctatttgtgtgtgtgtatatttttttagtagagacagggtttcaccatgttggccagactggtctggaactcctgacctcaaatgatccacctgccttgacctcccaaagtgttgggattacaggcatgagccaccgcgcctgggctctcacttatctttcaaactcagctcattgacgctgcctccagaagtctttccaggtcgccagcatcaggcgaggtttccctcctctgggcccctcagaacccaatttcatgcctcaaagtgtcagcagctgtctggctctgagggcaagctgtctctcattcatctccatctcctcggagtaccttgctgtgttcattgtttccagtgttctttgatgaatgggttgacaagatggcggggagggtgtgaatgggacaatgggtaatgtggtgggcagatgagtgggtggagggacaggtgggtgactgactacacagcatgatgaaggtgtcaatgggtgggtggggggtggctacagggaagagcaggtgggtggagggggaggtgagttgtgagtggctggagggccagatgggtgagtgactggataaggaggtgggtggatggatgggtggatggtcgagtgggcgtatggggaggaatggggctgacaaatgggtgggtggagggatgggtggttaggaagataaacaaagccagaagcctctgcgctacaggcagacttgggctctttctcatatctggaaaaggagacctcctggaaatgcaggtctgcagtcatataaattttgtggggaggaggcaggcaagaagagcctctgggtggttctggggtgcagtaggcccagccagcaggtcagcccagcccctgtctctgcgacccccccgcccacccgcag

SEQ ID NO: 330 - DNA, 92 bp, Homo sapiens
gcctctgagagggagaccatcaagatgcaggacaagctgaaccagctcagcgaggagaaggcgaccctcctgaatcaactggtggaagcaga

SEQ ID NO: 331 - DNA, 1661 bp, Homo sapiens
gtgagtcccagtctccagccacacgtgggtcatgaaggtcactgcacctacaggcctctgtccgttgaagaccatgtaggaggccaggtgtggcagctcacacccatatcccagtgctttggtcattttttgttgttgttttgttttttgttttgttttgttttgtttttagacagtcttgctctatcccacaggctggagtgcagccgtgcgatctcagctcactgcaacctctgcctcccagcttcaagtgattttcctgcctcaacctcctgagtagctgggattacaggtgcccgccaccatgcctcactaatttttgtatttttagtagagatggggtttcaccctgttggccaggctggtcttgaactcctgatctcaggtgatctgcccacctcagcctcccaaagcgctgggattacattcatgagccaccgtgcccagcaatcccagtgctttgggatgccaaggcaggaggctcctttggggccaggagttcaagacaagacggggcaacacagtgagaccccatatctacaaaaatgttttaaattggccaggcatggtggtgcatgccggtagtcccagctactcgggaggctgaggtgggaggatcgcttgagcccaggaggtcaaggctgcagtgagctaggattgcaccactgcactccagcctgggcgacagagcgagaccctgtctctaaaagaagaaaaagaccacctgggcatgggtctggaacccaccctagtggatcccagattccccacagagtctgtctaccccccttggtggcagttcttgagccaaacgagttactgctagaaattgaagggtttcctttgtgataaagtttttaagtatccattattttatggtgtctgattattaaagtaacacacacccagctctaaacattttaaactatacaatgcgtgcaaagtacccagggaaaattgcatataattccaacgcccttcacttcccagaaaaccaatgtgtagctatattcctttcttgttttgctctgttttttacacaaatgggattgtttcagaagttcccccttgaagcactttagtattttcatggccatctttccgtgtcacacacgtgggcccatatctccctgtggaaagggtgcggagcaggcgtggtgtggaggcaccgtcctttcttcagcgtgctccggaagggatgaatagcgcagggatcgcctgttccttgcggtttgatagaatctaggcaaaaaattatctgggaccaatgctttggggggcttgtatctttggtgacatttaaatagcttttagactattggtgtattcaggctttttactttttcttaagtcagcttctatcaattatactgactttctcagctcctacagttatatatccctgttctctctctctctgtctctctgtttcttccccacccccatctccctccctccccctgtatgccagaggttggcaaacgtttgcataaggagcccagtagtgaacacttcaggctttgagagcctcacgctttctgtcgcagctgcttggctctgccattgcagcttgagagccttgtaaagccttagagtgtgagctcaccgaagcatcagaagaaaactcctaatttcttacactgcctctcctacctctaaag

SEQ ID NO: 332 - DNA, 179 bp, Homo sapiens
gcctctgagagggagaccatcaagatgcaggacaagctgaaccagctcagcgaggagaaggcgaccctcctgaatcaactggtggaagcagagtgagtcccagtctccagccacacgtgggtcatgaaggtcactgcacctacaggcctctgtccgttgaagaccatgtaggaggccag

SEQ ID NO: 333 - DNA, 1574 bp, Homo sapiens
gtgtggcagctcacacccatatcccagtgctttggtcattttttgttgttgttttgttttttgttttgttttgttttgtttttagacagtcttgctctatcccacaggctggagtgcagccgtgcgatctcagctcactgcaacctctgcctcccagcttcaagtgattttcctgcctcaacctcctgagtagctgggattacaggtgcccgccaccatgcctcactaatttttgtatttttagtagagatggggtttcaccctgttggccaggctggtcttgaactcctgatctcaggtgatctgcccacctcagcctcccaaagcgctgggattacattcatgagccaccgtgcccagcaatcccagtgctttgggatgccaaggcaggaggctcctttggggccaggagttcaagacaagacggggcaacacagtgagaccccatatctacaaaaatgttttaaattggccaggcatggtggtgcatgccggtagtcccagctactcgggaggctgaggtgggaggatcgcttgagcccaggaggtcaaggctgcagtgagctaggattgcaccactgcactccagcctgggcgacagagcgagaccctgtctctaaaagaagaaaaagaccacctgggcatgggtctggaacccaccctagtggatcccagattccccacagagtctgtctaccccccttggtggcagttcttgagccaaacgagttactgctagaaattgaagggtttcctttgtgataaagtttttaagtatccattattttatggtgtctgattattaaagtaacacacacccagctctaaacattttaaactatacaatgcgtgcaaagtacccagggaaaattgcatataattccaacgcccttcacttcccagaaaaccaatgtgtagctatattcctttcttgttttgctctgttttttacacaaatgggattgtttcagaagttcccccttgaagcactttagtattttcatggccatctttccgtgtcacacacgtgggcccatatctccctgtggaaagggtgcggagcaggcgtggtgtggaggcaccgtcctttcttcagcgtgctccggaagggatgaatagcgcagggatcgcctgttccttgcggtttgatagaatctaggcaaaaaattatctgggaccaatgctttggggggcttgtatctttggtgacatttaaatagcttttagactattggtgtattcaggctttttactttttcttaagtcagcttctatcaattatactgactttctcagctcctacagttatatatccctgttctctctctctctgtctctctgtttcttccccacccccatctccctccctccccctgtatgccagaggttggcaaacgtttgcataaggagcccagtagtgaacacttcaggctttgagagcctcacgctttctgtcgcagctgcttggctctgccattgcagcttgagagccttgtaaagccttagagtgtgagctcaccgaagcatcagaagaaaactcctaatttcttacactgcctctcctacctctaaag

SEQ ID NO: 334 - DNA, 159 bp, Homo sapiens
gcccaggcgctgtcgggacaggccaagcgggccgagctgtaccgcgaggaggcagaggcgctgcgggagcgggccggccgcctgccccgcctgcaggaggagctgaggcgctgccgcgagcggctgcaggcggctgaggcctacaagagtcagctggag

SEQ ID NO: 335 - DNA, 286 bp, Homo sapiens
gcccaggcgctgtcgggacaggccaagcgggccgagctgtaccgcgaggaggcagaggcgctgcgggagcgggccggccgcctgccccgcctgcaggaggagctgaggcgctgccgcgagcggctgcaggcggctgaggcctacaagagtcagctggaggtgaggcggagacggagccgcggggcggggcgtgcgcgagggggcgggccaggaggaggggcgagattgggtcccgagggcagagaggcaggttctctggaggggacagtcacaggtggagaaatgg

SEQ ID NO: 336 - DNA, 498 bp, Homo sapiens
gtgaggcggagacggagccgcggggcggggcgtgcgcgagggggcgggccaggaggaggggcgagattgggtcccgagggcagagaggcaggttctctggaggggacagtcacaggtggagaaatgggtgaggacaaattcagggaggtggcgtctgggaaagggcctccagaggatggggcaggtgtaggggagtgggggggctgtgtaagtgatgcagccttggaaggagggctgttcccgggggggaggggcggggcatggacagaagggcggggcctgcacaaagggcggggccaggggcgagggagaaagtacctgaagagatcttggtgggaagaagatggaagggagtggcggggcctagagactgatggggtgcagggtgggggagggaggcagggtctgtgacaggctgaggggaaggagtttgggaccctcaggcgctggagtgcatgggggctgcgtggctaccggttctccctgctctcccaccag

SEQ ID NO: 337 - DNA, 371 bp, Homo sapiens
gtgaggacaaattcagggaggtggcgtctgggaaagggcctccagaggatggggcaggtgtaggggagtgggggggctgtgtaagtgatgcagccttggaaggagggctgttcccgggggggaggggcggggcatggacagaagggcggggcctgcacaaagggcggggccaggggcgagggagaaagtacctgaagagatcttggtgggaagaagatggaagggagtggcggggcctagagactgatggggtgcagggtgggggagggaggcagggtctgtgacaggctgaggggaaggagtttgggaccctcaggcgctggagtgcatgggggctgcgtggctaccggttctccctgctctcccaccag

SEQ ID NO: 338 - DNA, 122 bp, Homo sapiens
ttctgcccacatggtccaccccggtgcagccaatggccctgattgtgctggggggcgtcgccggcctcctgcttttcattgggctaggcatcttcttctgtgtcaggtgccggcaccgaagg

SEQ ID NO: 339 - DNA, 230 bp, Homo sapiens
ttctgcccacatggtccaccccggtgcagccaatggccctgattgtgctggggggcgtcgccggcctcctgcttttcattgggctaggcatcttcttctgtgtcaggtgccggcaccgaagggtgagtaaccccacacctggtccccacaaggccctcaaacccctgagtcctctaccaggagatcctgtatatgggaactgattttggcccagctccctctgcccactc

SEQ ID NO: 340 - DNA, 304 bp, Homo sapiens
gtgagtaaccccacacctggtccccacaaggccctcaaacccctgagtcctctaccaggagatcctgtatatgggaactgattttggcccagctccctctgcccactcgtaagttcccttgctgccctgtcccagatcccactcaagggagagacaggaaggagcagagagttaattccaggatagatggcctgggccatgtaactgcttctcctgtcgcagcttcccccactccccccaccaaggggcacctcccttctggaggcctgggaccctcgtgactccctttcttgtccctggacag

SEQ ID NO: 341 - DNA, 196 bp, Homo sapiens
gtaagttcccttgctgccctgtcccagatcccactcaagggagagacaggaaggagcagagagttaattccaggatagatggcctgggccatgtaactgcttctcctgtcgcagcttcccccactccccccaccaaggggcacctcccttctggaggcctgggaccctcgtgactccctttcttgtccctggacag

SEQ ID NO: 342 - DNA, 568 bp, Homo sapiens
gtattctgaaatgtgacagaaaaccagacagaaccaagtaagtacactgcaggctgtgcactctgtgccagaacaacagcagccctgctgtagatgcccattacttgggaagccagattgtactcatctgttggttgccttgtacagtaataagaagtaacatcagcagatatactaaccatagtgtattaagtaccaactgtgtgccatgcactgcactagccactctctgcatatcgtttcctggaaccctctcaatgagccttgcaggaggagtatcataccccttgcttagagacagcgcatatgagattcatagaagtcaagtgagatatcaaagtcacgttgctagtaagtgatgggctgggatttaaatctaggtctttggactccaagagttatactgttaaccactacaatacactccctccacctcccatcccagaaaaagttggatcagggatagggttcacttcaggagccagggtcagagctgggcctgtagtcacatataaaagataggacacaaacacaattagcagcagtgttggtttaataaaccgccgta

SEQ ID NO: 343 - DNA, 37 bp, Homo sapiens
gtattctgaaatgtgacagaaaaccagacagaaccaa

SEQ ID NO: 344 - DNA, 603 bp, Homo sapiens
ttctttaattgagaagacaatttcttcatttttaggtattctgaaatgtgacagaaaaccagacagaaccaagtaagtacactgcaggctgtgcactctgtgccagaacaacagcagccctgctgtagatgcccattacttgggaagccagattgtactcatctgttggttgccttgtacagtaataagaagtaacatcagcagatatactaaccatagtgtattaagtaccaactgtgtgccatgcactgcactagccactctctgcatatcgtttcctggaaccctctcaatgagccttgcaggaggagtatcataccccttgcttagagacagcgcatatgagattcatagaagtcaagtgagatatcaaagtcacgttgctagtaagtgatgggctgggatttaaatctaggtctttggactccaagagttatactgttaaccactacaatacactccctccacctcccatcccagaaaaagttggatcagggatagggttcacttcaggagccagggtcagagctgggcctgtagtcacatataaaagataggacacaaacacaattagcagcagtgttggtttaataaaccgccgta

SEQ ID NO: 345 - DNA, 72 bp, Homo sapiens
ttctttaattgagaagacaatttcttcatttttaggtattctgaaatgtgacagaaaaccagacagaaccaa

SEQ ID NO: 346 - DNA, 2638 bp, Homo sapiens
gtatgtatgctttttaaaacaaaatagtttgaaaacttgcattgttttccaaaggtcagaaaatagtttaaggatgaaaataaagtttgaaattttagacatttgaaaagaaacaaaaacttttttgctttacgtgtgtgggactgctgagcatgctaggttcctccaaagatccacattatctcaaggtagaatgaatccttaggccacagagagctttacaggcctgggaacacagcctggacctgttgcatagcctccttttacctgtgatctgcttcaaaatatagttaaacttctggtctccaagtcagagtttgctaaagacctctttaggctgccacctctgtaattttcatgtcatataacacgaatggggctcccaggtaggaagggagttttggttgagttaagtgacttacgtaatacaagtaattgtgcttgtattacttcctgagccttctcagtcccctagcaatcttgggcagtcatacagcttggagaactgatgacttggagaatttgttcccagcctgttcattcctggtaatgagtaatccctctcaaatcccaaaggacagggagcaggctgtaattctgaagagtggatattcttgatgccacagcagtttccataccagccttcaccaaaaggaaatatgccagacagggaatgccgaagagtaaactttctacaagtgatagtatctaggatccattgtgtcatgaatcaagtttataaactagatttcagtttccttagacctgcactgtttagtatagtagccaattagccacatatgattatttaaatatatcatttaaaatgaaataccattaaatttaagattcattcctcagttacactaaccacctttcaagtgctcaatacctacatctggctagtggctaccatactggatagcccagataaggaataatcctatcattgcagaaagttttcttggtcagtgcagaactagactattttgcgatatcagtgctaaatataatttcctgatgataacattttcatattataagttgtaaataccatgaaaatccatccctaagtaatagattatcagtcagttgactctccactaaacagtattataacgatcagctgaagaaagttttcagctattgcccaatgcataaaatattttgggagctcaaattttttaaaaatctattttaatccccaaatagcagtataatagttaatcatctcctgaacaggttggttcccagaaaccaaaatcattttccactcagtgttgttgtagatctcaattaaagaactaacccaggatacctgaactaaagagaggtggcactgagtttccatagaacttcaaaacaattggttgatttcacttaaaaaaaaaaaaaaaagtcattcaatatacagaaaattactcccctggtcagtactgttagccccagataatctgaaaaaatttgttcttaaaaaaaaaaaacaatttggaggccaggcatggtggctcatgcctgtaatcccagcacattgagaggtcgagttgtgtgcatcacttgagcccaggagtttgagaccagcctggacaacatggtgaaacactatctctacaaaaaaatacaaaaattagccaggcatggtggtgcatgcctgtagtcccagctactcaggaggctgaggcgggagggaggcagatgttgcagtgagctgagattgtgccactgcactccagcctgggtgatggagtgagaccctgtctcaaaaaacaaacaaacaaaaaaactcagcaagcatctcaacctttaagcaaccttaaagtcattaattgggaaatagtgagatgtttggcatggaatcttcagaagaggaaagagttgaatggaaacagctccagctgcctagttgtagttgacagacaactttataagctctagtcaaccctattgactaagcttctgaaccactagcatagttctagggtcaggcggatgcctactgtgggcaggaaagtgatgcatgcatgtgtgggagcagtgtcttaatgtctgaaatagtagccatgagctacatgtggctatggagcacttgaaatgtgggagtccaaattatcatgtgctgtgagtgtaaaataatatgtttctaagaccgtgtgtgaaagaatataaaatatctcattaaaaaatgtttatattgagtacatgttgaaataattttatatttgtgacacattgtgttaaataaaatattaaaatttacatttttttttactttgtaatgtggataccaaaaattttaaattacttatgtggcttgcattatatttctattggacagcactggtccaaactattctagccttccctgcatcttcagccttatgcacgaggtaaaattagccattttgtcaacagtttttgcatttggttttctatcatgttctgaccaatttttgaacaactctttggaccagctctgtagccgatttgatttaaagcatataggatagcaggaaatcccagggtgatggggctctggcttagttttccatatttaggcctctaataggcagtcagtaactccacatttcaccttttcttttcagttctttaattgagaagacaatttcttcatttttag

SEQ ID NO: 347 - DNA, 2603 bp, Homo sapiens
gtatgtatgctttttaaaacaaaatagtttgaaaacttgcattgttttccaaaggtcagaaaatagtttaaggatgaaaataaagtttgaaattttagacatttgaaaagaaacaaaaacttttttgctttacgtgtgtgggactgctgagcatgctaggttcctccaaagatccacattatctcaaggtagaatgaatccttaggccacagagagctttacaggcctgggaacacagcctggacctgttgcatagcctccttttacctgtgatctgcttcaaaatatagttaaacttctggtctccaagtcagagtttgctaaagacctctttaggctgccacctctgtaattttcatgtcatataacacgaatggggctcccaggtaggaagggagttttggttgagttaagtgacttacgtaatacaagtaattgtgcttgtattacttcctgagccttctcagtcccctagcaatcttgggcagtcatacagcttggagaactgatgacttggagaatttgttcccagcctgttcattcctggtaatgagtaatccctctcaaatcccaaaggacagggagcaggctgtaattctgaagagtggatattcttgatgccacagcagtttccataccagccttcaccaaaaggaaatatgccagacagggaatgccgaagagtaaactttctacaagtgatagtatctaggatccattgtgtcatgaatcaagtttataaactagatttcagtttccttagacctgcactgtttagtatagtagccaattagccacatatgattatttaaatatatcatttaaaatgaaataccattaaatttaagattcattcctcagttacactaaccacctttcaagtgctcaatacctacatctggctagtggctaccatactggatagcccagataaggaataatcctatcattgcagaaagttttcttggtcagtgcagaactagactattttgcgatatcagtgctaaatataatttcctgatgataacattttcatattataagttgtaaataccatgaaaatccatccctaagtaatagattatcagtcagttgactctccactaaacagtattataacgatcagctgaagaaagttttcagctattgcccaatgcataaaatattttgggagctcaaattttttaaaaatctattttaatccccaaatagcagtataatagttaatcatctcctgaacaggttggttcccagaaaccaaaatcattttccactcagtgttgttgtagatctcaattaaagaactaacccaggatacctgaactaaagagaggtggcactgagtttccatagaacttcaaaacaattggttgatttcacttaaaaaaaaaaaaaaaagtcattcaatatacagaaaattactcccctggtcagtactgttagccccagataatctgaaaaaatttgttcttaaaaaaaaaaaacaatttggaggccaggcatggtggctcatgcctgtaatcccagcacattgagaggtcgagttgtgtgcatcacttgagcccaggagtttgagaccagcctggacaacatggtgaaacactatctctacaaaaaaatacaaaaattagccaggcatggtggtgcatgcctgtagtcccagctactcaggaggctgaggcgggagggaggcagatgttgcagtgagctgagattgtgccactgcactccagcctgggtgatggagtgagaccctgtctcaaaaaacaaacaaacaaaaaaactcagcaagcatctcaacctttaagcaaccttaaagtcattaattgggaaatagtgagatgtttggcatggaatcttcagaagaggaaagagttgaatggaaacagctccagctgcctagttgtagttgacagacaactttataagctctagtcaaccctattgactaagcttctgaaccactagcatagttctagggtcaggcggatgcctactgtgggcaggaaagtgatgcatgcatgtgtgggagcagtgtcttaatgtctgaaatagtagccatgagctacatgtggctatggagcacttgaaatgtgggagtccaaattatcatgtgctgtgagtgtaaaataatatgtttctaagaccgtgtgtgaaagaatataaaatatctcattaaaaaatgtttatattgagtacatgttgaaataattttatatttgtgacacattgtgttaaataaaatattaaaatttacatttttttttactttgtaatgtggataccaaaaattttaaattacttatgtggcttgcattatatttctattggacagcactggtccaaactattctagccttccctgcatcttcagccttatgcacgaggtaaaattagccattttgtcaacagtttttgcatttggttttctatcatgttctgaccaatttttgaacaactctttggaccagctctgtagccgatttgatttaaagcatataggatagcaggaaatcccagggtgatggggctctggcttagttttccatatttaggcctctaataggcagtcagtaactccacatttcaccttttcttttcag

SEQ ID NO: 348 - DNA, 1268 bp, Homo sapiens
gtggcgtggcgacggagtcgcgcgagggacacgccgcgttgtgggttctcggcctgaggtgcgagagaagcggtgaccgcggccctggctgctcggacccgggaacatgatggtcgctggagcagaaggcgctgagaagggaccacggcggcgctgggtcgtgcgagccagtagcgggctgaaacgtagaggccagaaccaggtctcagggggcactaaaggcggtcggaggtaatccccacaccgcttcctcctggaagtcaggctggccgggagctcccgtatccaggacggttggtcgcctctggcctggcagggatcctagtgtctcgggacctcccggtgacgcgcctgcctcccctgctgcaccataggcccgggagtacggcgtccccacagcttggaccggcaggggctcgtgaaatgtttgtcaagtggataaatgaccatggccgtggtctccgcgggaggtgaggaaactgaaagccaccgaggaaaaggggggcgctccttaagaagtgccgcggtcacgtgtacgtttcaaaagaatggcgtgactgagtagggaggggaccgcggagaccctcagaccctggactgtaaggagatgaggggccgtgaaggggaacccaggaaactgagtcctgaaagcaaggaggaacttccagaatgaagggcgccgacactccttcctgcctttgctcaagcggttccttcaccccgatcaagttccttcccatttctccatctgggggatcctgaacgtgcacatcctcagagaagccctcctggggtctccaattctagtttattgccccctcctatcgatcccccagcgcgctcatcgggcctgtggacaaggacaggtttgaagagaggattccctggatcgcggaagggctgcaggaatggcacagccccttccgaggatgccaaaggagcccgggcaaaggaaagtggccgtgcccgggcctgcctaccactagatccccacccacctatgactgctcagtcccgctctcctaccacacccacctttcccggcccaagccagcgcaccccgctgactccctgcccagtccaaactccaaggctgggcaaggcactgatccactgctggacagacccggggcagcctctgggtgaacagcagcgtgtccgccggcagcgaaccgagaccagcgagccgaccatgcggctgcacagacttcgtgcgcggctgagcgcggtggcctgtgggcttctgctgcttcttgtccggggccagg

SEQ ID NO: 349 - DNA, 268 bp, Homo sapiens
atgactgctcagtcccgctctcctaccacacccacctttcccggcccaagccagcgcaccccgctgactccctgcccagtccaaactccaaggctgggcaaggcactgatccactgctggacagacccggggcagcctctgggtgaacagcagcgtgtccgccggcagcgaaccgagaccagcgagccgaccatgcggctgcacagacttcgtgcgcggctgagcgcggtggcctgtgggcttctgctgcttcttgtccggggccagg

SEQ ID NO: 350 - DNA, 196 bp, Homo sapiens
tgcccagtccaaactccaaggctgggcaaggcactgatccactgctggacagacccggggcagcctctgggtgaacagcagcgtgtccgccggcagcgaaccgagaccagcgagccgaccatgcggctgcacagacttcgtgcgcggctgagcgcggtggcctgtgggcttctgctgcttcttgtccggggccagg

SEQ ID NO: 351 - DNA, 2325 bp, Homo sapiens
gtgaggctccctcggaggggcgacagggaccgggctcagatctgccaaatgctgcggaggcagaacctgacagtgcgggagggcaggcgcctgggaggtaggagctggtggagatgacagcgtggaactcgtgagccccacgcaacgcctccccgccgcccaaggtgggctcctagaagcacagaaagggtcgggctgggggacaccacggcaaggaaccagcggagtacaggggccccaggagcgccgggacatgccaggccgggtaggcagcctggggtcggagtgggtgagggattggggtgtggggattcagtccatttccctcttatgattgtggctgtagcgggtgctgccggccggtaataacagtaatagcttctggcagcatctggctctcagtgtgtggcgtccttggccaggggggatgccctgagccctccaaaggggcctcagacaaggatagtggtccttggggaacagaagcccccaggcgccaaatcctaaagcagatctaagaggccacagtggctgggtgcgattggctcactcctttaatcccaccactttagaaggccaagggagagtatcgcttgtgcccaggagttggaggccagcctggacaacatagtgagactcggagtgtacaaaaaattgaaagaaattagtgggctgtggtggtctgtgacctgtagtcccagctacttgggaggctgaggtgggagatcactttagtaggggaggttgaggctgcagtgagccttcatcccactactgcactccagcctgggtgaaaaagcaaaaatctgtctccagaaacaagaaccaaagagctcgtggtgtccctcatgccatttacctcatcctgggcaagggcacaacttggcttccagggcaaaggtgaaggctctgtgtgcctgccaggcttctccaggcccttatcagaagctgggggagtgtttcggcctttggtcctctcacccgaaactctcctaagtgtatgatctgtctcttccaacccttccccaatttaatttgcgcaggtggagtccatactccccccgccccatggtgcactgctgcagggcttcctcccgtgcctgcccttgaccacattctagagttcaccaggagcccagcaggaagatctgcctggcctcacagatggctaccttttaaaatattttgggccaggcacagtggctcacacctgttatcccagcactttgagaggcagagatgggaggatcacttgaggctaggagttagagaccagcttgggcaacaagacttgtctctaccaaaaaaaaaaaaaaaaaaagtcaagcatggtggcagacagctgtactccaagctactcaggaggctgtggcgggaggatctcaagcccaggaggtggaggctgcagtgagctgttatcatattactgcattccagcctgggcaacagatggcgaccttgtctgacaaatatatatgtatacaaaattttgggttggacccacattcagaaaaaataattgacaagccataggagggtacaggtgatgtgtgccatcctctttttacccaaccagtcctggcttctcctcaggggccatcaaagtccccatggcccacactggaaactgcttgttgacaccgcagtacacacagtgcccagcagtttacacaagaatagatgtgtgcacttgtccttgattttcatctaaacagtcataaactcacccactttctggagccaggcttttctacagctgggactacaggcatgcaccaccacaccccgccaatttatttcctgatttttttgcagagacagagtcccactatggtccccaggccagtcactgtgctttttatatcccagccacagccatacttttctcttgcacctcttttcaccaacatcactcatggtttggatgatgctttctttacatgatttcttgccactttggacatgacatccctgaggacaagaaacttgcctgcccaattcccaccatcatcctactgtcacatgacctggcacacagttgaaggacactctagtcccatcaagggcatgtgaccctttgtttgaaggtcctagggctgaatgatgatgcctggccccaaggagcctcagcctggtgggatggagacaggcccaggaagccagagcgggaagggagtgttacaggcaggaagtttgtaaagcccatgtttacagatcagagtcccttgagctaagatgaggatggcaaggaagcagcaataccaacagttgggagggcagtcgattggtcaaacccaaccgtgatgtctgtctctctgcccacag

SEQ ID NO: 352 - DNA, 1432 bp, Homo sapiens
gtggcgtggcgacggagtcgcgcgagggacacgccgcgttgtgggttctcggcctgaggtgcgagagaagcggtgaccgcggccctggctgctcggacccgggaacatgatggtcgctggagcagaaggcgctgagaagggaccacggcggcgctgggtcgtgcgagccagtagcgggctgaaacgtagaggccagaaccaggtctcagggggcactaaaggcggtcggaggtaatccccacaccgcttcctcctggaagtcaggctggccgggagctcccgtatccaggacggttggtcgcctctggcctggcagggatcctagtgtctcgggacctcccggtgacgcgcctgcctcccctgctgcaccataggcccgggagtacggcgtccccacagcttggaccggcaggggctcgtgaaatgtttgtcaagtggataaatgaccatggccgtggtctccgcgggaggtgaggaaactgaaagccaccgaggaaaaggggggcgctccttaagaagtgccgcggtcacgtgtacgtttcaaaagaatggcgtgactgagtagggaggggaccgcggagaccctcagaccctggactgtaaggagatgaggggccgtgaaggggaacccaggaaactgagtcctgaaagcaaggaggaacttccagaatgaagggcgccgacactccttcctgcctttgctcaagcggttccttcaccccgatcaagttccttcccatttctccatctgggggatcctgaacgtgcacatcctcagagaagccctcctggggtctccaattctagtttattgccccctcctatcgatcccccagcgcgctcatcgggcctgtggacaaggacaggtttgaagagaggattccctggatcgcggaagggctgcaggaatggcacagccccttccgaggatgccaaaggagcccgggcaaaggaaagtggccgtgcccgggcctgcctaccactagatccccacccacctatgactgctcagtcccgctctcctaccacacccacctttcccggcccaagccagcgcaccccgctgactccctgcccagtccaaactccaaggctgggcaaggcactgatccactgctggacagacccggggcagcctctgggtgaacagcagcgtgtccgccggcagcgaaccgagaccagcgagccgaccatgcggctgcacagacttcgtgcgcggctgagcgcggtggcctgtgggcttctgctgcttcttgtccggggccagggtgaggctccctcggaggggcgacagggaccgggctcagatctgccaaatgctgcggaggcagaacctgacagtgcgggagggcaggcgcctgggaggtaggagctggtggagatgacagcgtggaactcgtgagccccacgcaacgcctccccgccgcccaag

SEQ ID NO: 353 - DNA, 1533 bp, Homo sapiens
gtggcgtggcgacggagtcgcgcgagggacacgccgcgttgtgggttctcggcctgaggtgcgagagaagcggtgaccgcggccctggctgctcggacccgggaacatgatggtcgctggagcagaaggcgctgagaagggaccacggcggcgctgggtcgtgcgagccagtagcgggctgaaacgtagaggccagaaccaggtctcagggggcactaaaggcggtcggaggtaatccccacaccgcttcctcctggaagtcaggctggccgggagctcccgtatccaggacggttggtcgcctctggcctggcagggatcctagtgtctcgggacctcccggtgacgcgcctgcctcccctgctgcaccataggcccgggagtacggcgtccccacagcttggaccggcaggggctcgtgaaatgtttgtcaagtggataaatgaccatggccgtggtctccgcgggaggtgaggaaactgaaagccaccgaggaaaaggggggcgctccttaagaagtgccgcggtcacgtgtacgtttcaaaagaatggcgtgactgagtagggaggggaccgcggagaccctcagaccctggactgtaaggagatgaggggccgtgaaggggaacccaggaaactgagtcctgaaagcaaggaggaacttccagaatgaagggcgccgacactccttcctgcctttgctcaagcggttccttcaccccgatcaagttccttcccatttctccatctgggggatcctgaacgtgcacatcctcagagaagccctcctggggtctccaattctagtttattgccccctcctatcgatcccccagcgcgctcatcgggcctgtggacaaggacaggtttgaagagaggattccctggatcgcggaagggctgcaggaatggcacagccccttccgaggatgccaaaggagcccgggcaaaggaaagtggccgtgcccgggcctgcctaccactagatccccacccacctatgactgctcagtcccgctctcctaccacacccacctttcccggcccaagccagcgcaccccgctgactccctgcccagtccaaactccaaggctgggcaaggcactgatccactgctggacagacccggggcagcctctgggtgaacagcagcgtgtccgccggcagcgaaccgagaccagcgagccgaccatgcggctgcacagacttcgtgcgcggctgagcgcggtggcctgtgggcttctgctgcttcttgtccggggccagggtgaggctccctcggaggggcgacagggaccgggctcagatctgccaaatgctgcggaggcagaacctgacagtgcgggagggcaggcgcctgggaggtaggagctggtggagatgacagcgtggaactcgtgagccccacgcaacgcctccccgccgcccaaggtgggctcctagaagcacagaaagggtcgggctgggggacaccacggcaaggaaccagcggagtacaggggccccaggagcgccgggacatgccaggccgg

SEQ ID NO: 354 - DNA, 432 bp, Homo sapiens
atgactgctcagtcccgctctcctaccacacccacctttcccggcccaagccagcgcaccccgctgactccctgcccagtccaaactccaaggctgggcaaggcactgatccactgctggacagacccggggcagcctctgggtgaacagcagcgtgtccgccggcagcgaaccgagaccagcgagccgaccatgcggctgcacagacttcgtgcgcggctgagcgcggtggcctgtgggcttctgctgcttcttgtccggggccagggtgaggctccctcggaggggcgacagggaccgggctcagatctgccaaatgctgcggaggcagaacctgacagtgcgggagggcaggcgcctgggaggtaggagctggtggagatgacagcgtggaactcgtgagccccacgcaacgcctccccgccgcccaag

SEQ ID NO: 355 - DNA, 533 bp, Homo sapiens
atgactgctcagtcccgctctcctaccacacccacctttcccggcccaagccagcgcaccccgctgactccctgcccagtccaaactccaaggctgggcaaggcactgatccactgctggacagacccggggcagcctctgggtgaacagcagcgtgtccgccggcagcgaaccgagaccagcgagccgaccatgcggctgcacagacttcgtgcgcggctgagcgcggtggcctgtgggcttctgctgcttcttgtccggggccagggtgaggctccctcggaggggcgacagggaccgggctcagatctgccaaatgctgcggaggcagaacctgacagtgcgggagggcaggcgcctgggaggtaggagctggtggagatgacagcgtggaactcgtgagccccacgcaacgcctccccgccgcccaaggtgggctcctagaagcacagaaagggtcgggctgggggacaccacggcaaggaaccagcggagtacaggggccccaggagcgccgggacatgccaggccgg

SEQ ID NO: 356 - DNA, 360 bp, Homo sapiens
tgcccagtccaaactccaaggctgggcaaggcactgatccactgctggacagacccggggcagcctctgggtgaacagcagcgtgtccgccggcagcgaaccgagaccagcgagccgaccatgcggctgcacagacttcgtgcgcggctgagcgcggtggcctgtgggcttctgctgcttcttgtccggggccagggtgaggctccctcggaggggcgacagggaccgggctcagatctgccaaatgctgcggaggcagaacctgacagtgcgggagggcaggcgcctgggaggtaggagctggtggagatgacagcgtggaactcgtgagccccacgcaacgcctccccgccgcccaag

SEQ ID NO: 357 - DNA, 461 bp, Homo sapiens
tgcccagtccaaactccaaggctgggcaaggcactgatccactgctggacagacccggggcagcctctgggtgaacagcagcgtgtccgccggcagcgaaccgagaccagcgagccgaccatgcggctgcacagacttcgtgcgcggctgagcgcggtggcctgtgggcttctgctgcttcttgtccggggccagggtgaggctccctcggaggggcgacagggaccgggctcagatctgccaaatgctgcggaggcagaacctgacagtgcgggagggcaggcgcctgggaggtaggagctggtggagatgacagcgtggaactcgtgagccccacgcaacgcctccccgccgcccaaggtgggctcctagaagcacagaaagggtcgggctgggggacaccacggcaaggaaccagcggagtacaggggccccaggagcgccgggacatgccaggccgg

SEQ ID NO: 358 - DNA, 2161 bp, Homo sapiens
gtgggctcctagaagcacagaaagggtcgggctgggggacaccacggcaaggaaccagcggagtacaggggccccaggagcgccgggacatgccaggccgggtaggcagcctggggtcggagtgggtgagggattggggtgtggggattcagtccatttccctcttatgattgtggctgtagcgggtgctgccggccggtaataacagtaatagcttctggcagcatctggctctcagtgtgtggcgtccttggccaggggggatgccctgagccctccaaaggggcctcagacaaggatagtggtccttggggaacagaagcccccaggcgccaaatcctaaagcagatctaagaggccacagtggctgggtgcgattggctcactcctttaatcccaccactttagaaggccaagggagagtatcgcttgtgcccaggagttggaggccagcctggacaacatagtgagactcggagtgtacaaaaaattgaaagaaattagtgggctgtggtggtctgtgacctgtagtcccagctacttgggaggctgaggtgggagatcactttagtaggggaggttgaggctgcagtgagccttcatcccactactgcactccagcctgggtgaaaaagcaaaaatctgtctccagaaacaagaaccaaagagctcgtggtgtccctcatgccatttacctcatcctgggcaagggcacaacttggcttccagggcaaaggtgaaggctctgtgtgcctgccaggcttctccaggcccttatcagaagctgggggagtgtttcggcctttggtcctctcacccgaaactctcctaagtgtatgatctgtctcttccaacccttccccaatttaatttgcgcaggtggagtccatactccccccgccccatggtgcactgctgcagggcttcctcccgtgcctgcccttgaccacattctagagttcaccaggagcccagcaggaagatctgcctggcctcacagatggctaccttttaaaatattttgggccaggcacagtggctcacacctgttatcccagcactttgagaggcagagatgggaggatcacttgaggctaggagttagagaccagcttgggcaacaagacttgtctctaccaaaaaaaaaaaaaaaaaaagtcaagcatggtggcagacagctgtactccaagctactcaggaggctgtggcgggaggatctcaagcccaggaggtggaggctgcagtgagctgttatcatattactgcattccagcctgggcaacagatggcgaccttgtctgacaaatatatatgtatacaaaattttgggttggacccacattcagaaaaaataattgacaagccataggagggtacaggtgatgtgtgccatcctctttttacccaaccagtcctggcttctcctcaggggccatcaaagtccccatggcccacactggaaactgcttgttgacaccgcagtacacacagtgcccagcagtttacacaagaatagatgtgtgcacttgtccttgattttcatctaaacagtcataaactcacccactttctggagccaggcttttctacagctgggactacaggcatgcaccaccacaccccgccaatttatttcctgatttttttgcagagacagagtcccactatggtccccaggccagtcactgtgctttttatatcccagccacagccatacttttctcttgcacctcttttcaccaacatcactcatggtttggatgatgctttctttacatgatttcttgccactttggacatgacatccctgaggacaagaaacttgcctgcccaattcccaccatcatcctactgtcacatgacctggcacacagttgaaggacactctagtcccatcaagggcatgtgaccctttgtttgaaggtcctagggctgaatgatgatgcctggccccaaggagcctcagcctggtgggatggagacaggcccaggaagccagagcgggaagggagtgttacaggcaggaagtttgtaaagcccatgtttacagatcagagtcccttgagctaagatgaggatggcaaggaagcagcaataccaacagttgggagggcagtcgattggtcaaacccaaccgtgatgtctgtctctctgcccacag

SEQ ID NO: 359 - DNA, 2060 bp, Homo sapiens
gtaggcagcctggggtcggagtgggtgagggattggggtgtggggattcagtccatttccctcttatgattgtggctgtagcgggtgctgccggccggtaataacagtaatagcttctggcagcatctggctctcagtgtgtggcgtccttggccaggggggatgccctgagccctccaaaggggcctcagacaaggatagtggtccttggggaacagaagcccccaggcgccaaatcctaaagcagatctaagaggccacagtggctgggtgcgattggctcactcctttaatcccaccactttagaaggccaagggagagtatcgcttgtgcccaggagttggaggccagcctggacaacatagtgagactcggagtgtacaaaaaattgaaagaaattagtgggctgtggtggtctgtgacctgtagtcccagctacttgggaggctgaggtgggagatcactttagtaggggaggttgaggctgcagtgagccttcatcccactactgcactccagcctgggtgaaaaagcaaaaatctgtctccagaaacaagaaccaaagagctcgtggtgtccctcatgccatttacctcatcctgggcaagggcacaacttggcttccagggcaaaggtgaaggctctgtgtgcctgccaggcttctccaggcccttatcagaagctgggggagtgtttcggcctttggtcctctcacccgaaactctcctaagtgtatgatctgtctcttccaacccttccccaatttaatttgcgcaggtggagtccatactccccccgccccatggtgcactgctgcagggcttcctcccgtgcctgcccttgaccacattctagagttcaccaggagcccagcaggaagatctgcctggcctcacagatggctaccttttaaaatattttgggccaggcacagtggctcacacctgttatcccagcactttgagaggcagagatgggaggatcacttgaggctaggagttagagaccagcttgggcaacaagacttgtctctaccaaaaaaaaaaaaaaaaaaagtcaagcatggtggcagacagctgtactccaagctactcaggaggctgtggcgggaggatctcaagcccaggaggtggaggctgcagtgagctgttatcatattactgcattccagcctgggcaacagatggcgaccttgtctgacaaatatatatgtatacaaaattttgggttggacccacattcagaaaaaataattgacaagccataggagggtacaggtgatgtgtgccatcctctttttacccaaccagtcctggcttctcctcaggggccatcaaagtccccatggcccacactggaaactgcttgttgacaccgcagtacacacagtgcccagcagtttacacaagaatagatgtgtgcacttgtccttgattttcatctaaacagtcataaactcacccactttctggagccaggcttttctacagctgggactacaggcatgcaccaccacaccccgccaatttatttcctgatttttttgcagagacagagtcccactatggtccccaggccagtcactgtgctttttatatcccagccacagccatacttttctcttgcacctcttttcaccaacatcactcatggtttggatgatgctttctttacatgatttcttgccactttggacatgacatccctgaggacaagaaacttgcctgcccaattcccaccatcatcctactgtcacatgacctggcacacagttgaaggacactctagtcccatcaagggcatgtgaccctttgtttgaaggtcctagggctgaatgatgatgcctggccccaaggagcctcagcctggtgggatggagacaggcccaggaagccagagcgggaagggagtgttacaggcaggaagtttgtaaagcccatgtttacagatcagagtcccttgagctaagatgaggatggcaaggaagcagcaataccaacagttgggagggcagtcgattggtcaaacccaaccgtgatgtctgtctctctgcccacag

SEQ ID NO: 360 - DNA, 71 bp, Homo sapiens
agctcaacctgggtgacaagtgtctggacggcgtgctgaacaacaacagctacgagtcagacatcctgaag

SEQ ID NO: 361 - DNA, 173 bp, Homo sapiens
aatctgtaatgaaaagaaatatgtttatcctcagtgtcgggcagacagtgctttcctgcgacatcattataaacaggtaacattgccccttcatctcggcagagctcaacctgggtgacaagtgtctggacggcgtgctgaacaacaacagctacgagtcagacatcctgaag

SEQ ID NO: 362 - DNA, 485 bp, Homo sapiens
gtaatactggctcttcaggccccagttgctttgacctttgcatgttctcttggtgaacttgagggcaggggatggtggggtccatagcctgatgtttatagggatgaggccactgttggtcatcaaatgatacctattcctggctggactgcagaggtgtgtcaaattcgtgttagctcaaaatcaagccttaacagaattattaggggagatactcccaggacagaatccttgcagcggggttctgctgttacgataccaagaccaggtgctggggagactcggagagctgatctttttaaggagggagtggaatggaaatcatttctgcttgtcctctgtttaaaattgagttttatcattgaacttcttattctttctagaatctgtaatgaaaagaaatatgtttatcctcagtgtcgggcagacagtgctttcctgcgacatcattataaacaggtaacattgccccttcatctcggcag

SEQ ID NO: 363 - DNA, 383 bp, Homo sapiens
gtaatactggctcttcaggccccagttgctttgacctttgcatgttctcttggtgaacttgagggcaggggatggtggggtccatagcctgatgtttatagggatgaggccactgttggtcatcaaatgatacctattcctggctggactgcagaggtgtgtcaaattcgtgttagctcaaaatcaagccttaacagaattattaggggagatactcccaggacagaatccttgcagcggggttctgctgttacgataccaagaccaggtgctggggagactcggagagctgatctttttaaggagggagtggaatggaaatcatttctgcttgtcctctgtttaaaattgagttttatcattgaacttcttattctttctag

SEQ ID NO: 364 - DNA, 60 bp, Homo sapiens
atggaattcatacggacagcagcacctaccggattgtgcctgggggctacgctgtggtcg

SEQ ID NO: 365 - DNA, 111 bp, Homo sapiens
gagcagcatttgggcgtctggtgggtgaaagcatggctgcctggttcccagatggaattcatacggacagcagcacctaccggattgtgcctgggggctacgctgtggtcg

SEQ ID NO: 366 - DNA, 167 bp, Homo sapiens
tgccccctgccctccccctccactgcctctttctcttcccacccccctccctgaaggagcagcatttgggcgtctggtgggtgaaagcatggctgcctggttcccagatggaattcatacggacagcagcacctaccggattgtgcctgggggctacgctgtggtcg

SEQ ID NO: 367 - DNA, 296 bp, Homo sapiens
gtgagttctcagctgcctgctcacccagcctgcaccttcctcagcctctggccacccccccagccaaccctctgcccaagagcgggtttttggtccagccctagcccgaaccctgaccccacagggctgtgccctacactgaatgacccgttggcccctccctcaccctctgaccctctctcttcctagtgccccctgccctccccctccactgcctctttctcttcccacccccctccctgaaggagcagcatttgggcgtctggtgggtgaaagcatggctgcctggttcccag

SEQ ID NO: 368 - DNA, 245 bp, Homo sapiens
gtgagttctcagctgcctgctcacccagcctgcaccttcctcagcctctggccacccccccagccaaccctctgcccaagagcgggtttttggtccagccctagcccgaaccctgaccccacagggctgtgccctacactgaatgacccgttggcccctccctcaccctctgaccctctctcttcctagtgccccctgccctccccctccactgcctctttctcttcccacccccctccctgaag

SEQ ID NO: 369 - DNA, 189 bp, Homo sapiens
gtgagttctcagctgcctgctcacccagcctgcaccttcctcagcctctggccacccccccagccaaccctctgcccaagagcgggtttttggtccagccctagcccgaaccctgaccccacagggctgtgccctacactgaatgacccgttggcccctccctcaccctctgaccctctctcttcctag

SEQ ID NO: 370 - DNA, 101 bp, Homo sapiens
aagcaggaccggattgagggcttgaagcggcacatcgagaagcaccgctaccacgtgcgcatgctagagaccatcctgcgcatgctggacaatgactccat

SEQ ID NO: 371 - DNA, 121 bp, Homo sapiens
aagcaggaccggattgagggcttgaagcggcacatcgagaagcaccgctaccacgtgcgcatgctagagaccatcctgcgcatgctggacaatgactccatcctcgttgacgccatccgca

SEQ ID NO: 372 - DNA, 220 bp, Homo sapiens
aagcaggaccggattgagggcttgaagcggcacatcgagaagcaccgctaccacgtgcgcatgctagagaccatcctgcgcatgctggacaatgactccatcctcgttgacgccatccgcaagatcaaggacgacgttgagtactatgttgactcatcccaggaccccgacttcgaggagaacgagtttctctacgatgacctggacctcgaggacattc

SEQ ID NO: 373 - DNA, 157 bp, Homo sapiens
gaggggccaagcaggtgctctgcagcccctgagcctggccctgggctcgccagcagaagcaggaccggattgagggcttgaagcggcacatcgagaagcaccgctaccacgtgcgcatgctagagaccatcctgcgcatgctggacaatgactccat

SEQ ID NO: 374 - DNA, 177 bp, Homo sapiens
gaggggccaagcaggtgctctgcagcccctgagcctggccctgggctcgccagcagaagcaggaccggattgagggcttgaagcggcacatcgagaagcaccgctaccacgtgcgcatgctagagaccatcctgcgcatgctggacaatgactccatcctcgttgacgccatccgca

SEQ ID NO: 375 - DNA, 276 bp, Homo sapiens
gaggggccaagcaggtgctctgcagcccctgagcctggccctgggctcgccagcagaagcaggaccggattgagggcttgaagcggcacatcgagaagcaccgctaccacgtgcgcatgctagagaccatcctgcgcatgctggacaatgactccatcctcgttgacgccatccgcaagatcaaggacgacgttgagtactatgttgactcatcccaggaccccgacttcgaggagaacgagtttctctacgatgacctggacctcgaggacattc

SEQ ID NO: 376 - DNA, 1265 bp, Homo sapiens
gtgagtgagggagacccgacacctttgggatggggatgggcatgggaatgggctggccagcaggaggccagtcatttatgctcctgggagttggggcctggattcctcaggcggacagggccaacagccgggattagggatttgagagacaggattgggagggcttagcagctgcacgcgtggggcaggaaggaggtcagacagaatctcagggtcccctgggtgtctgggtagaccgtggggcctttgtgaagaggagcgacttgggggaaggtgagtgcaggttgagcttgggccacagagtaaaagtgagacctgaaggacacccatggcaagaggcctcctggcacccagagggccctggtcctagggagagcacagtgggtagagacaaggcagaacatggagaaggcagagaaccaggcctgaaggaagacaggagtctgggacaaagctggatgttggggtcccaggttctaaaatccgggattgtggggtatgagttcaaagggatacaaactgtacagacttgctgaaaccagaaagacagggaggggagagccgggtcctcagggaagctgtgggtgggagagggtcaggaagtggaagatgacagggttgggtgtcagactctgaggggtttgggaaccaggggctttcggggagatgatgggtccttgaacagagcagagatttggaaccaaggctaagatgttaaatcctaaaggggccttgaggggagggcaggagcgaggcttaggaatctgggctctctcagggataaatgggtagggttgggggcctagtgatgacagatatcacaattctaaacagcaagctcctcacaaatgggggttatcattgttactgctggagcaggtcggagggtatctgtatgccagaggcagtcacagtggtgggcgggctcagttgagaaatctgggctgtcaggtgaggtgcagatggaggccaagtcgtgggatggcacaaggacctctgggtcttttagaggtttccaaggactcctggagccagaaaggtgtggggagaggagggagcagtgggatcccaagatgtcaaggctaagattggtccccacagggctcagagggtgggtggaccccatactgccccaccccgaaggggatggcgtggaggctttgggtctccacaggggtcagggactgaggacaggttctgtgggggcaggaggggccaagcaggtgctctgcagcccctgagcctggccctgggctcgccagcag

SEQ ID NO: 377 - DNA, 1209 bp, Homo sapiens
gtgagtgagggagacccgacacctttgggatggggatgggcatgggaatgggctggccagcaggaggccagtcatttatgctcctgggagttggggcctggattcctcaggcggacagggccaacagccgggattagggatttgagagacaggattgggagggcttagcagctgcacgcgtggggcaggaaggaggtcagacagaatctcagggtcccctgggtgtctgggtagaccgtggggcctttgtgaagaggagcgacttgggggaaggtgagtgcaggttgagcttgggccacagagtaaaagtgagacctgaaggacacccatggcaagaggcctcctggcacccagagggccctggtcctagggagagcacagtgggtagagacaaggcagaacatggagaaggcagagaaccaggcctgaaggaagacaggagtctgggacaaagctggatgttggggtcccaggttctaaaatccgggattgtggggtatgagttcaaagggatacaaactgtacagacttgctgaaaccagaaagacagggaggggagagccgggtcctcagggaagctgtgggtgggagagggtcaggaagtggaagatgacagggttgggtgtcagactctgaggggtttgggaaccaggggctttcggggagatgatgggtccttgaacagagcagagatttggaaccaaggctaagatgttaaatcctaaaggggccttgaggggagggcaggagcgaggcttaggaatctgggctctctcagggataaatgggtagggttgggggcctagtgatgacagatatcacaattctaaacagcaagctcctcacaaatgggggttatcattgttactgctggagcaggtcggagggtatctgtatgccagaggcagtcacagtggtgggcgggctcagttgagaaatctgggctgtcaggtgaggtgcagatggaggccaagtcgtgggatggcacaaggacctctgggtcttttagaggtttccaaggactcctggagccagaaaggtgtggggagaggagggagcagtgggatcccaagatgtcaaggctaagattggtccccacagggctcagagggtgggtggaccccatactgccccaccccgaaggggatggcgtggaggctttgggtctccacaggggtcagggactgaggacaggttctgtgggggcag

SEQ ID NO: 378 - DNA, 117 bp, Homo sapiens
cattgtgagcgccatattcagagcctgcagacccgagtgttagagctacagcaacaattagccgtggctgtggctgccgaccgcaagaaagataccatgattgaacaactggacaag

SEQ ID NO: 379 - DNA, 245 bp, Homo sapiens
acctattctgttcttgggacccaagcttcttggctccagcccactcccccactagaggagctggaaagtttggtgctgtggtcataccaaagatgggcaacacccagactcctcacccttttccccagcattgtgagcgccatattcagagcctgcagacccgagtgttagagctacagcaacaattagccgtggctgtggctgccgaccgcaagaaagataccatgattgaacaactggacaag

SEQ ID NO: 380 - DNA, 1220 bp, Homo sapiens
gtaagatgcaaacgcttcctttcgaaagcagcaaagattagaaagaggggacccaagtgttgaaaagggctgagggggcctggcgtggtggctcacgcctgtaatcacagcactttgggaggctgaggcaggcggatcacgaggtcaggagatcgagaccatcctggctaacacggtgaaacccgtctctactaaaaatagaaaaaattagccgggcatggtggtgggtgcctgtagtcccagctactcgggaggctgaggcaggagaatggcgtgaacctgggaggcggagcttgcagtgagccgagatcatgccgctgcactccagcctgggcgacagagcgagactccgtctcaaaaaaaaaaaactaaaaaagaaaagggctgagggttaagagcctgaaagctgggacttaaatgtttttctgaggagggcttttttgaccattccatctaatatggcaccacctcctttccaagtagtcagatcgccttcttatttctttcatgtagcttatcgttctgatatatcttgtttttttctcctctctaaaatttgagggtccgtatcttgtttgtcttagtactggctgcctaaggtctagaatatacataacacagaaacactctgtgtttgtcgaatggacacaaactctgctagcttgtgcacaggatttacagctactggtgatatactgagctttatctctgtgagcctctgccttagtgtctgaaggggacagagaaatagacaaaggagaggaaaagtcaaaatcactggttgccatttttggaagcctctctttctccatgttaaaccccttggcatgaatgaaaggctttcccctttatccttgctgtgtttattcattgtgtccaatgagcttctgaaggtaggagtaactttgcacattttgctgtgtgggctgctgcatctctgccaaaaggtttatgggatttttactcaggagatccaggaaaaggaggagcctggaatctaagcacttatctcctgaaaaggtacagaaacatgttggagatcttgagcctcaaggtgcttgcttcagaattttcctgattctccctctccagacctattctgttcttgggacccaagcttcttggctccagcccactcccccactagaggagctggaaagtttggtgctgtggtcataccaaagatgggcaacacccagactcctcacccttttccccag

SEQ ID NO: 381 - DNA, 1092 bp, Homo sapiens
gtaagatgcaaacgcttcctttcgaaagcagcaaagattagaaagaggggacccaagtgttgaaaagggctgagggggcctggcgtggtggctcacgcctgtaatcacagcactttgggaggctgaggcaggcggatcacgaggtcaggagatcgagaccatcctggctaacacggtgaaacccgtctctactaaaaatagaaaaaattagccgggcatggtggtgggtgcctgtagtcccagctactcgggaggctgaggcaggagaatggcgtgaacctgggaggcggagcttgcagtgagccgagatcatgccgctgcactccagcctgggcgacagagcgagactccgtctcaaaaaaaaaaaactaaaaaagaaaagggctgagggttaagagcctgaaagctgggacttaaatgtttttctgaggagggcttttttgaccattccatctaatatggcaccacctcctttccaagtagtcagatcgccttcttatttctttcatgtagcttatcgttctgatatatcttgtttttttctcctctctaaaatttgagggtccgtatcttgtttgtcttagtactggctgcctaaggtctagaatatacataacacagaaacactctgtgtttgtcgaatggacacaaactctgctagcttgtgcacaggatttacagctactggtgatatactgagctttatctctgtgagcctctgccttagtgtctgaaggggacagagaaatagacaaaggagaggaaaagtcaaaatcactggttgccatttttggaagcctctctttctccatgttaaaccccttggcatgaatgaaaggctttcccctttatccttgctgtgtttattcattgtgtccaatgagcttctgaaggtaggagtaactttgcacattttgctgtgtgggctgctgcatctctgccaaaaggtttatgggatttttactcaggagatccaggaaaaggaggagcctggaatctaagcacttatctcctgaaaaggtacagaaacatgttggagatcttgagcctcaaggtgcttgcttcagaattttcctgattctccctctccag

SEQ ID NO: 382 - DNA, 54 bp, Homo sapiens
ggtccacgaggactgcttggccccagaggctctcctggccccacgggtcgcccg

SEQ ID NO: 383 - DNA, 778 bp, Homo sapiens
gtgagtgtcactggctctctgcatccctgtctgtctttttgtttgttttgagattagggtctcgctctgtcgcccaggctggagtgcggtggcgagatctcagctctctgcaacctccggctcctgggttcaggtgattctcatgcttcagcctcctgagtagctgggactacagggacccaccagcacacctggctaatttttgtatttttagtagagacagggtttcaccatgttagttaggttggtctcgaactcctggcctcaagtggtcctcccaaagtgctgggattacaggcctgagccactgttcctggcccctgtctgtcttttttttctcgcttttctgccttctgcatgtccatatctgttgctggcttctctgcctgctcacatttctttctttctttttttttttagacagagttttgctcttgttgcccaggctggagtgcaatggcacgatctctgctcactgcaaactccgccttccacgttcaagctattctcctgcctcagcctcctgagtagctgagattacatgcctggctaatttttgtgtttttagtaaagacggggtttcacaatgttggccaggctggtcttaaactcccgacctcaggtgatccacctgcctcagcctcccaaaatgctgggattacaagcatgagccacagtgcccggccctgctcacctttccacctgcatctctcggtgtctcagactcaggctcccagcttgttgctctgtcttggtctcacatcctcttttcccctag

SEQ ID NO: 384 - DNA, 187 bp, Homo sapiens
ggtccacgaggactgcttggccccagaggctctcctggccccacgggtcgcccggtgagtgtcactggctctctgcatccctgtctgtctttttgtttgttttgagattagggtctcgctctgtcgcccaggctggagtgcggtggcgagatctcagctctctgcaacctccggctcctgggttcag

SEQ ID NO: 385 - DNA, 645 bp, Homo sapiens
gtgattctcatgcttcagcctcctgagtagctgggactacagggacccaccagcacacctggctaatttttgtatttttagtagagacagggtttcaccatgttagttaggttggtctcgaactcctggcctcaagtggtcctcccaaagtgctgggattacaggcctgagccactgttcctggcccctgtctgtcttttttttctcgcttttctgccttctgcatgtccatatctgttgctggcttctctgcctgctcacatttctttctttctttttttttttagacagagttttgctcttgttgcccaggctggagtgcaatggcacgatctctgctcactgcaaactccgccttccacgttcaagctattctcctgcctcagcctcctgagtagctgagattacatgcctggctaatttttgtgtttttagtaaagacggggtttcacaatgttggccaggctggtcttaaactcccgacctcaggtgatccacctgcctcagcctcccaaaatgctgggattacaagcatgagccacagtgcccggccctgctcacctttccacctgcatctctcggtgtctcagactcaggctcccagcttgttgctctgtcttggtctcacatcctcttttcccctag

SEQ ID NO: 386 - DNA, 142 bp, Homo sapiens
atcctgcagacggggcaggagatcatggagctggacaccagtggcttcgccactcagggccccacggtctttgctgggaacatcggggacaaccgctacattgtccaagtgtcaccactgggcatccgcctgctggaaggag

SEQ ID NO: 387 - DNA, 169 bp, Homo sapiens
gtaggtggggggggtggttgggccctgggcatctgcctgctggaaggaggtaggtgggtggggacggtgggggggaggtggttgggccctgggcatccgcctgctggaaggaggtaggtgggtggggacggtggtggggaggcgcatgctgactgccccatgcctacag

SEQ ID NO: 388 - DNA, 255 bp, Homo sapiens
atcctgcagacggggcaggagatcatggagctggacaccagtggcttcgccactcagggccccacggtctttgctgggaacatcggggacaaccgctacattgtccaagtgtcaccactgggcatccgcctgctggaaggaggtaggtggggggggtggttgggccctgggcatctgcctgctggaaggaggtaggtgggtggggacggtgggggggaggtggttgggccctgggcatccgcctgctggaaggag

SEQ ID NO: 389 - DNA, 56 bp, Homo sapiens
gtaggtgggtggggacggtggtggggaggcgcatgctgactgccccatgcctacag

SEQ ID NO: 390 - DNA, 129 bp, Homo sapiens
gaggggcggagccccggcccggaggtctgtcatgctgttcccgctccaggtggccgctgtaacctcttcggtccgcgacgatcctctagagcactgtgtgtctccccggacgcgagcccgctcccctga

SEQ ID NO: 391 - DNA, 171 bp, Homo sapiens
gaggggcggagccccggcccggaggtctgtcatgctgttcccgctccaggtggccgctgtaacctcttcggtccgcgacgatcctctagagcactgtgtgtctccccggacgcgagcccgctcccctgagtaagagtcagccagccgcggatggggagcgtgagtggcgag

SEQ ID NO: 392 - DNA, 9746 bp, Homo sapiens
gtaagagtcagccagccgcggatggggagcgtgagtggcgaggtgtggcctggggtggtgtaggttgagggtggagggtcctggggctgcattcgctgccccggagcgggggcaggggcagtggctccctcggggcgtaggtctcgaggcaactaggccggcgacgtgccagagttacaggctctggaatctgggggtgggggtggggtttcttgtcggcagggggtctcgtggcggctgggtgcggtgggggaggtgcccgagttaagggtgtggagagttgggatttcgccgccgtgaggccggcatcggtgactacgagttatgagggttgggggcgggagttctgtgagcaggggtcttgcagctgccggggtcggggaggttccctggttacacggtccggattcctgggccactgcggtcgctgctgcccgcggtgttgttgatagctggttgcctgacgacgcttcctagtcagccacctccagggcccgggggcgagcggttccttggttcccatgcgccttctctccccaacggccaggccccccctgctccgtcaagcctccccgagcgcctttcttgcccctcggtgcttgttattgttaacgtgggagcgcttgtgcgcactgctttgctagtaaaacttatttaatcttcaccgtagctcgtagctcgtactgttgtgaccgtatttccccccgtgattgcccgactgcttgagcttgaacctcttgtttctaactgccttgattttaggaatcttatgtgggactcaaatccagttgtcagtacatgttattaatgggactcatcttttgagagaggctagctctcaagattgtaggattaagacgcttaactaggattgcggggaagactaaattctgaagtaaaccatcacctactttccaaacaccttggaaaatgcaggggcttaaaagcaaccgataggaatttataaaaagcctaaattaggctttattctgtgtgaaggaatgacttgtaatgttgacaagctccatggaagctattgaggtattttcttttctccatatcattcttctccctaggaggtcgctagctttctggtgattaaatgtctgctgaaatgctccacaaggatcaagtttttttgtttgtttgttttgttttgtttttggagacagggtctcgctctgttgtacaggctggagtgcagtggcattagtagagaagggggtttcaccttgttggccaggctggtctcgaactcctgacctcaagtgatccgtttgcctcggcttcccaaagtgctggaattacggccctgagccattgtgcccgttcaagtttgggtcttctgccagatggccgcctgggagggagtgggtgagtttagacagagtaaattgaaacaggctactttcggtacagtttttctcagatgaagctttcagacaaatatgaattaactgttacacatttgagcagatttcagattatccttttaacatcattctgacttaggttctgatgtactttcctgagtggcaggcaagggtgtttgagcaagtgtttcagcaatttggcataacccaaaggctaatttatgctactgccgttaatcaccattaagggtgtattattaatagctactgaaagacttcaacatggttttatatatttattcactctctctttgtatcctgtctcccagcctccctctctttcccccagcaacagtatttacatcttagcaatatttagggaaatttgtcaaaattttggtgtacccatgggaggaagttgctcatgtggatgccatctgccaggaggaagatggagaacctttcattcggtagatggatctctggatggatgagaagtgagaaacattgtcctggtcactttgtccctccctttcttctaaagctctttcactggcccctccccccaccgcacatgttatcacactttgacacctgttctaggtcctgttcccctactctagggtctctttttccagacaaaactcttctcccacagccttaatgattattttaaacactgctagatctttatttccagcctgggttctattctgagttgtagacattttcagattgatttcttcgtatctccggtgtatccattatggatatctcacattcagctcctaaacccctgtcagcctctgtagcagggggcattatcttgtccaaatttgaggacaagaatcatgtttatatatatacatatatatacacacacacatatatacacacatatatatttgttttttgtttgtttgtttgtttgttttttgagacagagtctcactctgttacccatgctggagtgcagtggtgtgatctcggctcactgcaacctctgcttcccattttcaagcaatggttctgcctcctgctacacccagctaatttttttattcgtagtaaagatggggttttgtcatgttggccagcctggtctcaaactcctgacctcaagcgatccgcccgtcttggcctcccaaagtgctgggattacaggcgtgagccacggtgcccagccacattttatatttttgactacgccagcctctagcacaatgtcatgctttaggagggaagtcattttccatttctcatgctcccatagtggggaggaaatttgtactccactccttgagagggaaaaggataggagcaacattttcccatctttttgtgactgatggatttgggagaaggaattgggcaaactcagttttaactgggttctgtttgtttattggatttgactagacttagcagaatgggtatgctctggtctgcttatatctatatgataagcataaagagccaaaggttaaggtttagagatgttggtgtggattatgataaccaagtatcaattattgattatttaaatctcagcatactttacgtttgcaggctctgttttttttgtttgtttgtttgtttgttttggtttttgagacaagagtctcgctctgtcacctaggctggagtgcagtggcacgatctcagctcactgcaagctctgcctcccaggttcactccattctcctgcctcagccttctgagtagctggaactacaggcgcctgccaccaagcctggctaattttttgtacttttagtagagacggggtttcaccgtgttagccaggatggtcttgatctcctgacctcgtgatccgcccgcctcggcctcccaaagtgttgggattacaggtgtgagccacaacgcgcggctgcaggctctgtttttaagaggtaaatcttcatatatgcaaagactgtaaagatacaaccataaacaataaaagaattgatctgttgatttcttttttttttttttttgacagagtattgctctgtcatcgaggctgtagtacagtggcgtgatctgggctcactacagcctctgcttcctgggttcaagcaattctcctgcctcagcctcctgagtagctgggactacagaggtgtgccaccatgcctggctaatttttgtatttttagtggagatgggttttgctgtgttagccagactggtctcaaactcctaacctcaggtgatccactctccttggcttcccacagtgctgggattacaggcatgggccactgcgcctggcctgatctgttgatttctaagtgttaggttctctgtcataatttttatatgcattattttcttttttcttcataatatactagaataaatgatatttctgttttatagattaggcatagagcagttaaggaacatgcttgaggtcattcatgttgagatcaataagtgatagaagtatatttcaaactcagttctttcaattaaactattttcctgaaaactgtttatcatctacatactatgtacacagctactggagaaataatacttggccatgatgtcttgaaaaaagttgtgagtgactttatattgtagagtgtcatatataaataatctcatttaggtttctttcagctgatttatttttggcaacttaatccttaaattataaactttcttactctatattgtacctatgccatatttattaacccagtctctgtgattcaccaagtaattcttgaataattgtgtagttgaaatatgttttctgtaagttaccacatgcttttaggagtgagaaaaagaaaagtggccgtgatatctagaaactggtattgctagaaactagcctggcattcacagtaactttgtgtttttctgttgaagataaactattgtacagaatgtcaacatcagataaggccgctctgtgtctatgatggatcaagacaaaaacattccatcagtgtctccaaacacagacaaaacgtaaatattgtccaagaaccgagataccaaacattccctttcccagctgatgtgaatgactactgcttgtttaccagttacagcattagcctccccctatattttagatttattgagtggtaccatcatagaattaaccccacttctaacagtgttcaatcctgagcaaagctccacttcctcaaattaagccttcccccaaatcacccaacacatataagtcttttccaataccctcttaccacgataccacagggttccccatggtgtgtgttctccgtgcattccttaatgcaatgagtagtacatccaacttaactgtggtagttttcctggtgttctttggctggagatcattaccaggagaaagctcattagtgtctttgactctttaatattaaagtcattataatctaatcagattagatacaggaaaaatttagaaatgattagaaatgtacttatatctcggataaatcttatgttttagttatggcatatgctatatttactatggttgtttaaaagtatgttttatttgtactttttgtacttttgattactgtaagttaaaatcagttctataatttataatgttaaataattacagtaaagagaaagataagcatctataaattcaagagggagatctttcaaagcctggttagaacaacatgtaaatgaacatgttaaattaataattgttattaggtggtatggaaaccttagttccatgtgaaggtggcatgttactgttttttttttctttttagataaatgacatttcttttttttcttttctttcttttttttttttttgagatggagtctcactctgttgcccagactggagtgcagtggcatgatctcggctcactgcaacttccacctgcctggttcaagcgattctcctgcctcagtgtcccccggtagttgggattacaggtatataccaccatgcctggctaatttttgtatttttagtagagacggggtttcgccatattggccaggctggtctcgaactcctgacctcaggtgatccacctgcctcacactcccaaagtgctgggattacaggcgtgagccaccgcccccaacctagataaatgacatttctgtttaaattctgtgcaaaattctatagcaaaatatatgcgttatctcatcattttattcctatcagacatagaatatttagggaagattagaggattttgaggattgattgttttaaacatgaaaacttgtttgctgttgagttcagaatttttactaggaaaaatctttcgtgactattagcaaattaaaaatggctgaaataagtcgggacggtggctcacacctgtaatcccagcactttgggaggccgaggcaggcggatcacgaggtcaggagattgagaccatcctggctaacacagtgaaaccctgtctctactaataatacaaaaaaattagctgggcatggtggtgggcacctgtaatctcagctactcgggaggctgaggcaggagaatggcatgaccccgggaggtggagcttgcagtgagccgagatcgcgccactgcactccagcctaggtgacagagcgagactccatctcaaaaaaaaaaaaaaaaagctgaaataagctgagtgtggttgctggcagttataatcccagtgattctggtggccaacatggaggatcacttgagcttagcagttcaaagttacaatgaactatgatcgtgccactgcacactagcctgggcagcagagcgagacctcatctctaaaaaacaaaaaacaacaaaagaaattggccagaatttatcaacttttgttgatttgaagtatattttgctaaaactatatatgtaaatatatatatatatatatatttctatttttagtgtttttttttgagatggggtcttgctctgttgcccaggctggagtacagtggcatgctcataagctcactgtagccttgatctcctgggctcaagtgatccaatcctcctgcctcagcttccccaatagctgggactacaggatgcaccactatgcctggctaattttatttttatttttagtagagacaagatcttactatgttgcccaggctggtcttgacctcctgcgctcaagtgatcccacctcagcctctcagagtgctgggattacaagtgtgagccaccaagcccagcctacggctatgttttaaaatcagtgtttcttttggcattacataatggcgtgaagtttacattaggtactgtttacctgttataagtttcaacatattcttttaggtaaagcctgcttttctacaatgatatatatatatattttacaaattattattgtcccaaacattaagttcaggggatactttttttctttaacttgcttgcatttgatattgtttaccagttctattttgtacctctttcctcttttcctcaactaattatgctgattgggtttgtttcatatccctgttttaattattatttaattattccctctgttttttttttttcccccagcttcaattcttctgtcactccctcaagtgaacattggctgttgtttagttctgggtcatctctctttttccctccctgtgctcatttactgtggcttcaactgttacctttaaaatacatagttaatgtagttcattttcttgaatttgaatcttgaatttctaaccgtctactgtaaatttccagtagcacatcttactagctccaacttaacatatgtaaaccaaacctttctaaatcttccaacttgctctgacttacttctgtccaagattctatccacatttagcttccaggccttaaaactttgatcattagtggcttcttttttgtctacgtacccaattagatgctaactttaatgggactttggaagatgtgtttggaaaaaaattctaggttaaatgaagaaaggttagtcttttcaaaaaatggtgctggaatactctattcatatgcaaaaaagttgagccttgacacttacagatttgcaaaaattaactttgaatggatcacagacttaaatgtaagagaaaaaactaaaaacttctaaaaggaaacataaaagaaaatatttgtgatcttgggttaggcaaagattttttttagctgggcgtggtggctcacacctgtgatctcagcactttgggaggccaaggcaggtggatcacaaggtcaggagattgagaccatcttgagaccatcctggctaacacggtgaaatcccgtctctacaaaaaatacaaaaaattagccaggtgtggtggcgggcgcctgtagtcccagctgctcaggaggctgaggcaggagaattgtttgaacccaagaggcggaggctgcagtgagattgcgctactgcactccagcctgggcgacagagcaagactctgtctcaaaaaaaaaaaagattttttttagataggacacaaaaagtacaaacaaatttaaaaattgataaattggacttgataaaaattataaactttcactgttaaaaatatatcaagaaaacttacaaaccacagattggcagaaaatatttttacaaagcaagttttgtaaaatattgctttgtaaaaataaagcaagtttaataaatgacttttatcaagtgtatataaagaaatcttacaattcaatggtaataaaacaacctgctgggcttggtggctcatgcctgtagttggaacactttgggaggccgaggcaggaggatcacttgagtccaggaattgaaggggtaacattgagctatgatcataccactccagcctgggcaacgtagtgagatcctgtgtctgcaataaacaaacaaatgaaaaaactagctggggatggtggtgcttgcctatagtcctagctgttcaggaggctgaggtgggaggattgcttgagcccaggagttcaaggctgaaggtgtactatgatggcaacactgtactctctagcctgtgaaacaacgagagagcctgtctcaaaaaaaaaaaaaaaaaaaaagaaagaaagaaaagctaattttaacaaaagggcagatttgagtagatactttcccaatgattatatgtatggtaaaaaaatagatgaaaagatgctcaacatcatagttatcagagaaatgcagattaaaacactcagagagataaccactaaataaatacacaatagaatgactaagataaaaatgactgaaaatatcacgccctggcaaggatgtgtagaaattgcaattgtcattacaacccacatacattcttatacattggaatgtaaatatggtactttgtactttgaggaacagtttagcagttcaggaattagacaacatcttgaccatataataaaaaataacatcactaacaaggggcaggtaaatatcacgtgccttctctttgtgacaccttaaaatttcacctaatatttctggtgagaatgcataatctaaatttagtcattaagaaacatcaggcacaccctagatgagggatgttctattgaaaaggatgttctgttacacaggattcttttacctgtgtaaattggtaaaagacaaagaaagatggtagagatagatattccaaattaaagaaggcaaaagagatatagcagtgaaatgcaatcagtacctaacttagatgggatcccgaattagaaagagaaaaataggctgtaaaggctgctattgagtcagttgacaaaagtggaatatggacaatagattaaaaaatcagtgttacaaaagttgataattatgttgaggttatataagaaaataacccaattcttaagacacacacactgaagagcttaggggcaaagggctatgatatatatactttattctctgaataattttagaaaaaattgtgtttgtgtgtatggagagaatgaccttgtgtgcacaagcaaaggatgaagcaagtggagccaaatcttaatagggaattaataaagactctttgtgtgttcttggtattattactgtaacttctctgtaggtcagaaattatctcccaatatttaaaaaaaactttttttttgaagtgctttggcttaaggatttaaagagctttttgtttgcttgccttcgttttttgccggagagggagtgtatatggagggtggtggtagtttttcattttctttttatttcagatattttaaagtatattgtaggctttttggggaagctgggagaggcagtaggcaggcatatttatgatcaatcttaagtttgaatttctcaatttgataagtgagattgaaaactaaatgtggactaagcctacatgttgataattaggctaaaaatactgtgatatagatacgctcactgaaatttttttttaaag

SEQ ID NO: 393 - DNA, 9704 bp, Homo sapiens
gtgtggcctggggtggtgtaggttgagggtggagggtcctggggctgcattcgctgccccggagcgggggcaggggcagtggctccctcggggcgtaggtctcgaggcaactaggccggcgacgtgccagagttacaggctctggaatctgggggtgggggtggggtttcttgtcggcagggggtctcgtggcggctgggtgcggtgggggaggtgcccgagttaagggtgtggagagttgggatttcgccgccgtgaggccggcatcggtgactacgagttatgagggttgggggcgggagttctgtgagcaggggtcttgcagctgccggggtcggggaggttccctggttacacggtccggattcctgggccactgcggtcgctgctgcccgcggtgttgttgatagctggttgcctgacgacgcttcctagtcagccacctccagggcccgggggcgagcggttccttggttcccatgcgccttctctccccaacggccaggccccccctgctccgtcaagcctccccgagcgcctttcttgcccctcggtgcttgttattgttaacgtgggagcgcttgtgcgcactgctttgctagtaaaacttatttaatcttcaccgtagctcgtagctcgtactgttgtgaccgtatttccccccgtgattgcccgactgcttgagcttgaacctcttgtttctaactgccttgattttaggaatcttatgtgggactcaaatccagttgtcagtacatgttattaatgggactcatcttttgagagaggctagctctcaagattgtaggattaagacgcttaactaggattgcggggaagactaaattctgaagtaaaccatcacctactttccaaacaccttggaaaatgcaggggcttaaaagcaaccgataggaatttataaaaagcctaaattaggctttattctgtgtgaaggaatgacttgtaatgttgacaagctccatggaagctattgaggtattttcttttctccatatcattcttctccctaggaggtcgctagctttctggtgattaaatgtctgctgaaatgctccacaaggatcaagtttttttgtttgtttgttttgttttgtttttggagacagggtctcgctctgttgtacaggctggagtgcagtggcattagtagagaagggggtttcaccttgttggccaggctggtctcgaactcctgacctcaagtgatccgtttgcctcggcttcccaaagtgctggaattacggccctgagccattgtgcccgttcaagtttgggtcttctgccagatggccgcctgggagggagtgggtgagtttagacagagtaaattgaaacaggctactttcggtacagtttttctcagatgaagctttcagacaaatatgaattaactgttacacatttgagcagatttcagattatccttttaacatcattctgacttaggttctgatgtactttcctgagtggcaggcaagggtgtttgagcaagtgtttcagcaatttggcataacccaaaggctaatttatgctactgccgttaatcaccattaagggtgtattattaatagctactgaaagacttcaacatggttttatatatttattcactctctctttgtatcctgtctcccagcctccctctctttcccccagcaacagtatttacatcttagcaatatttagggaaatttgtcaaaattttggtgtacccatgggaggaagttgctcatgtggatgccatctgccaggaggaagatggagaacctttcattcggtagatggatctctggatggatgagaagtgagaaacattgtcctggtcactttgtccctccctttcttctaaagctctttcactggcccctccccccaccgcacatgttatcacactttgacacctgttctaggtcctgttcccctactctagggtctctttttccagacaaaactcttctcccacagccttaatgattattttaaacactgctagatctttatttccagcctgggttctattctgagttgtagacattttcagattgatttcttcgtatctccggtgtatccattatggatatctcacattcagctcctaaacccctgtcagcctctgtagcagggggcattatcttgtccaaatttgaggacaagaatcatgtttatatatatacatatatatacacacacacatatatacacacatatatatttgttttttgtttgtttgtttgtttgttttttgagacagagtctcactctgttacccatgctggagtgcagtggtgtgatctcggctcactgcaacctctgcttcccattttcaagcaatggttctgcctcctgctacacccagctaatttttttattcgtagtaaagatggggttttgtcatgttggccagcctggtctcaaactcctgacctcaagcgatccgcccgtcttggcctcccaaagtgctgggattacaggcgtgagccacggtgcccagccacattttatatttttgactacgccagcctctagcacaatgtcatgctttaggagggaagtcattttccatttctcatgctcccatagtggggaggaaatttgtactccactccttgagagggaaaaggataggagcaacattttcccatctttttgtgactgatggatttgggagaaggaattgggcaaactcagttttaactgggttctgtttgtttattggatttgactagacttagcagaatgggtatgctctggtctgcttatatctatatgataagcataaagagccaaaggttaaggtttagagatgttggtgtggattatgataaccaagtatcaattattgattatttaaatctcagcatactttacgtttgcaggctctgttttttttgtttgtttgtttgtttgttttggtttttgagacaagagtctcgctctgtcacctaggctggagtgcagtggcacgatctcagctcactgcaagctctgcctcccaggttcactccattctcctgcctcagccttctgagtagctggaactacaggcgcctgccaccaagcctggctaattttttgtacttttagtagagacggggtttcaccgtgttagccaggatggtcttgatctcctgacctcgtgatccgcccgcctcggcctcccaaagtgttgggattacaggtgtgagccacaacgcgcggctgcaggctctgtttttaagaggtaaatcttcatatatgcaaagactgtaaagatacaaccataaacaataaaagaattgatctgttgatttcttttttttttttttttgacagagtattgctctgtcatcgaggctgtagtacagtggcgtgatctgggctcactacagcctctgcttcctgggttcaagcaattctcctgcctcagcctcctgagtagctgggactacagaggtgtgccaccatgcctggctaatttttgtatttttagtggagatgggttttgctgtgttagccagactggtctcaaactcctaacctcaggtgatccactctccttggcttcccacagtgctgggattacaggcatgggccactgcgcctggcctgatctgttgatttctaagtgttaggttctctgtcataatttttatatgcattattttcttttttcttcataatatactagaataaatgatatttctgttttatagattaggcatagagcagttaaggaacatgcttgaggtcattcatgttgagatcaataagtgatagaagtatatttcaaactcagttctttcaattaaactattttcctgaaaactgtttatcatctacatactatgtacacagctactggagaaataatacttggccatgatgtcttgaaaaaagttgtgagtgactttatattgtagagtgtcatatataaataatctcatttaggtttctttcagctgatttatttttggcaacttaatccttaaattataaactttcttactctatattgtacctatgccatatttattaacccagtctctgtgattcaccaagtaattcttgaataattgtgtagttgaaatatgttttctgtaagttaccacatgcttttaggagtgagaaaaagaaaagtggccgtgatatctagaaactggtattgctagaaactagcctggcattcacagtaactttgtgtttttctgttgaagataaactattgtacagaatgtcaacatcagataaggccgctctgtgtctatgatggatcaagacaaaaacattccatcagtgtctccaaacacagacaaaacgtaaatattgtccaagaaccgagataccaaacattccctttcccagctgatgtgaatgactactgcttgtttaccagttacagcattagcctccccctatattttagatttattgagtggtaccatcatagaattaaccccacttctaacagtgttcaatcctgagcaaagctccacttcctcaaattaagccttcccccaaatcacccaacacatataagtcttttccaataccctcttaccacgataccacagggttccccatggtgtgtgttctccgtgcattccttaatgcaatgagtagtacatccaacttaactgtggtagttttcctggtgttctttggctggagatcattaccaggagaaagctcattagtgtctttgactctttaatattaaagtcattataatctaatcagattagatacaggaaaaatttagaaatgattagaaatgtacttatatctcggataaatcttatgttttagttatggcatatgctatatttactatggttgtttaaaagtatgttttatttgtactttttgtacttttgattactgtaagttaaaatcagttctataatttataatgttaaataattacagtaaagagaaagataagcatctataaattcaagagggagatctttcaaagcctggttagaacaacatgtaaatgaacatgttaaattaataattgttattaggtggtatggaaaccttagttccatgtgaaggtggcatgttactgttttttttttctttttagataaatgacatttcttttttttcttttctttcttttttttttttttgagatggagtctcactctgttgcccagactggagtgcagtggcatgatctcggctcactgcaacttccacctgcctggttcaagcgattctcctgcctcagtgtcccccggtagttgggattacaggtatataccaccatgcctggctaatttttgtatttttagtagagacggggtttcgccatattggccaggctggtctcgaactcctgacctcaggtgatccacctgcctcacactcccaaagtgctgggattacaggcgtgagccaccgcccccaacctagataaatgacatttctgtttaaattctgtgcaaaattctatagcaaaatatatgcgttatctcatcattttattcctatcagacatagaatatttagggaagattagaggattttgaggattgattgttttaaacatgaaaacttgtttgctgttgagttcagaatttttactaggaaaaatctttcgtgactattagcaaattaaaaatggctgaaataagtcgggacggtggctcacacctgtaatcccagcactttgggaggccgaggcaggcggatcacgaggtcaggagattgagaccatcctggctaacacagtgaaaccctgtctctactaataatacaaaaaaattagctgggcatggtggtgggcacctgtaatctcagctactcgggaggctgaggcaggagaatggcatgaccccgggaggtggagcttgcagtgagccgagatcgcgccactgcactccagcctaggtgacagagcgagactccatctcaaaaaaaaaaaaaaaaagctgaaataagctgagtgtggttgctggcagttataatcccagtgattctggtggccaacatggaggatcacttgagcttagcagttcaaagttacaatgaactatgatcgtgccactgcacactagcctgggcagcagagcgagacctcatctctaaaaaacaaaaaacaacaaaagaaattggccagaatttatcaacttttgttgatttgaagtatattttgctaaaactatatatgtaaatatatatatatatatatatttctatttttagtgtttttttttgagatggggtcttgctctgttgcccaggctggagtacagtggcatgctcataagctcactgtagccttgatctcctgggctcaagtgatccaatcctcctgcctcagcttccccaatagctgggactacaggatgcaccactatgcctggctaattttatttttatttttagtagagacaagatcttactatgttgcccaggctggtcttgacctcctgcgctcaagtgatcccacctcagcctctcagagtgctgggattacaagtgtgagccaccaagcccagcctacggctatgttttaaaatcagtgtttcttttggcattacataatggcgtgaagtttacattaggtactgtttacctgttataagtttcaacatattcttttaggtaaagcctgcttttctacaatgatatatatatatattttacaaattattattgtcccaaacattaagttcaggggatactttttttctttaacttgcttgcatttgatattgtttaccagttctattttgtacctctttcctcttttcctcaactaattatgctgattgggtttgtttcatatccctgttttaattattatttaattattccctctgttttttttttttcccccagcttcaattcttctgtcactccctcaagtgaacattggctgttgtttagttctgggtcatctctctttttccctccctgtgctcatttactgtggcttcaactgttacctttaaaatacatagttaatgtagttcattttcttgaatttgaatcttgaatttctaaccgtctactgtaaatttccagtagcacatcttactagctccaacttaacatatgtaaaccaaacctttctaaatcttccaacttgctctgacttacttctgtccaagattctatccacatttagcttccaggccttaaaactttgatcattagtggcttcttttttgtctacgtacccaattagatgctaactttaatgggactttggaagatgtgtttggaaaaaaattctaggttaaatgaagaaaggttagtcttttcaaaaaatggtgctggaatactctattcatatgcaaaaaagttgagccttgacacttacagatttgcaaaaattaactttgaatggatcacagacttaaatgtaagagaaaaaactaaaaacttctaaaaggaaacataaaagaaaatatttgtgatcttgggttaggcaaagattttttttagctgggcgtggtggctcacacctgtgatctcagcactttgggaggccaaggcaggtggatcacaaggtcaggagattgagaccatcttgagaccatcctggctaacacggtgaaatcccgtctctacaaaaaatacaaaaaattagccaggtgtggtggcgggcgcctgtagtcccagctgctcaggaggctgaggcaggagaattgtttgaacccaagaggcggaggctgcagtgagattgcgctactgcactccagcctgggcgacagagcaagactctgtctcaaaaaaaaaaaagattttttttagataggacacaaaaagtacaaacaaatttaaaaattgataaattggacttgataaaaattataaactttcactgttaaaaatatatcaagaaaacttacaaaccacagattggcagaaaatatttttacaaagcaagttttgtaaaatattgctttgtaaaaataaagcaagtttaataaatgacttttatcaagtgtatataaagaaatcttacaattcaatggtaataaaacaacctgctgggcttggtggctcatgcctgtagttggaacactttgggaggccgaggcaggaggatcacttgagtccaggaattgaaggggtaacattgagctatgatcataccactccagcctgggcaacgtagtgagatcctgtgtctgcaataaacaaacaaatgaaaaaactagctggggatggtggtgcttgcctatagtcctagctgttcaggaggctgaggtgggaggattgcttgagcccaggagttcaaggctgaaggtgtactatgatggcaacactgtactctctagcctgtgaaacaacgagagagcctgtctcaaaaaaaaaaaaaaaaaaaaagaaagaaagaaaagctaattttaacaaaagggcagatttgagtagatactttcccaatgattatatgtatggtaaaaaaatagatgaaaagatgctcaacatcatagttatcagagaaatgcagattaaaacactcagagagataaccactaaataaatacacaatagaatgactaagataaaaatgactgaaaatatcacgccctggcaaggatgtgtagaaattgcaattgtcattacaacccacatacattcttatacattggaatgtaaatatggtactttgtactttgaggaacagtttagcagttcaggaattagacaacatcttgaccatataataaaaaataacatcactaacaaggggcaggtaaatatcacgtgccttctctttgtgacaccttaaaatttcacctaatatttctggtgagaatgcataatctaaatttagtcattaagaaacatcaggcacaccctagatgagggatgttctattgaaaaggatgttctgttacacaggattcttttacctgtgtaaattggtaaaagacaaagaaagatggtagagatagatattccaaattaaagaaggcaaaagagatatagcagtgaaatgcaatcagtacctaacttagatgggatcccgaattagaaagagaaaaataggctgtaaaggctgctattgagtcagttgacaaaagtggaatatggacaatagattaaaaaatcagtgttacaaaagttgataattatgttgaggttatataagaaaataacccaattcttaagacacacacactgaagagcttaggggcaaagggctatgatatatatactttattctctgaataattttagaaaaaattgtgtttgtgtgtatggagagaatgaccttgtgtgcacaagcaaaggatgaagcaagtggagccaaatcttaatagggaattaataaagactctttgtgtgttcttggtattattactgtaacttctctgtaggtcagaaattatctcccaatatttaaaaaaaactttttttttgaagtgctttggcttaaggatttaaagagctttttgtttgcttgccttcgttttttgccggagagggagtgtatatggagggtggtggtagtttttcattttctttttatttcagatattttaaagtatattgtaggctttttggggaagctgggagaggcagtaggcaggcatatttatgatcaatcttaagtttgaatttctcaatttgataagtgagattgaaaactaaatgtggactaagcctacatgttgataattaggctaaaaatactgtgatatagatacgctcactgaaatttttttttaaag

SEQ ID NO: 394 - DNA, 119 bp, Homo sapiens
aagacccccagactgattcctcagtctcacttcttccccacttggaggccaagatccgtcagacacacagccttgcgcacctcctcaccaaatacgctgagcagctgctccaggaatat

SEQ ID NO: 395 - DNA, 116 bp, Homo sapiens
acccccagactgattcctcagtctcacttcttccccacttggaggccaagatccgtcagacacacagccttgcgcacctcctcaccaaatacgctgagcagctgctccaggaatat

SEQ ID NO: 396 - DNA, 227 bp, Homo sapiens
ttggaatgggacagaccctgatggggtcaggaacaaagagccagcgtgggagaggtgatcaatgagcaggaggttggccatcctcattcctcccccctttcccaccagaagacccccagactgattcctcagtctcacttcttccccacttggaggccaagatccgtcagacacacagccttgcgcacctcctcaccaaatacgctgagcagctgctccaggaatat

SEQ ID NO: 397 - DNA, 2746 bp, Homo sapiens
gtaaggggctgagggaccggacgccgggtcgctgaggggcgcaggagtcagagggattgggagctgggggtctgggtttccgccacccccgggtccgggaggggagcggccttggcggggaagggcagggctccggtgtcaggtaacgagtgagcgggtgagttgtgagaaacagcaggcgctagggtttagaggaggcctggggctgaggtttcagggacctgggctcagggcttagatcaccggttcgagtacacccagggggaggactggggtcggggctggggcaggacccctgcgtccactgagtctcgggaaagaatcagagctggggggctgaaggaaggggtagagtaagggaaggcagtcttggagtcacaggaagtagtgagtgacaacaggagacgaaagtctgggctgctgaggatcgcgactggtgctgggaaacttcgggggtggggcgggggcggggcaccgggtcaggactacattccccagcacgcatcgggcgcgcgctgtgcgtttcgggaaatggagtccctcccggggcgccagacactggctcttgcggaccttgattcgctgactagccaggccagcgccttgcatggatggggcatcagggagagaaatggaaatggaagtcagtctccctatctgtaaaatgggccttcaaggcacattttgatatgaagttctgtacttcgatgatgttgaagtccactagcagtcactgaggtagaaatatgtaagccctgtcttcaaagggctctcaggctaaggcagatacacacagaaaagccgttaaaagagctaccctggaactcatgcaaatggccttaagtcaaaggaaggagttcgtttataaaggagaagtgattctggaggcttcactgaggaggcagtacagtcatgcactgcataacaacatttggtcaacaggtggaccgcacagacaatggaggtcccataagattctatgcatttttagcctgggcaacatggcgaaaccctgtctctacaaaaaaatacaaaaattaaccgggcatggtggcgcatgcctgtagtcccagctacacaggagacccaggcgggaggatcgcttgagcccaggaggtcgaggctgcagtgagccaagattgcaccactgcaccccatcctgggcgaaagagcaagactccgtctctctctctctctctctttctcttttgggatggagtctttctctgttgccaggctggagtgcagtggccttggctcactgcaacctctgcctcctgggttcaagcaattctcctgcctcagcctcccaagtagctgggactacaggcgtgtgccaccaagtccagctaatttttttttttttgtatttttagtagagatgaggtttcatcatgttggctaggatggtattgatctcttgacctcgtgatccacctgcctcagccctccaaagtgctaggattacaggcgtgagccactgcgcctggacaatttttttttttttttttgagacgaagtctcggtctgtcacccaggctggagtgcagtgacctgatctcagctcaatgcaacctcctcctcccaggttcaagcgattctcatgcctcaggccccctggtagctgggattacaggcacccaccatcatgcctgactaatttttgtatttttagtagagacagggtttcaccagatggtcccgaactcctgacttcaagtgatccgcccgcctcatcctcccaaagtgtgggattaaaggcgtgaaccactgagcccaatgcctggctaatttttgtatttttagtagaaacggggtttcaccatgttggccaggctggtctcaaactcctgacctcaagtgatctgcccatctcgggctcccaaagtgctgggattacaggcgtgagccaccacgcctaaccgatatatattatataataaaatacatacctatatatgtattttaactgtagcttttctatgtttttatttatttatttatttagagatagggtcttactctgttgcccaggctggagtgcagtggcacactcacagctcactgcagcctcgacctcccggggttcaagtgatcctctcatctcagcctctcaattagctgggactaccggcatgtgccactatgcctggcttatatttgtattttttgtaaagatggggtttcaccatatcgcccaggctggtcccaaactcctgggctcaaacaatccacctgccttggcctcccgaaatgctaagattacagacatcagcaatctcacctggcccttttctatgtttagatacacaaataccactgtgttccagttgcctgctgtactgtaacatgctgtccaggtctgcagcctaggaacaattgactaacaccacatagcctgggcgtgtagcaggctgtaccacctaggtttgtgtaaatacactctacgatgtatttacgtactctacgatgaaatcgcctaaggatgcatttctcagaatgtatccatgttgttaagcaaggcatgactgtctttgaatttgactttaataggatttcaacagtgatttggggacaggcaatacatttcaggtagaccacctgcttgacaaagttctggtgcctcattttccttcagttggaatgggacagaccctgatggggtcaggaacaaagagccagcgtgggagaggtgatcaatgagcaggaggttggccatcctcattcctcccccctttcccaccag

SEQ ID NO: 398 - DNA, 2749 bp, Homo sapiens
gtaaggggctgagggaccggacgccgggtcgctgaggggcgcaggagtcagagggattgggagctgggggtctgggtttccgccacccccgggtccgggaggggagcggccttggcggggaagggcagggctccggtgtcaggtaacgagtgagcgggtgagttgtgagaaacagcaggcgctagggtttagaggaggcctggggctgaggtttcagggacctgggctcagggcttagatcaccggttcgagtacacccagggggaggactggggtcggggctggggcaggacccctgcgtccactgagtctcgggaaagaatcagagctggggggctgaaggaaggggtagagtaagggaaggcagtcttggagtcacaggaagtagtgagtgacaacaggagacgaaagtctgggctgctgaggatcgcgactggtgctgggaaacttcgggggtggggcgggggcggggcaccgggtcaggactacattccccagcacgcatcgggcgcgcgctgtgcgtttcgggaaatggagtccctcccggggcgccagacactggctcttgcggaccttgattcgctgactagccaggccagcgccttgcatggatggggcatcagggagagaaatggaaatggaagtcagtctccctatctgtaaaatgggccttcaaggcacattttgatatgaagttctgtacttcgatgatgttgaagtccactagcagtcactgaggtagaaatatgtaagccctgtcttcaaagggctctcaggctaaggcagatacacacagaaaagccgttaaaagagctaccctggaactcatgcaaatggccttaagtcaaaggaaggagttcgtttataaaggagaagtgattctggaggcttcactgaggaggcagtacagtcatgcactgcataacaacatttggtcaacaggtggaccgcacagacaatggaggtcccataagattctatgcatttttagcctgggcaacatggcgaaaccctgtctctacaaaaaaatacaaaaattaaccgggcatggtggcgcatgcctgtagtcccagctacacaggagacccaggcgggaggatcgcttgagcccaggaggtcgaggctgcagtgagccaagattgcaccactgcaccccatcctgggcgaaagagcaagactccgtctctctctctctctctctttctcttttgggatggagtctttctctgttgccaggctggagtgcagtggccttggctcactgcaacctctgcctcctgggttcaagcaattctcctgcctcagcctcccaagtagctgggactacaggcgtgtgccaccaagtccagctaatttttttttttttgtatttttagtagagatgaggtttcatcatgttggctaggatggtattgatctcttgacctcgtgatccacctgcctcagccctccaaagtgctaggattacaggcgtgagccactgcgcctggacaatttttttttttttttttgagacgaagtctcggtctgtcacccaggctggagtgcagtgacctgatctcagctcaatgcaacctcctcctcccaggttcaagcgattctcatgcctcaggccccctggtagctgggattacaggcacccaccatcatgcctgactaatttttgtatttttagtagagacagggtttcaccagatggtcccgaactcctgacttcaagtgatccgcccgcctcatcctcccaaagtgtgggattaaaggcgtgaaccactgagcccaatgcctggctaatttttgtatttttagtagaaacggggtttcaccatgttggccaggctggtctcaaactcctgacctcaagtgatctgcccatctcgggctcccaaagtgctgggattacaggcgtgagccaccacgcctaaccgatatatattatataataaaatacatacctatatatgtattttaactgtagcttttctatgtttttatttatttatttatttagagatagggtcttactctgttgcccaggctggagtgcagtggcacactcacagctcactgcagcctcgacctcccggggttcaagtgatcctctcatctcagcctctcaattagctgggactaccggcatgtgccactatgcctggcttatatttgtattttttgtaaagatggggtttcaccatatcgcccaggctggtcccaaactcctgggctcaaacaatccacctgccttggcctcccgaaatgctaagattacagacatcagcaatctcacctggcccttttctatgtttagatacacaaataccactgtgttccagttgcctgctgtactgtaacatgctgtccaggtctgcagcctaggaacaattgactaacaccacatagcctgggcgtgtagcaggctgtaccacctaggtttgtgtaaatacactctacgatgtatttacgtactctacgatgaaatcgcctaaggatgcatttctcagaatgtatccatgttgttaagcaaggcatgactgtctttgaatttgactttaataggatttcaacagtgatttggggacaggcaatacatttcaggtagaccacctgcttgacaaagttctggtgcctcattttccttcagttggaatgggacagaccctgatggggtcaggaacaaagagccagcgtgggagaggtgatcaatgagcaggaggttggccatcctcattcctcccccctttcccaccagaag

SEQ ID NO: 399 - DNA, 2638 bp, Homo sapiens
gtaaggggctgagggaccggacgccgggtcgctgaggggcgcaggagtcagagggattgggagctgggggtctgggtttccgccacccccgggtccgggaggggagcggccttggcggggaagggcagggctccggtgtcaggtaacgagtgagcgggtgagttgtgagaaacagcaggcgctagggtttagaggaggcctggggctgaggtttcagggacctgggctcagggcttagatcaccggttcgagtacacccagggggaggactggggtcggggctggggcaggacccctgcgtccactgagtctcgggaaagaatcagagctggggggctgaaggaaggggtagagtaagggaaggcagtcttggagtcacaggaagtagtgagtgacaacaggagacgaaagtctgggctgctgaggatcgcgactggtgctgggaaacttcgggggtggggcgggggcggggcaccgggtcaggactacattccccagcacgcatcgggcgcgcgctgtgcgtttcgggaaatggagtccctcccggggcgccagacactggctcttgcggaccttgattcgctgactagccaggccagcgccttgcatggatggggcatcagggagagaaatggaaatggaagtcagtctccctatctgtaaaatgggccttcaaggcacattttgatatgaagttctgtacttcgatgatgttgaagtccactagcagtcactgaggtagaaatatgtaagccctgtcttcaaagggctctcaggctaaggcagatacacacagaaaagccgttaaaagagctaccctggaactcatgcaaatggccttaagtcaaaggaaggagttcgtttataaaggagaagtgattctggaggcttcactgaggaggcagtacagtcatgcactgcataacaacatttggtcaacaggtggaccgcacagacaatggaggtcccataagattctatgcatttttagcctgggcaacatggcgaaaccctgtctctacaaaaaaatacaaaaattaaccgggcatggtggcgcatgcctgtagtcccagctacacaggagacccaggcgggaggatcgcttgagcccaggaggtcgaggctgcagtgagccaagattgcaccactgcaccccatcctgggcgaaagagcaagactccgtctctctctctctctctctttctcttttgggatggagtctttctctgttgccaggctggagtgcagtggccttggctcactgcaacctctgcctcctgggttcaagcaattctcctgcctcagcctcccaagtagctgggactacaggcgtgtgccaccaagtccagctaatttttttttttttgtatttttagtagagatgaggtttcatcatgttggctaggatggtattgatctcttgacctcgtgatccacctgcctcagccctccaaagtgctaggattacaggcgtgagccactgcgcctggacaatttttttttttttttttgagacgaagtctcggtctgtcacccaggctggagtgcagtgacctgatctcagctcaatgcaacctcctcctcccaggttcaagcgattctcatgcctcaggccccctggtagctgggattacaggcacccaccatcatgcctgactaatttttgtatttttagtagagacagggtttcaccagatggtcccgaactcctgacttcaagtgatccgcccgcctcatcctcccaaagtgtgggattaaaggcgtgaaccactgagcccaatgcctggctaatttttgtatttttagtagaaacggggtttcaccatgttggccaggctggtctcaaactcctgacctcaagtgatctgcccatctcgggctcccaaagtgctgggattacaggcgtgagccaccacgcctaaccgatatatattatataataaaatacatacctatatatgtattttaactgtagcttttctatgtttttatttatttatttatttagagatagggtcttactctgttgcccaggctggagtgcagtggcacactcacagctcactgcagcctcgacctcccggggttcaagtgatcctctcatctcagcctctcaattagctgggactaccggcatgtgccactatgcctggcttatatttgtattttttgtaaagatggggtttcaccatatcgcccaggctggtcccaaactcctgggctcaaacaatccacctgccttggcctcccgaaatgctaagattacagacatcagcaatctcacctggcccttttctatgtttagatacacaaataccactgtgttccagttgcctgctgtactgtaacatgctgtccaggtctgcagcctaggaacaattgactaacaccacatagcctgggcgtgtagcaggctgtaccacctaggtttgtgtaaatacactctacgatgtatttacgtactctacgatgaaatcgcctaaggatgcatttctcagaatgtatccatgttgttaagcaaggcatgactgtctttgaatttgactttaataggatttcaacagtgatttggggacaggcaatacatttcaggtagaccacctgcttgacaaagttctggtgcctcattttccttcag

SEQ ID NO: 400 - DNA, 366 bp, Homo sapiens
tcgtgagactgcagacccgctaataaaatccaccccaacaatcgctgtgtgccgctttagtgcgctcgccgtcggctctacctgcgtgctttagctccttctcgcctgatccttctgtctctcccaaccccggacacccggcttcgactggttatatcttcggtgttcttttcctctcttcttctttcgcggttcagcatgcaggaaaaagacgcctcctcacaaggtttcctgccacacttccaacatttcgccacgcaggcgatccatgtgggccaggatccagagcaatggacctccagggctgtagtgccccccatctcactgtccaccacgttcaagcaaggggcgcctggccagcactcg

SEQ ID NO: 401 - DNA, 316 bp, Homo sapiens
gccgctttagtgcgctcgccgtcggctctacctgcgtgctttagctccttctcgcctgatccttctgtctctcccaaccccggacacccggcttcgactggttatatcttcggtgttcttttcctctcttcttctttcgcggttcagcatgcaggaaaaagacgcctcctcacaaggtttcctgccacacttccaacatttcgccacgcaggcgatccatgtgggccaggatccagagcaatggacctccagggctgtagtgccccccatctcactgtccaccacgttcaagcaaggggcgcctggccagcactcg

SEQ ID NO: 402 - DNA, 201 bp, Homo sapiens
ttcttttcctctcttcttctttcgcggttcagcatgcaggaaaaagacgcctcctcacaaggtttcctgccacacttccaacatttcgccacgcaggcgatccatgtgggccaggatccagagcaatggacctccagggctgtagtgccccccatctcactgtccaccacgttcaagcaaggggcgcctggccagcactcg

SEQ ID NO: 403 - DNA, 439 bp, Homo sapiens
tcgtgagactgcagacccgctaataaaatccaccccaacaatcgctgtgtgccgctttagtgcgctcgccgtcggctctacctgcgtgctttagctccttctcgcctgatccttctgtctctcccaaccccggacacccggcttcgactggttatatcttcggtgttcttttcctctcttcttctttcgcggttcagcatgcaggaaaaagacgcctcctcacaaggtttcctgccacacttccaacatttcgccacgcaggcgatccatgtgggccaggatccagagcaatggacctccagggctgtagtgccccccatctcactgtccaccacgttcaagcaaggggcgcctggccagcactcggtgagctgggtctgtctggggctgtccacagttgggcggtaaaagagatacggcttatgaatttgaaaggcat

SEQ ID NO: 404 - DNA, 389 bp, Homo sapiens
gccgctttagtgcgctcgccgtcggctctacctgcgtgctttagctccttctcgcctgatccttctgtctctcccaaccccggacacccggcttcgactggttatatcttcggtgttcttttcctctcttcttctttcgcggttcagcatgcaggaaaaagacgcctcctcacaaggtttcctgccacacttccaacatttcgccacgcaggcgatccatgtgggccaggatccagagcaatggacctccagggctgtagtgccccccatctcactgtccaccacgttcaagcaaggggcgcctggccagcactcggtgagctgggtctgtctggggctgtccacagttgggcggtaaaagagatacggcttatgaatttgaaaggcat

SEQ ID NO: 405 - DNA, 274 bp, Homo sapiens
ttcttttcctctcttcttctttcgcggttcagcatgcaggaaaaagacgcctcctcacaaggtttcctgccacacttccaacatttcgccacgcaggcgatccatgtgggccaggatccagagcaatggacctccagggctgtagtgccccccatctcactgtccaccacgttcaagcaaggggcgcctggccagcactcggtgagctgggtctgtctggggctgtccacagttgggcggtaaaagagatacggcttatgaatttgaaaggcat

SEQ ID NO: 406 - DNA, 4372 bp, Homo sapiens
gtgagctgggtctgtctggggctgtccacagttgggcggtaaaagagatacggcttatgaatttgaaaggcatgtaagtaatttataatatgacttataaattaggaaggcaaccgaaagatgtttctacactgtaattcttgcagcacagctttgtatcggatggtccagtgatcgtatttcttttgataagcaggactggaaggagccgtttgtccagcttgccatttagatttggcctgaaattcaggtgattttgacaaatttgcaattaaaaatcgaaggtcataacttttttgagttacctttagcagcataaattttaaagatgtagtacggagtcagcttaaaaaatattaagggtctgataacttgactagaattaagattgtttccagtagctgtatgaatagttattgagtacctactatatgccaaatacgtgctcgtatatatcatgtgtattacatgtattgtctcatctaatcctaacaacaaccctagtctgaaccgaattctcattttttcccaataaagaagctgagatttagggagttaagtaactagccttagactagtaagtattggagatggaattcaaactttagaaacttgaggttgctttaggaaccaactcctaggcactcagctacactatgctatctctaataatgctagtaacaatttagcctattgcgtcatttaagcactgtggcttagtgattaagaacacaactcatgaccgggtgcagtggcttacgcctgtaatcccagcactttgggaggctgaggcgggtggatcacctgaggacaggagttcgagcccagcctggccaacatggtgaaaccccatctctactaaaaataaataaattagctgggcatggtggcgggtaatctcagctactcgggaagctgaggcaggagaatcgcttgaacccaggaggcagaggttgcagtgagccaagatctcaccattgtgctccagcctgggtgacaagagtgaaactccaactcaaacaacaacagaaaaagagaacacaaatcttatagtcaaaggctaggtttgcattctgacaccacttcttctgagctgggggaccttgggcaagttagttaacctatcaaaacctctgactgatcctgtataaatggggataataatagtatctaccacataagttgttgagatgtatttaaggctgtatagtacataataattactcgatggtaatttgttttttcatgatgttcacatttacactatttccatttgatcctcacaacaaccaggtcagaaggcaggacaggtattatgtactttttatagaaaaggaactgacacagagtcatacatgaatgatctgtaaagcctacgaaggagccctctttgttaatcacatagcttttttcccccttttggtggcatacttgatggatcttagagaatttaaaagttgctgagatttgtaagaattagttaaagtctgtaagtccaaagccttgattatgctttggaaaccacttcagtgtgttatataagttgaggaaaatccttacagacagtcccttgttttgtgagatacagttctaaggccatttctacaactggtttagaatactctttactgtattttagaatcaaaatatgtacacagcctctctttctttctttcttttttttttttttttatttttcagagagagtcttactctgtcacccaggctggagtgcagtggtgcgatctcggctcactgcaacctccgcctcccgggttcaagcgattctccggcctcagcctcctaagtagctgggattacaggcgcctgccactgcgcctgactcattttttattttttttagtagagacggggtttcaccatgttggccaggctgctcttgaactcctgacctcgtgattcacccgccttggcctcccaaagtgctgggattacaggtgtgagccacggcgcccggctcacagcctctctttcaaacatgcagttcgtttcttgtgtagggtttaatgaaagtgtagctgcccaagctttggaacttagtgcaaaagtttaccattcaggtgtgatattaataattaaatgtttccaggaagccagcagggatggttaaatccacaaaaactctgcttaatatcttttttttttttttttttttgagacagagtcttgctctcttgcccaggctggagtgcagtggtgcgatcttggcccactgcatcctccacctcctgggttcaagtaattctcctacctcagcttcccgagtagctgagattacagctgcccgccaccatgcccagctaatttatttatttttagtagagacggggtttcaccatgttggccaggctggtcttgaaatcctgacctcaggtgattcacctctgaaagtgctgggattacaggcatgagccaccgcgcccggccctttttaaaaatcagctaagaccactaaagggaatttgaagagctgaatgagaaacgggaggtacctttctgtggcagaagccacgtgaatccaaacttttttttttttaatctgcagggtacagctgcaggtcatggtaagaaggtgatggtggggaggggtaaggatatcctggagccctataaaatatgtctgctcaggttgggcgcggtggctcacgcctgtaatcccagcactttcggaggctgaggcgggtgggtcatgaggtcaggagatgaagaccaacctccccaacgtagtgaaaccccatctctactaaaaaagtacaaaaattagctgtgtgtggtggcgtgcctgtagtcccagctactctggaagctgaggcaggagaatcgcttgaacccgggaggtggaggttgcgccactgcactccagcctggcaacagagcgagactccctttcaaaaaaaaaaaagtctgctcaacttgtcataaacaagggcacatagcaacaaaacttttagaagttattgttgttaatactgggagcttctgaatcagaaacaaaggtgaaagagtggttgtgttttgttatgttatgtgaagcagagggagaaaattataggacttctaattaatgttcgaatccttggttcacaatccggttttgacactccctaggtactattgcatttggcttcactttcctcaaagccagtcataaggattagtagaatgactggatgaatatagctagcagggtgccatatatgtaaaaggagaataatgcaatttttttttttcccgagacagagtctcgctctgttggccagcctggagtgcagtggcactatctcggctcactgcaacctccgcatcctgggctcaagcaattctcctgcctcagcctcccgagtagctgggattataggaatgcaaatttttaaaaagtattgtgtggagctgttttgccaggaattgctccctatgctttgagccacttttgtagagccaagatgtgaatgaatgttgagcattggtaggatgtgatcataacttcctgttgtatgctaaatagaacttgaatcagcctgacagatggctcactcctgtaatctcagcactttgggagaccaatgtgggaagattgcttgaggtcaggagttcaagaccagcctgggcaacatagctagactgcctctacaaaaaataaaattaaaatatttgttaggcatggtgacatgcacctgtagtcttagctactcaggaggctgagatcggaggattgcttaagcccaggagtttgaggctgcagtgagctatgattgccccaccgtactctagcctgggcaacagagtgaggtcctatccttaaaaaaaaaaacttgtatcacttaatcatttatttcttaggaaatgaaatacaggttagaattaggtttattctgttggctcatgcaagtcccttttcctaatgtttccagattaatgaaaaaaggtgagtctaacataataaacatactaataataaaaactgtcatttatttagtgattagcatgtgccaggaaacatgtagtgaatttgtgcattatctcattttatcttcacaacaattttatgaaccagatatctgtattttattcccattttacagatattgagattgactcttggaaatgtgaagtaacttacctagtgtcatgcagctcataagtggcagatacagaattcacatagagtttgtttgacttcagagcatcttgactatagccacagcactgttctgcttctgtattaaagcaagacatatcatgactaaagaatagaaactaattatggtagggtgaaactatagttctctatgttaggactctgataataaactgaaatctcttaggatgaactcgaacttgtttttttcag

SEQ ID NO: 407 - DNA, 4299 bp, Homo sapiens
gtaagtaatttataatatgacttataaattaggaaggcaaccgaaagatgtttctacactgtaattcttgcagcacagctttgtatcggatggtccagtgatcgtatttcttttgataagcaggactggaaggagccgtttgtccagcttgccatttagatttggcctgaaattcaggtgattttgacaaatttgcaattaaaaatcgaaggtcataacttttttgagttacctttagcagcataaattttaaagatgtagtacggagtcagcttaaaaaatattaagggtctgataacttgactagaattaagattgtttccagtagctgtatgaatagttattgagtacctactatatgccaaatacgtgctcgtatatatcatgtgtattacatgtattgtctcatctaatcctaacaacaaccctagtctgaaccgaattctcattttttcccaataaagaagctgagatttagggagttaagtaactagccttagactagtaagtattggagatggaattcaaactttagaaacttgaggttgctttaggaaccaactcctaggcactcagctacactatgctatctctaataatgctagtaacaatttagcctattgcgtcatttaagcactgtggcttagtgattaagaacacaactcatgaccgggtgcagtggcttacgcctgtaatcccagcactttgggaggctgaggcgggtggatcacctgaggacaggagttcgagcccagcctggccaacatggtgaaaccccatctctactaaaaataaataaattagctgggcatggtggcgggtaatctcagctactcgggaagctgaggcaggagaatcgcttgaacccaggaggcagaggttgcagtgagccaagatctcaccattgtgctccagcctgggtgacaagagtgaaactccaactcaaacaacaacagaaaaagagaacacaaatcttatagtcaaaggctaggtttgcattctgacaccacttcttctgagctgggggaccttgggcaagttagttaacctatcaaaacctctgactgatcctgtataaatggggataataatagtatctaccacataagttgttgagatgtatttaaggctgtatagtacataataattactcgatggtaatttgttttttcatgatgttcacatttacactatttccatttgatcctcacaacaaccaggtcagaaggcaggacaggtattatgtactttttatagaaaaggaactgacacagagtcatacatgaatgatctgtaaagcctacgaaggagccctctttgttaatcacatagcttttttcccccttttggtggcatacttgatggatcttagagaatttaaaagttgctgagatttgtaagaattagttaaagtctgtaagtccaaagccttgattatgctttggaaaccacttcagtgtgttatataagttgaggaaaatccttacagacagtcccttgttttgtgagatacagttctaaggccatttctacaactggtttagaatactctttactgtattttagaatcaaaatatgtacacagcctctctttctttctttcttttttttttttttttatttttcagagagagtcttactctgtcacccaggctggagtgcagtggtgcgatctcggctcactgcaacctccgcctcccgggttcaagcgattctccggcctcagcctcctaagtagctgggattacaggcgcctgccactgcgcctgactcattttttattttttttagtagagacggggtttcaccatgttggccaggctgctcttgaactcctgacctcgtgattcacccgccttggcctcccaaagtgctgggattacaggtgtgagccacggcgcccggctcacagcctctctttcaaacatgcagttcgtttcttgtgtagggtttaatgaaagtgtagctgcccaagctttggaacttagtgcaaaagtttaccattcaggtgtgatattaataattaaatgtttccaggaagccagcagggatggttaaatccacaaaaactctgcttaatatcttttttttttttttttttttgagacagagtcttgctctcttgcccaggctggagtgcagtggtgcgatcttggcccactgcatcctccacctcctgggttcaagtaattctcctacctcagcttcccgagtagctgagattacagctgcccgccaccatgcccagctaatttatttatttttagtagagacggggtttcaccatgttggccaggctggtcttgaaatcctgacctcaggtgattcacctctgaaagtgctgggattacaggcatgagccaccgcgcccggccctttttaaaaatcagctaagaccactaaagggaatttgaagagctgaatgagaaacgggaggtacctttctgtggcagaagccacgtgaatccaaacttttttttttttaatctgcagggtacagctgcaggtcatggtaagaaggtgatggtggggaggggtaaggatatcctggagccctataaaatatgtctgctcaggttgggcgcggtggctcacgcctgtaatcccagcactttcggaggctgaggcgggtgggtcatgaggtcaggagatgaagaccaacctccccaacgtagtgaaaccccatctctactaaaaaagtacaaaaattagctgtgtgtggtggcgtgcctgtagtcccagctactctggaagctgaggcaggagaatcgcttgaacccgggaggtggaggttgcgccactgcactccagcctggcaacagagcgagactccctttcaaaaaaaaaaaagtctgctcaacttgtcataaacaagggcacatagcaacaaaacttttagaagttattgttgttaatactgggagcttctgaatcagaaacaaaggtgaaagagtggttgtgttttgttatgttatgtgaagcagagggagaaaattataggacttctaattaatgttcgaatccttggttcacaatccggttttgacactccctaggtactattgcatttggcttcactttcctcaaagccagtcataaggattagtagaatgactggatgaatatagctagcagggtgccatatatgtaaaaggagaataatgcaatttttttttttcccgagacagagtctcgctctgttggccagcctggagtgcagtggcactatctcggctcactgcaacctccgcatcctgggctcaagcaattctcctgcctcagcctcccgagtagctgggattataggaatgcaaatttttaaaaagtattgtgtggagctgttttgccaggaattgctccctatgctttgagccacttttgtagagccaagatgtgaatgaatgttgagcattggtaggatgtgatcataacttcctgttgtatgctaaatagaacttgaatcagcctgacagatggctcactcctgtaatctcagcactttgggagaccaatgtgggaagattgcttgaggtcaggagttcaagaccagcctgggcaacatagctagactgcctctacaaaaaataaaattaaaatatttgttaggcatggtgacatgcacctgtagtcttagctactcaggaggctgagatcggaggattgcttaagcccaggagtttgaggctgcagtgagctatgattgccccaccgtactctagcctgggcaacagagtgaggtcctatccttaaaaaaaaaaacttgtatcacttaatcatttatttcttaggaaatgaaatacaggttagaattaggtttattctgttggctcatgcaagtcccttttcctaatgtttccagattaatgaaaaaaggtgagtctaacataataaacatactaataataaaaactgtcatttatttagtgattagcatgtgccaggaaacatgtagtgaatttgtgcattatctcattttatcttcacaacaattttatgaaccagatatctgtattttattcccattttacagatattgagattgactcttggaaatgtgaagtaacttacctagtgtcatgcagctcataagtggcagatacagaattcacatagagtttgtttgacttcagagcatcttgactatagccacagcactgttctgcttctgtattaaagcaagacatatcatgactaaagaatagaaactaattatggtagggtgaaactatagttctctatgttaggactctgataataaactgaaatctcttaggatgaactcgaacttgtttttttcag

SEQ ID NO: 408 - DNA, 89 bp, Homo sapiens
atgttccccatcattgcccagtatggagatgtattggtgagaaacttgaggcgggaagcagagaaaggcaagcctgtcaccttgaaaga

SEQ ID NO: 409 - DNA, 210 bp, Homo sapiens
aaaagacatcacaaaattcattacaaaatgtcacttactgctccatgctggagaaagccatatccttctgggacttgagtctgcacatttaactacaggtactgatctgttttgtgcttagatgttccccatcattgcccagtatggagatgtattggtgagaaacttgaggcgggaagcagagaaaggcaagcctgtcaccttgaaaga

SEQ ID NO: 410 - DNA, 262 bp, Homo sapiens
gtatgaaaataagatgagtcttaattagaaatgtaaagaatgaatctggggacaggtagaaagtaagatcacagtccgtttccaaggggtagtccactgagttcgagcttcctaaaaatggtcttttatctttatgtacagaaaagacatcacaaaattcattacaaaatgtcacttactgctccatgctggagaaagccatatccttctgggacttgagtctgcacatttaactacaggtactgatctgttttgtgcttag

SEQ ID NO: 411 - DNA, 141 bp, Homo sapiens
gtatgaaaataagatgagtcttaattagaaatgtaaagaatgaatctggggacaggtagaaagtaagatcacagtccgtttccaaggggtagtccactgagttcgagcttcctaaaaatggtcttttatctttatgtacag

SEQ ID NO: 412 - DNA, 104 bp, Homo sapiens
agtcgcctcaagaaaggccgggctctcggcgcagcctgcctggcagcctttccgagaagagccccagcatggagccctcggccgccacgccgttccgggtcacg

SEQ ID NO: 413 - DNA, 240 bp, Homo sapiens
agtcgcctcaagaaaggccgggctctcggcgcagcctgcctggcagcctttccgagaagagccccagcatggagccctcggccgccacgccgttccgggtcacggtaactatctctgcgtcaccaacaccgccactgccaccaccatcaccacctcgcccggggtgctgctctgtgaccccacggccccccttcctggagcctcatggacccggagagcatccggcctcccttgctctag

SEQ ID NO: 414 - DNA, 20543 bp, Homo sapiens
gtaactatctctgcgtcaccaacaccgccactgccaccaccatcaccacctcgcccggggtgctgctctgtgaccccacggccccccttcctggagcctcatggacccggagagcatccggcctcccttgctctaggtatccgatccctcagctgctcccatctccgtggctcagccctggtcccgggggccacatggggggtcccatcctgagagggagggggcaggtggaggacagacagcaccgaaggctatggggcccagcgctgagctggcccggaaagagaagaggctcttgttagtttagataaatgtacccttgagggcgcacacacactgtgcttctgcaaccccgaaaagatgcactatttttgtttccatatattttaacacctctcatggcataccataatttaaatctttcttggtggtacataaaataatgctatatattataactgatgatggcttagaaccgacaaaacacagaatatatatcatagctattgaactgagtggtccccacaagcacacagactttttaaaaattacaaacctaaacaactttatggaaacagaacccaatgacccttaacgtctgactgttcatacccttctgcatttgtgcatgtacacacacacacacacacacacacacacacacacacacaccagagttctgggtcccttcactccctcgttcaggagcattactgtgtgtacctctctccagggctgtgccaggcaccagaaacgcagcgatgacatagacacattcctttctccacggagctcaggtctgtaggtcaggtggatgttggatggtttgttcatccattcattcactcatcagttattctggcatgcctgctgtgtgcaagcagaggaaagaaggttctgggtggcaggaacagagagtgtgcaggcctggctgtcactggatagcatcatataggggctccaggggagctggaagtgattggctattcacagtgggttgggagggggtcccacgggagctggcttttgagctgcatcttgaagggtccgtagaaaatggctaggcaaggacagagagagagagagagggacttccggggagggagaacagcagttgcaaaggtatggaggcaccctagaaatttcctctgcttgccatagggctggctcctcatcccttgggcatcagctcagatatcagctcctgaccacaccacctcaaggaagccctcttgcttttccgccatcacagcagcctgctcttctgtttcctaatacttagtgtcagcatgagaatgtgagctcataaggtcaggggctgatgtgtttgtggcatgcagaactgcttggtggagctggagttgaggggatctggaggacagtgtaggaggtgaggctgggaggcctggccgagtcaaggtcacgtggaacctccagtaccaggccaaagggatggggctttccccagggccactgattctctccactgccagtatgttataaaaatgccttaaaaactagcttattgtccttctttaagatttcagtccactgggccagggcagggcctgggaacctgcattttaacaagctttccccaggaggtgattctgagtccccagctgggggttgagcccatgggcaatgaggaggaagcctgcgctgagacgattcagggtcatggccctgagtttggccagggggtctcaggaagctggtctccagcctgcagggagcgcttggaggctgggacaagggtgacccccatcagctggagcgaagaccaagttctgatctctctggatccctggggccacagcaggcagggtgggccttcagggggaccctagggaacgatgactaataataattagtaatagtagccacctccattgatgaagtgcctactgtgtgccaggcactgggctcactgtcctacatccctgatctcttttttttttctttttttttttttttttgagacagaatcttgctttgtcgcccaggctggagtgcagtggtgtgatcttggctcactgcaacctctgcctcccgggttcaaatagttctcccacctcagccccccgagtagctgggattacaggagcctgccaccacccccagctattttttgtatttttagtagagacggggtttcaccatgttggccaggctagtcttgaactcctgacctcaggtgatcctaccacctcggcctctcaaagtgctgggattacaggcatgagccaccacgcccagcctacctgatctctcttcatccaggagacacacctacagctgaaacattggttaccccatttcccaggtgaggaaacaggttccgagaggtaaagtcacttgctgcccaagctccaactgctactaagtggcggaaccaagattcgaccccaggtctctgtgactccagggcatgaggcacacccatcctcaggctaggaggcggatccattgccccacacccccccagaaccccatcagcatcgcttttccggctatttccctttctgagttgctctaataggggtattatcacaccttaaagtttttataatttgcagctctttaagtgacagctaggatcagtgttttccctgtagtggtgtcttcattctgtctcccagggtagaaaccaccttcagtcagagccagccttgggaacctcgagctgcctgggactcaactcgcagtcccacctgcccggttagggtctgcaggatggagagcgtgttcaaggtggtcgttttgcccacttctcatggcaaccctctaggggaggcaccattagtgtgcccatttcacaggtgaggaaactgaggttcagaggtgaaattctttagctggtgtcactcagctcctgagtcaggactgccggacatctacgttttgtgtcctttcctgggcaccttggtccttaagagatgtgatttgagattctcttctgggctgggtgctgggagctgaggggactggagaactcagaggtggggatctgggttcaaatcccagatcttccatgacccatgtgatttcagtagccactgagcctctccgagccttgtgttcttgacagtaaaatctggaatgacagactttgcttggactgtggacttggtgaatgtggtcgcccaagtctgacccatggtaggtgcttcatggatgaaatccatcattaacatccaaatcgggtttccatttttggctgtaaaacatcagtaaagatctaggagggttggagtacaggcagaggacaaggtgtttgggggaaggtcagtggtgagcctggcctgggccttggggacagtccctcacacagaccctgtgcagggccagaagcaccctcctccctcccctagcccgtagcacacacttgctcacttacaggctcccaaaagctatgtcctcacgtgctcagctgacttttgctctgtgtagaccctcgagggaacccaggaaacatggttttgcctcggggaggcaggggagatgccacaggatgtactggaataactgccaccttcactgccatttcaaacccagatggcaggctgtcagcatctcttacaggggtgctccgcagggagaatcaatgagtcacggtgtaaggtctacaaggctcagcctgtccaccttctccatggaaactgaggcctgggaagggcttgtcagaggtcaccacccagctgacagcagttcaggagcctgggttgtttacaccatcacatgccacccctcctcattttgtgagtcagccgaggacctgcagccactctgtagggcattgaaggctcagtgctagtcctgcccctgcctcttgtagactgtatgaccctgggagagcctcagtttccccttttgtgaaatgtgggggatggactttgtaaggcagcgtacagttcaggcataaataggtgcttaaatgttctggtgcagtagctaagagaatgggctctagagagttccccgacccaggtttcaggccctgcacagcctcataccagctttgtggcttgctcaggagtggaacttttctgcctatctgggacaactccctccctcctatagggagagttggggggtaggggagtggctctccaggaccacacagtgctacgaggctggcatgtgccctgcaagttatagggggccctgaatgaggatgggggaaggggcctgggagtagatgaccagagaggcttcctgtgcatctgtggccatcagctctcaggctcctgagattcaaacccaggtctgtctgctctgtgccagtagtgtctcctggaagggaaggagggaagggtggcaggcagcaagctggggccctggatctgcatagaccaatggtcagactgggtctgggggctttgcatgtgcccacccagcttccccaggccctggaccccttagcagcaacagcatgctgttctttctctcctgccactccatggcagaggagccgtggtttgatttgggaggcaaagagctgatgactcttcctggtctccccacgagctccttagcctgctcccttccccagccccaaacttccctgttgcgggctgggtccttcctccctccctccttcctctgcccccacccccctcccatcaaccttgaggatggctggcaggcctggggtgtgggaggtggcagaggctcagggaaacttgacagccaattgattcctcctcgggaagttgaaagtggagagtcgtgtttgaaggtttagctgaaattaggtctcagggctattttttgcgagatggagaaggagaagtgtcagggaggggaaggcccaggggtctggcagaaactgcagataaactcaacattgggttgattatggatgcttctaggagcaggtctttggtttctttcaacaactcacttttattggtgcttggttgtgcacaccctgcataggatgctgtgacagaacaaggaacagttatctctggccaggaaggacagggaagaattcttaaagaagggactcttggggctgggctttgaggagtgtataggagttcgtcaggaaccaagggagaagagtatttcagttagtgaagtgaatagaaggaaacaagctaatggccctgtgtgattggagtgctggatgggttcagggcctggagagaagagtgagagaccttggtgggtgagctaaagcctttggactttcccctgcaggatacaagaaccacagtggatgatggctgtgagtggagctagcagtagacctctgagctgtggacctcaggttttccagctgctcaccccttttctcactcctgtagcctccctgcaccctccccatgtttcagctgtctttctgtcacacaaactcaagaaacaggcatgtgaacacaaacatgcaagctagtgggtgaccctcccgcccatgtcaccatggaaaggctgttggaaattaactggttcaacccttccctatacagaggagggactgagaatcatagacgggagggtcctttcctgaggtcacacagcatgtctagggtagggcctggagttgagcccaggtctctgtccctctcccccgcatccagtggtcctcaccccttactccttcctgtcctctcctcccagcacctggatatcagccaccccgtctgagctgagcccttctcccagcccccatcacatttcctgggaggaatgggtgttctttggtccaactgccctcggagccccacgacagctccttcccgctcatctgcacactgccccctcctggccaccaggccccagccccagctgtagagggacccgaagtttgggctgcgggctgcctgaaggaggaatgcatgacttcaggtccaggagggggcattctctgctccctgcagagccggccccgctgccccccatttgtgccccttccaagctacggaggctccgggtggctgttggggtggggaacagaaaagccagccaggctcacagatcagacaagccagatctgtcccagggtatatggggaaactgaggcctggagaggagcagcttgcccaggatacttgctggggctccctccactggcccaggctgctgtgggtccatctcagatggtcgttcacttgggacatatttatgtttgtggcccatcaaccagtggagggatgtcagccacgtggtcctggctgtaacagggcggtagtgctggacccctgggtggggtcccaccatgggcgccccagttttctccttgaagtatgaggaatttgcttagttctgctctgtgagtcagtctcctgacccagcatccggcgtgtattcagcggatgggcggggtggtggaagagcaaaccctgccccctccgccccctccaccctcactccctccatccctgcccttcacggaggctgattggtattaaactattcaaacccaaaaggaacattaccgtcattttggtctgtgtctgccttccgcggggggcatcccccttttctgcagagggagtgttggaaggtgggactcaggagttgtccggggtggccagggtggggcaaggatgttcttcggggcaggagtctggggacagggggtcttggagcctcctgaatccaagaccaggctagtctgaggcctgggacagaggtgggactgctgcagtattggtagggttgggaggctgtcgccccaccccattaatacacaggaaggtggtttcatcagctccattttacagttgaggatcccaggcttagggaggagagaggcctggcctcagcaggtctccagctggtgggtggtaggggcaggagcccagctctcgtctgcgagccttgctgcggtgtgaacgaacttactttcttctctccttttgcctttctttattctttctttcgataaatttgccatcatcaccaactatgtgtcagggcctatgccagtcattgaggatacaaagaggatgaaaacgtagttgctacctgcagaaatacagaagggccagccggggcttggtgaagtaatttccaggcaggtgaaggggaaaggacattccaggcaaaggccaggacatgggaaacagcatgagcaaatgacagcaggaactgagcgcagtttgggggctgaaatgtgaggaagtggctggaatggaagcgacaagagatccacggcagtgaacagagcagatgggatctaaggccatattaacaggagtatgaggtcctcagcaagggaggtgaggtgggccagagtaggccagagcagacatggagtgcagcatacttgaccaggctaggagagtctggagctccttcagtgggcagagaccaagactgggtggggatccagcatggggttggggggacaagcaaattgcttttctcaagcaggttctcaggagcctgttccaacccccccaacatctgtgctcagaatgcccttgggcaggggtagggggaagagcccacttcaaggatccctggaatcttctgcctcatcctggcaagtggcagctggcttgggcagtgtgagtgaggaggatggaagtgaagggaacaagccagcctctgtaccccctcctcttcctgccctggggacttccaaatacatcagaaggccatccctgtaaattccatttccccagccctgcacttaagcctgttgggcagcatggaatcagatgaactggttcccgttaaggtgtaaaggccaccaccccagtccctgccaggttcagtaactggcgagtggaatgctctctgtgggggcctttcttcctctcttcacacccactcagggtcttggggtacagtgctggcctctcccagggatagtccccccaacccagggatgaagcaggattagaatcttggccactgctcccttctgtaggatggctcaggcaagttgccccactctctttccctgtctgtaaatgggcaggaacccctccccacagagtggctgtgagggctcagtgcctggcacaaggcagcattccccacacctgttccctttgcttgtgtgaggggtgcacctccaccccacatttcctccagagccccaggtaactgggcagacccctcccacttccatacccttccgtcacggccccaaagcaacatcacccctgactgaacttctagggctcagccctggcagtagaaggtggagaggggctggaggggttcctaggggaccagagaccaagttcttaggtggtgagttcagatggagatggaggtgtctgcgcagggtggtttcctgccagttgggggcagcagagggtagcaagtggacttctgggtggctcctcccagtgagtgttgaagtcccaggggtttgtgtgtcaggggccacagggagctggcccaacaaggtgttagctggctaaacaaggtgtagaacatactgctgggggctgggagcagctcagatccgggagcacctgtcaatggctgggcctggcatgactggctgtgccagctgggcctaggttgaccagaaagccaggggttctgaaaggggaccctggtcagggacactggatggaacaaggtctggggctgggacagctgtccaccaagagaaagggcacagggtgaggtggaccagcatgtgatctgtcaggcagggctgctgcactgtggtcaccaggctggggccaacagacactcagtcactgccaccctttgatgggttataggcacctgttccacctaccactgctttgagagggggtaaggcgggcattgtgggagaggcagggtggtggtcagagcttgcactccaagtcccactggcctgggttcgaatcccagctctaccacctctgctgtctgtacgatgggggattttgaatcctgttctgcatagtactctgagtcaggccctgtgctgagcactttctaagtattgtctcatttaatccttacaactcgaggctcagataacacaaatctcactcatagaaggtgacaaaatcaaggcagatggggagtgaagagatagctgagggtggctcctctcatgggcctggatcttgaagttctcacagcgcctggaccatagcatgcagcccagtctttgctagtcagtgctgtttttctcttcatcttacggacgaggatgttgaggcccagagaggggaggtgcattgtcctgggccacacggcttgcagggacagagctgagatttggacccaggcctccccatctctctgccttatcttgtcctgcccctactttgagcaggcctggccctaggggtcagacacccctgggataggagagaactgctctcctcttgtcatcctgccctgtggccctgcaggtcctcccctttcctgggaggtgggggagcctgcatgtcaggggcaaggctcagacgccttcattttcccacctcctcatgctacaaaaatgaaacgatcaagtggtattttggtgggattacagacataattatatctgagttgtcaagcggcaattgttgtttccaaagccaggaggccctctgtggaggtggcagcagtgacatctgtttctaacacaaggctctgcatcgggatgagtaacttctcctgtggaattgcttaaagaacgtctaaaacgagctgagcttgttactcccctgctccagcaccttagatggctcccagcagggtgggggatccagctccccggcctggcattcaagccccccaggctgtcccagcttccacgcctttgtgtgggcggatccttctacccacaattcctccccatctctctctgtctccagagctcactagtgccatccagggctctgtccaggttgcagaacaccccatctgtacacgctccctcacggactctgtgacttcatgatccatcacttctgtctctcccaccagacggtggtcaccttctcaaggacagggactgtttctgatttgtctgaactcccagcactggggcaaggactcacctgtggcaggctcatgaggggcttgcggaatgaaggtgcacgagacagagagagacagggagtaaacgaattaaatggagtaagcgcagggtgagcagggaagagggtgagccgtgacctctccacttctgccagcccccacacttctgccagcccccacactgggtgtctgaggccagagtggtcccctgccttgggaggacaggtcaagacaagtgacccagcccaccagaggccagcaaggacaccagcccttgccttgaaaagtgccggacgtggtggctcatgcctgtaatcccagcattttgggaggttgaggtgggtggatcacctgaggtcaggagttctagaccagcatggtcaacatggtgaaaccctgtctctattaaaaacacaaaaaattagccgggcgtggtagcgcatgcctgtaaccccagctactatggaggctgaggcaggagaatagcttgaacctgggaggtggaggttgcagcgagctgagatcgcgccactacactctagcctgggtggcagagtgaaattccatctaaaaaaaaaaaaaaaagaaactgaccttgactccaccccatacccatgggccttctgaggccaggactcccaggtgaaccttggcccgcagatggtaaatcacccaggagaaatagcctataaaatcctctcctaaaatggtgcattttgtattctgtagtgaaaagggcttttaaaagcactgcttactcaggtggatttatggagtttcccccacccctccctcccactagtgtttactggtcctcagtcctggagctccctggggtcctgttttttccttggtggctcttggtccagggagagaaacaagatagcatctctttcctgccttgctgccttggggccccccgggccagctgggtgcctggaagtgcaggggaatcctacccaacagaagctccctgtggcccagcgcaaacctgaaagtcccaccattagtgcccatttgtccccgggagactccccccccatgtgttgtcacctgcaaatgggtcaccagggaggcacaacaaagctggaaagaattcagagatcagctagactaatccccgcattgtacagcagggaaactgagtcacagagcagcttaggtgctggctcaacgcctcagtctggtaatggaattacatgagagctttagctctggagcagcctgtctgctgtgttgaacccagctctgccgcttcctgaccgtgcggtgctgtgcaaattagttgccctttctgaacttctgttctcccatctgcacactgggttgtgagaattaaagagaagtcatgggaagctctaatacagtgcctgaagcttagacagggcttactaaacacatctgactaattctcagcagcgtgttggaagagccctcattagtattaatagcagagctgggttttgaccccagacttatagactccaaacgtggttttcttgccactcatgcagtgcacagagcacaggataggggagttttgctggggaatgagcactaaagtcagcaagccccgggaggactggctgggacctcagtgataggacgtgcaggcaggcggagatagtatagaccctgctgcaggggtgtaacctcctggtggaatcggcttccttgcagccacgaggccctgggtatccaactccccaccccttagccagggctggctgagagcttaaagagctgatgaggtgtttgtagccatccagacctctgggacaggcttattatgctaaggcaagtgtcagctggaggatctatgggacaatgagtcactccctggctgctctgggttgtcacatcccaagctgagaccttgggaatgcgtaactggtttctgttcgctgatgcccgcctaatcctgggcactggcaggtaccaggagggctctgctgacgtcctcagctcccctcccagcttcacctttaccctcttcaaatctgggctcccctctttttcctccgttagactctcagtgttccttagggttcccctttacttgggtgtcctctgccctggggaagggattacaagcccaggctcaggtggtggtgtataacttggaggctggagggacctgtgataactccaggggcctcccagggcagccagactccccgctgtcctacctctacacctctgcttatgctgtgagtctgcctggaatgcctttatgtggctatcctgccccagccaatctcagcaagcccacctgctgtcccaccttcaatgtttctaaaatgctgtcaaaagctgcctcctccagcaagtctgcccagattgctcccaagtgaaatccttttaaaaagccccacagagcactttatctttttccttttatatcattaaatatttgtgaattcattcaagaaatattgagagaatacctgccaggcgtccagcactggagacccaggttgccatggcccctgctctggaggctttacagtccagtatggggtgggggaggcactaaacaaacacacttataattacaactgtggtaagtctacagggagacctggcctagtgtggggacatccggggaggcctctaagagaaagactgaggaggtacctgaagggtgtggagagtcttccttcccaggcaggaggaacagcccaggcccttctggctaacggctgggctggtctctggtggtcaaaggaagtgatagcagtgagccgagatcgcgccactgcactccagcctgaggacagtgagagactccatgtcaaaaaaaaaaaaaaaaactatgaccatgaaagtgatcatgaccgcaatgatagcagttcgtatttattgtatgcagggaaatgggctaagtttcttccatgcgtgatctcattgaatcttcacaactacctcgtccccattttacagaagaggacacaggcatagaaggttaagtcatgagcccaaggccccagagccattaagtggtggaatcccctgctcccaccttcttccggaggaaggatgaaaattatttacattttacctggggattcctagagattgaattacccttaggacctaaagaggtgtgtcaaacagtggaatttcagctgtactgatgggcaggagaaatgtttagggcaggaagcttcagctcttgccagggaacagaactccaaaagtcacaggttctgggagctgtaagctgtaaaaacgagctttgagtgtgagagaagcaaacaaattgtccaaagtgaagccctgcgagaaaagcagggggagttatcttggaagccgttaagagctgttttcttgccttggtcctgagatctgggctcctaactctggagcttcctgggccacttgcccttcctgtcctggttgtgaatgtgagcacgtgagggccagcgtgtttagcttgtgtgtctgcacaattctgctggtgcctgatgatagctgagtacatgtgtatatttattggcttatttcagtgtatttgtatgttagcttgtatgtttcatggctgtgtatgtgtgtattcgtgtgtgtgctgatcaatgtgtatgtgtttgtgtgtgtctgtatgtgtggtggcactggggtacttgtatgcttacacatacatttctttgtgggatgcctttcctgtgtgcatttgtatgcatgcctgtccttgaacttgtgtatgtttctggccctgtatatttctctatgagaacatgtttaagtgtgtctttccaggcagtattttaactcaacagtgaccctagagtgtcagggtccagcctcttcctggggcttccctgaaggctctcaaggcctatgaattggttttctttgtttgacttaagtagtctggctaccttctccaggcggaatatgtggcgatctcactggtatgagattgtagaggattctgtgggcatagggtggcctgtgagtaggtggccaccaggaagtcaccaacttaatcccagcttaaggtgcctcccctctttcgcctgtcacagtgtctgacattccattagtgagtcattctccagctgggactctctttgatggtgcatacccttgaggggaggaggccagagaagcccggcagcctgctgagggtagagaccggggaacagggaaggggagggcaggaggaatgacgcatctgaaggatttgggcaaagccagagaattccctgatgccattagtgcctagcttggggcggcccaggcaccctggccctggcagctgctctgactttatagaatcatcaaatatcagcgctggaaaggagcttggtgatcacccagtctagcccctagtgttgtagatgggaagactgtggcccagaaagaggaagtgtgggcagactgggaggttcttgaagcgtggatgctgaagatgcaaagagcactgggcaaggagcaggggacccaggttctaatggctccgcctggtgacgctgggcaggtcccactgccctctgggcctcagatgtctcctcagtgtcactggcctggctgccctctgtgggccctcctgactctcactctgtgactctggaagcaggacccccaccacccccagcccttttctagtgcccccaccagcctgccgcggtgtcaggtcggcctgccagctcatgcacccagcatctctcccctcctggagccgagagaggtggcaggatctggatgggatcttctcctccctttcctgtttatttagatgtgcttttggcattcgggcaaagccccagaaagatattgagagacatgcctgtcaaaacagtctcccttctccaaggctctctctttggggatgggccttagaaactgccatgggaggagccgggccttggcggagggagggcccacagggttctgcctccatcctgagtactgtcttggggttccccagtgggcagctgagagcttaacgggtgacaaagttctgccaggcccacatgcccatctgcagcagcccaggtcagtctgttgaaaggggagagggtgatgaagacaggcctggaggaagaatgcaaggacaaatagatgctgggcttgggggaaggaacccgcccttgattgagcacctactatgtgctaggcatgttgctcagtgcttcgtattcagttgagaagcagtgcctttgagaccattggtgacgtggggctcccgggtgtccaggtggcggtgctgaaatgcagatccctggttccctaggggctgcctcctcggctgggagtgtggcacagacaaggacagcactgggcaaggttcccctccctgggggtgggaagcctccaggtcttcactgggagcccctgtgggacagctctgcactcagggagtgagcgggcctccctttcttccctcccgccttggctttggtccttgaggcctagtacagtgcctggggctgagtgtggggaggatgatcagagctgtccatctgtttccctatatgggggagtccccacgctgcccatcccaggggccagaactctcttggttacagtcccagctctgccactttcagcaggtgacttaacttctctgagcctgcattcccccacccggaaatccaaaacatcctgaattctgaagctcttatcctcccaaggattcctgataacaggcattgggcgctcctaggcatcctctcctagggtgggagtgattcgtcagaacagaagcttgattgctggtaatatatcatcatcatcatgtggaattcattgaaatgagtgaatgaagaaatcacgtgtcttgaattctgaaaggcctttgagacagtcgttcaggaccttctggagaagcagcagggttgtgggccagatgtcaggatggtggtgtagctctactcctggggtagtagagctgcttaagaacttgggtccttccagccaaagaccccccaggcctctgacccccactcaaactgccctgtgctttgctcagtgatatgatggaagcctagggcctaggggatcagctggcataggaagggtgtccagatgggcaatgggccatccacagagaggggcgggggctacacagctatccacgcccagccgtcagggaatgagctgggggggtggcaccaggcagcagccttgtgcagcagccttgtgcaaaagccctggggccttggttgacctcagcgtcgtggcacagctgcctgacaagtagatggggacatgggctgctttaatagaggcagagtgccccatctggggagggagccgcgggtccctgcagactgtgtaggctgcttgctgagctttagacatcagtccttgctccagtgaatgaaagctgaggcctccacctgagcagccctgcctgccccgtgcactttgggcatcgggagtctcagtgaggttgctttaggaaaaaaaaaaagtgcttgtttaagagagttcaaaactaccaaactggatgacattctgcggctccagaatcattttgcaagcatgttcattcatgtccctgtccccctgccgggcggcccacagcctccttggagagcccagactgactcccacccttggttgtcatttatccatttgggcaaaaagaggtggtggtgctcagccaacatcagtattggttgcaataaacctactactctgtgtagttgcttaatagttactgtctttctggcgacattgtacctcatttcatccttcccaggtcccataaagtaggtatcatcatcagtttattttacacatagggacactgaggttcagagaggtccagtaatcggcccacagcttgtctgaatgaagatttgaggccaagcgatgtgagggggctagagctgcccagtgggaatggtcagcaagcgtgggctcctgtggtccagcgccatctgcaggagaagtgggatacagccaggccttagtgggtgtggctagggggtcatagtctgtccctaggcaagggagtgattatggggaccacctataatctttgcagatgagctaggcccgacacatgtcactacaaacggagtgtttttaacagtcctgtacatgtatatgggaattgcacatggcttttgttgagcacttactgtcggctacactctgagcctagagctttatcagtttttcgtttttgtttttgttttttgtttttttgagatggaatcttgttttgttgcccaggccgaagtgcagtggccaaacttggctcactgcagcctccacctcctgggttcatgcaattctcctgcctcagcctcccgagtagctgggattacaggctcgtgccaccacgcccggctaatttttgtatttttagtagagacggggttttgccatcttggccaggctggtcttgaactcctgacctcaggtgatccacccgcctcagcctcccaaagtgctgggattacaggcgtgagccaccatgcctggcaactttatccacttttatctgccaatttaatcctcactgcagccccccacccacttcagagagaggcaaggggccttagctgtcttctcttgcagtgaggggtctgtggagctgggtttgacttggttcttagccactgggctgtcagtgggctccactgcggtcccggaaagtgggtatcaagaaccctgtttgactgaatgatttgcccactgcccctcaattaaaggttgtcttgggtctagaataagagtttctgacttgaagaccagtcagcccctcttcccaagttaggggctgtagctgcctccagaaatcaagtcccaggagctgcctctgaagggacagcagaaaaggtttgcctcccttcatctggcgaagagggagaggacgcccttggccctccacccccatgaaggagagcaacaagctgtgtggctgggcagagcagagcagaggactggagtccacggtccttgattaaccttgctttgtgatcttggggaagggccttccctactctggtccccagtcaccctgtaatacagcctttgcatctgagtccccttctggcagtggctttccaagatgatgagtatttgttaagtctgtcatatgcagggtcctgagctgagttctctgggggacacaggtctctaggtggatgtgtgatgtgatcggtgggtgggtcaacgggaacactctctgttccctggaagaatctcttttcccatgatctgagctccctgacctcttgaatatccatatactgctcactccataatgttcatggctatcttggccactgtgtctagcacataatggctctcattaaggtgaaagagtgaatatgacagggtattaggagtccccaaggtcattgtcagtttgggtgggggagttaccattctgagtaggctttaaggaggaggctgcttgtcagaggaacattaagtagagtcacagggggtggagtggggaagaggaagtggcacatgtgcatcaaacctcctagacgggagaaaacttttttgtttaaactcagaaataggataaagccatcaatattgctccagaatgagctacataaattgtgaaacatgcttctttgttcttcatacctcaagattgcaaaaattgtgaaattttcatcagtgtagaaaataaaaaccaagaaaaggtacaagcccattgggataacttgcttgaccacaacccctgggagaagagaacccatccaaattagccaggtgcagccccctctcctatagctggcaagaggcagagtttgggagagctcagagctcacgcagaggtgcaggcctctgcctccatgccatgtgtcctggagagcctagtgctctcctgacctgccaccgtttggggtccctctgcattaagcattgccttgtctatgggtcatgcctctggagaagggtccctcctgcagcccctaatacctaagagatatttgtggcggctgattagaataccctgatggataattccaggctgcagaggtgagaggcatttggactccactgcctgggatggccttctggtgaggtatcatttcagctgggccttgaaggacacgcagaatcccaacaggtggccacaggggtatgtctcctgtggatatgaatggctgaggaaggaggaaaaggcagaaggagaaagataggaaaagggaaatcttgaaagctcttgaattagccaggcccggaagctgggtgtccttgggtaagtcactttacctgtctgagcaagcttcttcatttgcagcaaatgtttttctgtcattttctgtctgtgcgggtgacatgagatgacttgtacagcccatgtttgaccttgtcatgttgaagatggacagatacagcccagggcctgtgccaaacatccactgctcctcttgaacacagagagggctgccaaactgaccctttattttgtgatggatggaatgtggtatttggattatgtacattaacctcaaattaaattaatatcccacttgccacctggaattgagactggggtgggtgagcccccagaacacccccctctttagaggactccccctcctccagttttcctctccctcaagctgcctgtagtttccaagcccggcaggacacaggctgtgtcccctggggcccccacatctatcccgtcacctgtaaagggaagattggtttgacctgtgtgtattgaacgcctgtctcctctgtctctgccattagaccaggagctcttgggatgggggaggtgggggattaagctctgttttcagtcagtgcaacctgttaggtggataaatggcgtgaataaggttccccaaatcttgaagcttttaatggggatactcagcaaacccttcagcccctcgggcccctccctgagctgagcactagggatcccgtcccgcaaggtggttgtccttgctggggtacatacaacggttccggggaggggccccaccctgacatcaagctactgccgctctgggaaggaaagtcgcccggaatcggggtctaagtggccagggcactgccaggcgcaggccagccggcgcctcagccgaccacgcgcccgctctcatcggtaccaccgagggctggagagcagcgacctcgcagcggaggaaggcgctttgtcaatccccgacggggtgggggggcgtggattcctccaggtgggtgtggggggtgtgacctcgcacggggaggacaagctcggaggcggcagggaggtgagcggggcggccggccctggcggtccccgggggtctccgcccctccgcagccccgccccctcgtcccggtactccccctcgccccggcgcccggggggctcgggcagcctcggccgcggtcggcgcggctcggctcggcgtcgccaaggcaacagcggcttagggggcgggggcgacgtggcgggcggggtgggctgggccgcgctgcgcgggccgggccgtcggcgctcggtcggcgggcgggcggcgcgggccgcgagctgctggggccgagcccgagcccggcccgccctcggccgcgcggccgcccagcaagggtgcgggtcccgcgcgggtcccggcccgccgccgccgcgctaaccccgcctccccttccccctcttgtccccccgtgcgcag

SEQ ID NO: 415 - DNA, 20407 bp, Homo sapiens
gtatccgatccctcagctgctcccatctccgtggctcagccctggtcccgggggccacatggggggtcccatcctgagagggagggggcaggtggaggacagacagcaccgaaggctatggggcccagcgctgagctggcccggaaagagaagaggctcttgttagtttagataaatgtacccttgagggcgcacacacactgtgcttctgcaaccccgaaaagatgcactatttttgtttccatatattttaacacctctcatggcataccataatttaaatctttcttggtggtacataaaataatgctatatattataactgatgatggcttagaaccgacaaaacacagaatatatatcatagctattgaactgagtggtccccacaagcacacagactttttaaaaattacaaacctaaacaactttatggaaacagaacccaatgacccttaacgtctgactgttcatacccttctgcatttgtgcatgtacacacacacacacacacacacacacacacacacacacaccagagttctgggtcccttcactccctcgttcaggagcattactgtgtgtacctctctccagggctgtgccaggcaccagaaacgcagcgatgacatagacacattcctttctccacggagctcaggtctgtaggtcaggtggatgttggatggtttgttcatccattcattcactcatcagttattctggcatgcctgctgtgtgcaagcagaggaaagaaggttctgggtggcaggaacagagagtgtgcaggcctggctgtcactggatagcatcatataggggctccaggggagctggaagtgattggctattcacagtgggttgggagggggtcccacgggagctggcttttgagctgcatcttgaagggtccgtagaaaatggctaggcaaggacagagagagagagagagggacttccggggagggagaacagcagttgcaaaggtatggaggcaccctagaaatttcctctgcttgccatagggctggctcctcatcccttgggcatcagctcagatatcagctcctgaccacaccacctcaaggaagccctcttgcttttccgccatcacagcagcctgctcttctgtttcctaatacttagtgtcagcatgagaatgtgagctcataaggtcaggggctgatgtgtttgtggcatgcagaactgcttggtggagctggagttgaggggatctggaggacagtgtaggaggtgaggctgggaggcctggccgagtcaaggtcacgtggaacctccagtaccaggccaaagggatggggctttccccagggccactgattctctccactgccagtatgttataaaaatgccttaaaaactagcttattgtccttctttaagatttcagtccactgggccagggcagggcctgggaacctgcattttaacaagctttccccaggaggtgattctgagtccccagctgggggttgagcccatgggcaatgaggaggaagcctgcgctgagacgattcagggtcatggccctgagtttggccagggggtctcaggaagctggtctccagcctgcagggagcgcttggaggctgggacaagggtgacccccatcagctggagcgaagaccaagttctgatctctctggatccctggggccacagcaggcagggtgggccttcagggggaccctagggaacgatgactaataataattagtaatagtagccacctccattgatgaagtgcctactgtgtgccaggcactgggctcactgtcctacatccctgatctcttttttttttctttttttttttttttttgagacagaatcttgctttgtcgcccaggctggagtgcagtggtgtgatcttggctcactgcaacctctgcctcccgggttcaaatagttctcccacctcagccccccgagtagctgggattacaggagcctgccaccacccccagctattttttgtatttttagtagagacggggtttcaccatgttggccaggctagtcttgaactcctgacctcaggtgatcctaccacctcggcctctcaaagtgctgggattacaggcatgagccaccacgcccagcctacctgatctctcttcatccaggagacacacctacagctgaaacattggttaccccatttcccaggtgaggaaacaggttccgagaggtaaagtcacttgctgcccaagctccaactgctactaagtggcggaaccaagattcgaccccaggtctctgtgactccagggcatgaggcacacccatcctcaggctaggaggcggatccattgccccacacccccccagaaccccatcagcatcgcttttccggctatttccctttctgagttgctctaataggggtattatcacaccttaaagtttttataatttgcagctctttaagtgacagctaggatcagtgttttccctgtagtggtgtcttcattctgtctcccagggtagaaaccaccttcagtcagagccagccttgggaacctcgagctgcctgggactcaactcgcagtcccacctgcccggttagggtctgcaggatggagagcgtgttcaaggtggtcgttttgcccacttctcatggcaaccctctaggggaggcaccattagtgtgcccatttcacaggtgaggaaactgaggttcagaggtgaaattctttagctggtgtcactcagctcctgagtcaggactgccggacatctacgttttgtgtcctttcctgggcaccttggtccttaagagatgtgatttgagattctcttctgggctgggtgctgggagctgaggggactggagaactcagaggtggggatctgggttcaaatcccagatcttccatgacccatgtgatttcagtagccactgagcctctccgagccttgtgttcttgacagtaaaatctggaatgacagactttgcttggactgtggacttggtgaatgtggtcgcccaagtctgacccatggtaggtgcttcatggatgaaatccatcattaacatccaaatcgggtttccatttttggctgtaaaacatcagtaaagatctaggagggttggagtacaggcagaggacaaggtgtttgggggaaggtcagtggtgagcctggcctgggccttggggacagtccctcacacagaccctgtgcagggccagaagcaccctcctccctcccctagcccgtagcacacacttgctcacttacaggctcccaaaagctatgtcctcacgtgctcagctgacttttgctctgtgtagaccctcgagggaacccaggaaacatggttttgcctcggggaggcaggggagatgccacaggatgtactggaataactgccaccttcactgccatttcaaacccagatggcaggctgtcagcatctcttacaggggtgctccgcagggagaatcaatgagtcacggtgtaaggtctacaaggctcagcctgtccaccttctccatggaaactgaggcctgggaagggcttgtcagaggtcaccacccagctgacagcagttcaggagcctgggttgtttacaccatcacatgccacccctcctcattttgtgagtcagccgaggacctgcagccactctgtagggcattgaaggctcagtgctagtcctgcccctgcctcttgtagactgtatgaccctgggagagcctcagtttccccttttgtgaaatgtgggggatggactttgtaaggcagcgtacagttcaggcataaataggtgcttaaatgttctggtgcagtagctaagagaatgggctctagagagttccccgacccaggtttcaggccctgcacagcctcataccagctttgtggcttgctcaggagtggaacttttctgcctatctgggacaactccctccctcctatagggagagttggggggtaggggagtggctctccaggaccacacagtgctacgaggctggcatgtgccctgcaagttatagggggccctgaatgaggatgggggaaggggcctgggagtagatgaccagagaggcttcctgtgcatctgtggccatcagctctcaggctcctgagattcaaacccaggtctgtctgctctgtgccagtagtgtctcctggaagggaaggagggaagggtggcaggcagcaagctggggccctggatctgcatagaccaatggtcagactgggtctgggggctttgcatgtgcccacccagcttccccaggccctggaccccttagcagcaacagcatgctgttctttctctcctgccactccatggcagaggagccgtggtttgatttgggaggcaaagagctgatgactcttcctggtctccccacgagctccttagcctgctcccttccccagccccaaacttccctgttgcgggctgggtccttcctccctccctccttcctctgcccccacccccctcccatcaaccttgaggatggctggcaggcctggggtgtgggaggtggcagaggctcagggaaacttgacagccaattgattcctcctcgggaagttgaaagtggagagtcgtgtttgaaggtttagctgaaattaggtctcagggctattttttgcgagatggagaaggagaagtgtcagggaggggaaggcccaggggtctggcagaaactgcagataaactcaacattgggttgattatggatgcttctaggagcaggtctttggtttctttcaacaactcacttttattggtgcttggttgtgcacaccctgcataggatgctgtgacagaacaaggaacagttatctctggccaggaaggacagggaagaattcttaaagaagggactcttggggctgggctttgaggagtgtataggagttcgtcaggaaccaagggagaagagtatttcagttagtgaagtgaatagaaggaaacaagctaatggccctgtgtgattggagtgctggatgggttcagggcctggagagaagagtgagagaccttggtgggtgagctaaagcctttggactttcccctgcaggatacaagaaccacagtggatgatggctgtgagtggagctagcagtagacctctgagctgtggacctcaggttttccagctgctcaccccttttctcactcctgtagcctccctgcaccctccccatgtttcagctgtctttctgtcacacaaactcaagaaacaggcatgtgaacacaaacatgcaagctagtgggtgaccctcccgcccatgtcaccatggaaaggctgttggaaattaactggttcaacccttccctatacagaggagggactgagaatcatagacgggagggtcctttcctgaggtcacacagcatgtctagggtagggcctggagttgagcccaggtctctgtccctctcccccgcatccagtggtcctcaccccttactccttcctgtcctctcctcccagcacctggatatcagccaccccgtctgagctgagcccttctcccagcccccatcacatttcctgggaggaatgggtgttctttggtccaactgccctcggagccccacgacagctccttcccgctcatctgcacactgccccctcctggccaccaggccccagccccagctgtagagggacccgaagtttgggctgcgggctgcctgaaggaggaatgcatgacttcaggtccaggagggggcattctctgctccctgcagagccggccccgctgccccccatttgtgccccttccaagctacggaggctccgggtggctgttggggtggggaacagaaaagccagccaggctcacagatcagacaagccagatctgtcccagggtatatggggaaactgaggcctggagaggagcagcttgcccaggatacttgctggggctccctccactggcccaggctgctgtgggtccatctcagatggtcgttcacttgggacatatttatgtttgtggcccatcaaccagtggagggatgtcagccacgtggtcctggctgtaacagggcggtagtgctggacccctgggtggggtcccaccatgggcgccccagttttctccttgaagtatgaggaatttgcttagttctgctctgtgagtcagtctcctgacccagcatccggcgtgtattcagcggatgggcggggtggtggaagagcaaaccctgccccctccgccccctccaccctcactccctccatccctgcccttcacggaggctgattggtattaaactattcaaacccaaaaggaacattaccgtcattttggtctgtgtctgccttccgcggggggcatcccccttttctgcagagggagtgttggaaggtgggactcaggagttgtccggggtggccagggtggggcaaggatgttcttcggggcaggagtctggggacagggggtcttggagcctcctgaatccaagaccaggctagtctgaggcctgggacagaggtgggactgctgcagtattggtagggttgggaggctgtcgccccaccccattaatacacaggaaggtggtttcatcagctccattttacagttgaggatcccaggcttagggaggagagaggcctggcctcagcaggtctccagctggtgggtggtaggggcaggagcccagctctcgtctgcgagccttgctgcggtgtgaacgaacttactttcttctctccttttgcctttctttattctttctttcgataaatttgccatcatcaccaactatgtgtcagggcctatgccagtcattgaggatacaaagaggatgaaaacgtagttgctacctgcagaaatacagaagggccagccggggcttggtgaagtaatttccaggcaggtgaaggggaaaggacattccaggcaaaggccaggacatgggaaacagcatgagcaaatgacagcaggaactgagcgcagtttgggggctgaaatgtgaggaagtggctggaatggaagcgacaagagatccacggcagtgaacagagcagatgggatctaaggccatattaacaggagtatgaggtcctcagcaagggaggtgaggtgggccagagtaggccagagcagacatggagtgcagcatacttgaccaggctaggagagtctggagctccttcagtgggcagagaccaagactgggtggggatccagcatggggttggggggacaagcaaattgcttttctcaagcaggttctcaggagcctgttccaacccccccaacatctgtgctcagaatgcccttgggcaggggtagggggaagagcccacttcaaggatccctggaatcttctgcctcatcctggcaagtggcagctggcttgggcagtgtgagtgaggaggatggaagtgaagggaacaagccagcctctgtaccccctcctcttcctgccctggggacttccaaatacatcagaaggccatccctgtaaattccatttccccagccctgcacttaagcctgttgggcagcatggaatcagatgaactggttcccgttaaggtgtaaaggccaccaccccagtccctgccaggttcagtaactggcgagtggaatgctctctgtgggggcctttcttcctctcttcacacccactcagggtcttggggtacagtgctggcctctcccagggatagtccccccaacccagggatgaagcaggattagaatcttggccactgctcccttctgtaggatggctcaggcaagttgccccactctctttccctgtctgtaaatgggcaggaacccctccccacagagtggctgtgagggctcagtgcctggcacaaggcagcattccccacacctgttccctttgcttgtgtgaggggtgcacctccaccccacatttcctccagagccccaggtaactgggcagacccctcccacttccatacccttccgtcacggccccaaagcaacatcacccctgactgaacttctagggctcagccctggcagtagaaggtggagaggggctggaggggttcctaggggaccagagaccaagttcttaggtggtgagttcagatggagatggaggtgtctgcgcagggtggtttcctgccagttgggggcagcagagggtagcaagtggacttctgggtggctcctcccagtgagtgttgaagtcccaggggtttgtgtgtcaggggccacagggagctggcccaacaaggtgttagctggctaaacaaggtgtagaacatactgctgggggctgggagcagctcagatccgggagcacctgtcaatggctgggcctggcatgactggctgtgccagctgggcctaggttgaccagaaagccaggggttctgaaaggggaccctggtcagggacactggatggaacaaggtctggggctgggacagctgtccaccaagagaaagggcacagggtgaggtggaccagcatgtgatctgtcaggcagggctgctgcactgtggtcaccaggctggggccaacagacactcagtcactgccaccctttgatgggttataggcacctgttccacctaccactgctttgagagggggtaaggcgggcattgtgggagaggcagggtggtggtcagagcttgcactccaagtcccactggcctgggttcgaatcccagctctaccacctctgctgtctgtacgatgggggattttgaatcctgttctgcatagtactctgagtcaggccctgtgctgagcactttctaagtattgtctcatttaatccttacaactcgaggctcagataacacaaatctcactcatagaaggtgacaaaatcaaggcagatggggagtgaagagatagctgagggtggctcctctcatgggcctggatcttgaagttctcacagcgcctggaccatagcatgcagcccagtctttgctagtcagtgctgtttttctcttcatcttacggacgaggatgttgaggcccagagaggggaggtgcattgtcctgggccacacggcttgcagggacagagctgagatttggacccaggcctccccatctctctgccttatcttgtcctgcccctactttgagcaggcctggccctaggggtcagacacccctgggataggagagaactgctctcctcttgtcatcctgccctgtggccctgcaggtcctcccctttcctgggaggtgggggagcctgcatgtcaggggcaaggctcagacgccttcattttcccacctcctcatgctacaaaaatgaaacgatcaagtggtattttggtgggattacagacataattatatctgagttgtcaagcggcaattgttgtttccaaagccaggaggccctctgtggaggtggcagcagtgacatctgtttctaacacaaggctctgcatcgggatgagtaacttctcctgtggaattgcttaaagaacgtctaaaacgagctgagcttgttactcccctgctccagcaccttagatggctcccagcagggtgggggatccagctccccggcctggcattcaagccccccaggctgtcccagcttccacgcctttgtgtgggcggatccttctacccacaattcctccccatctctctctgtctccagagctcactagtgccatccagggctctgtccaggttgcagaacaccccatctgtacacgctccctcacggactctgtgacttcatgatccatcacttctgtctctcccaccagacggtggtcaccttctcaaggacagggactgtttctgatttgtctgaactcccagcactggggcaaggactcacctgtggcaggctcatgaggggcttgcggaatgaaggtgcacgagacagagagagacagggagtaaacgaattaaatggagtaagcgcagggtgagcagggaagagggtgagccgtgacctctccacttctgccagcccccacacttctgccagcccccacactgggtgtctgaggccagagtggtcccctgccttgggaggacaggtcaagacaagtgacccagcccaccagaggccagcaaggacaccagcccttgccttgaaaagtgccggacgtggtggctcatgcctgtaatcccagcattttgggaggttgaggtgggtggatcacctgaggtcaggagttctagaccagcatggtcaacatggtgaaaccctgtctctattaaaaacacaaaaaattagccgggcgtggtagcgcatgcctgtaaccccagctactatggaggctgaggcaggagaatagcttgaacctgggaggtggaggttgcagcgagctgagatcgcgccactacactctagcctgggtggcagagtgaaattccatctaaaaaaaaaaaaaaaagaaactgaccttgactccaccccatacccatgggccttctgaggccaggactcccaggtgaaccttggcccgcagatggtaaatcacccaggagaaatagcctataaaatcctctcctaaaatggtgcattttgtattctgtagtgaaaagggcttttaaaagcactgcttactcaggtggatttatggagtttcccccacccctccctcccactagtgtttactggtcctcagtcctggagctccctggggtcctgttttttccttggtggctcttggtccagggagagaaacaagatagcatctctttcctgccttgctgccttggggccccccgggccagctgggtgcctggaagtgcaggggaatcctacccaacagaagctccctgtggcccagcgcaaacctgaaagtcccaccattagtgcccatttgtccccgggagactccccccccatgtgttgtcacctgcaaatgggtcaccagggaggcacaacaaagctggaaagaattcagagatcagctagactaatccccgcattgtacagcagggaaactgagtcacagagcagcttaggtgctggctcaacgcctcagtctggtaatggaattacatgagagctttagctctggagcagcctgtctgctgtgttgaacccagctctgccgcttcctgaccgtgcggtgctgtgcaaattagttgccctttctgaacttctgttctcccatctgcacactgggttgtgagaattaaagagaagtcatgggaagctctaatacagtgcctgaagcttagacagggcttactaaacacatctgactaattctcagcagcgtgttggaagagccctcattagtattaatagcagagctgggttttgaccccagacttatagactccaaacgtggttttcttgccactcatgcagtgcacagagcacaggataggggagttttgctggggaatgagcactaaagtcagcaagccccgggaggactggctgggacctcagtgataggacgtgcaggcaggcggagatagtatagaccctgctgcaggggtgtaacctcctggtggaatcggcttccttgcagccacgaggccctgggtatccaactccccaccccttagccagggctggctgagagcttaaagagctgatgaggtgtttgtagccatccagacctctgggacaggcttattatgctaaggcaagtgtcagctggaggatctatgggacaatgagtcactccctggctgctctgggttgtcacatcccaagctgagaccttgggaatgcgtaactggtttctgttcgctgatgcccgcctaatcctgggcactggcaggtaccaggagggctctgctgacgtcctcagctcccctcccagcttcacctttaccctcttcaaatctgggctcccctctttttcctccgttagactctcagtgttccttagggttcccctttacttgggtgtcctctgccctggggaagggattacaagcccaggctcaggtggtggtgtataacttggaggctggagggacctgtgataactccaggggcctcccagggcagccagactccccgctgtcctacctctacacctctgcttatgctgtgagtctgcctggaatgcctttatgtggctatcctgccccagccaatctcagcaagcccacctgctgtcccaccttcaatgtttctaaaatgctgtcaaaagctgcctcctccagcaagtctgcccagattgctcccaagtgaaatccttttaaaaagccccacagagcactttatctttttccttttatatcattaaatatttgtgaattcattcaagaaatattgagagaatacctgccaggcgtccagcactggagacccaggttgccatggcccctgctctggaggctttacagtccagtatggggtgggggaggcactaaacaaacacacttataattacaactgtggtaagtctacagggagacctggcctagtgtggggacatccggggaggcctctaagagaaagactgaggaggtacctgaagggtgtggagagtcttccttcccaggcaggaggaacagcccaggcccttctggctaacggctgggctggtctctggtggtcaaaggaagtgatagcagtgagccgagatcgcgccactgcactccagcctgaggacagtgagagactccatgtcaaaaaaaaaaaaaaaaactatgaccatgaaagtgatcatgaccgcaatgatagcagttcgtatttattgtatgcagggaaatgggctaagtttcttccatgcgtgatctcattgaatcttcacaactacctcgtccccattttacagaagaggacacaggcatagaaggttaagtcatgagcccaaggccccagagccattaagtggtggaatcccctgctcccaccttcttccggaggaaggatgaaaattatttacattttacctggggattcctagagattgaattacccttaggacctaaagaggtgtgtcaaacagtggaatttcagctgtactgatgggcaggagaaatgtttagggcaggaagcttcagctcttgccagggaacagaactccaaaagtcacaggttctgggagctgtaagctgtaaaaacgagctttgagtgtgagagaagcaaacaaattgtccaaagtgaagccctgcgagaaaagcagggggagttatcttggaagccgttaagagctgttttcttgccttggtcctgagatctgggctcctaactctggagcttcctgggccacttgcccttcctgtcctggttgtgaatgtgagcacgtgagggccagcgtgtttagcttgtgtgtctgcacaattctgctggtgcctgatgatagctgagtacatgtgtatatttattggcttatttcagtgtatttgtatgttagcttgtatgtttcatggctgtgtatgtgtgtattcgtgtgtgtgctgatcaatgtgtatgtgtttgtgtgtgtctgtatgtgtggtggcactggggtacttgtatgcttacacatacatttctttgtgggatgcctttcctgtgtgcatttgtatgcatgcctgtccttgaacttgtgtatgtttctggccctgtatatttctctatgagaacatgtttaagtgtgtctttccaggcagtattttaactcaacagtgaccctagagtgtcagggtccagcctcttcctggggcttccctgaaggctctcaaggcctatgaattggttttctttgtttgacttaagtagtctggctaccttctccaggcggaatatgtggcgatctcactggtatgagattgtagaggattctgtgggcatagggtggcctgtgagtaggtggccaccaggaagtcaccaacttaatcccagcttaaggtgcctcccctctttcgcctgtcacagtgtctgacattccattagtgagtcattctccagctgggactctctttgatggtgcatacccttgaggggaggaggccagagaagcccggcagcctgctgagggtagagaccggggaacagggaaggggagggcaggaggaatgacgcatctgaaggatttgggcaaagccagagaattccctgatgccattagtgcctagcttggggcggcccaggcaccctggccctggcagctgctctgactttatagaatcatcaaatatcagcgctggaaaggagcttggtgatcacccagtctagcccctagtgttgtagatgggaagactgtggcccagaaagaggaagtgtgggcagactgggaggttcttgaagcgtggatgctgaagatgcaaagagcactgggcaaggagcaggggacccaggttctaatggctccgcctggtgacgctgggcaggtcccactgccctctgggcctcagatgtctcctcagtgtcactggcctggctgccctctgtgggccctcctgactctcactctgtgactctggaagcaggacccccaccacccccagcccttttctagtgcccccaccagcctgccgcggtgtcaggtcggcctgccagctcatgcacccagcatctctcccctcctggagccgagagaggtggcaggatctggatgggatcttctcctccctttcctgtttatttagatgtgcttttggcattcgggcaaagccccagaaagatattgagagacatgcctgtcaaaacagtctcccttctccaaggctctctctttggggatgggccttagaaactgccatgggaggagccgggccttggcggagggagggcccacagggttctgcctccatcctgagtactgtcttggggttccccagtgggcagctgagagcttaacgggtgacaaagttctgccaggcccacatgcccatctgcagcagcccaggtcagtctgttgaaaggggagagggtgatgaagacaggcctggaggaagaatgcaaggacaaatagatgctgggcttgggggaaggaacccgcccttgattgagcacctactatgtgctaggcatgttgctcagtgcttcgtattcagttgagaagcagtgcctttgagaccattggtgacgtggggctcccgggtgtccaggtggcggtgctgaaatgcagatccctggttccctaggggctgcctcctcggctgggagtgtggcacagacaaggacagcactgggcaaggttcccctccctgggggtgggaagcctccaggtcttcactgggagcccctgtgggacagctctgcactcagggagtgagcgggcctccctttcttccctcccgccttggctttggtccttgaggcctagtacagtgcctggggctgagtgtggggaggatgatcagagctgtccatctgtttccctatatgggggagtccccacgctgcccatcccaggggccagaactctcttggttacagtcccagctctgccactttcagcaggtgacttaacttctctgagcctgcattcccccacccggaaatccaaaacatcctgaattctgaagctcttatcctcccaaggattcctgataacaggcattgggcgctcctaggcatcctctcctagggtgggagtgattcgtcagaacagaagcttgattgctggtaatatatcatcatcatcatgtggaattcattgaaatgagtgaatgaagaaatcacgtgtcttgaattctgaaaggcctttgagacagtcgttcaggaccttctggagaagcagcagggttgtgggccagatgtcaggatggtggtgtagctctactcctggggtagtagagctgcttaagaacttgggtccttccagccaaagaccccccaggcctctgacccccactcaaactgccctgtgctttgctcagtgatatgatggaagcctagggcctaggggatcagctggcataggaagggtgtccagatgggcaatgggccatccacagagaggggcgggggctacacagctatccacgcccagccgtcagggaatgagctgggggggtggcaccaggcagcagccttgtgcagcagccttgtgcaaaagccctggggccttggttgacctcagcgtcgtggcacagctgcctgacaagtagatggggacatgggctgctttaatagaggcagagtgccccatctggggagggagccgcgggtccctgcagactgtgtaggctgcttgctgagctttagacatcagtccttgctccagtgaatgaaagctgaggcctccacctgagcagccctgcctgccccgtgcactttgggcatcgggagtctcagtgaggttgctttaggaaaaaaaaaaagtgcttgtttaagagagttcaaaactaccaaactggatgacattctgcggctccagaatcattttgcaagcatgttcattcatgtccctgtccccctgccgggcggcccacagcctccttggagagcccagactgactcccacccttggttgtcatttatccatttgggcaaaaagaggtggtggtgctcagccaacatcagtattggttgcaataaacctactactctgtgtagttgcttaatagttactgtctttctggcgacattgtacctcatttcatccttcccaggtcccataaagtaggtatcatcatcagtttattttacacatagggacactgaggttcagagaggtccagtaatcggcccacagcttgtctgaatgaagatttgaggccaagcgatgtgagggggctagagctgcccagtgggaatggtcagcaagcgtgggctcctgtggtccagcgccatctgcaggagaagtgggatacagccaggccttagtgggtgtggctagggggtcatagtctgtccctaggcaagggagtgattatggggaccacctataatctttgcagatgagctaggcccgacacatgtcactacaaacggagtgtttttaacagtcctgtacatgtatatgggaattgcacatggcttttgttgagcacttactgtcggctacactctgagcctagagctttatcagtttttcgtttttgtttttgttttttgtttttttgagatggaatcttgttttgttgcccaggccgaagtgcagtggccaaacttggctcactgcagcctccacctcctgggttcatgcaattctcctgcctcagcctcccgagtagctgggattacaggctcgtgccaccacgcccggctaatttttgtatttttagtagagacggggttttgccatcttggccaggctggtcttgaactcctgacctcaggtgatccacccgcctcagcctcccaaagtgctgggattacaggcgtgagccaccatgcctggcaactttatccacttttatctgccaatttaatcctcactgcagccccccacccacttcagagagaggcaaggggccttagctgtcttctcttgcagtgaggggtctgtggagctgggtttgacttggttcttagccactgggctgtcagtgggctccactgcggtcccggaaagtgggtatcaagaaccctgtttgactgaatgatttgcccactgcccctcaattaaaggttgtcttgggtctagaataagagtttctgacttgaagaccagtcagcccctcttcccaagttaggggctgtagctgcctccagaaatcaagtcccaggagctgcctctgaagggacagcagaaaaggtttgcctcccttcatctggcgaagagggagaggacgcccttggccctccacccccatgaaggagagcaacaagctgtgtggctgggcagagcagagcagaggactggagtccacggtccttgattaaccttgctttgtgatcttggggaagggccttccctactctggtccccagtcaccctgtaatacagcctttgcatctgagtccccttctggcagtggctttccaagatgatgagtatttgttaagtctgtcatatgcagggtcctgagctgagttctctgggggacacaggtctctaggtggatgtgtgatgtgatcggtgggtgggtcaacgggaacactctctgttccctggaagaatctcttttcccatgatctgagctccctgacctcttgaatatccatatactgctcactccataatgttcatggctatcttggccactgtgtctagcacataatggctctcattaaggtgaaagagtgaatatgacagggtattaggagtccccaaggtcattgtcagtttgggtgggggagttaccattctgagtaggctttaaggaggaggctgcttgtcagaggaacattaagtagagtcacagggggtggagtggggaagaggaagtggcacatgtgcatcaaacctcctagacgggagaaaacttttttgtttaaactcagaaataggataaagccatcaatattgctccagaatgagctacataaattgtgaaacatgcttctttgttcttcatacctcaagattgcaaaaattgtgaaattttcatcagtgtagaaaataaaaaccaagaaaaggtacaagcccattgggataacttgcttgaccacaacccctgggagaagagaacccatccaaattagccaggtgcagccccctctcctatagctggcaagaggcagagtttgggagagctcagagctcacgcagaggtgcaggcctctgcctccatgccatgtgtcctggagagcctagtgctctcctgacctgccaccgtttggggtccctctgcattaagcattgccttgtctatgggtcatgcctctggagaagggtccctcctgcagcccctaatacctaagagatatttgtggcggctgattagaataccctgatggataattccaggctgcagaggtgagaggcatttggactccactgcctgggatggccttctggtgaggtatcatttcagctgggccttgaaggacacgcagaatcccaacaggtggccacaggggtatgtctcctgtggatatgaatggctgaggaaggaggaaaaggcagaaggagaaagataggaaaagggaaatcttgaaagctcttgaattagccaggcccggaagctgggtgtccttgggtaagtcactttacctgtctgagcaagcttcttcatttgcagcaaatgtttttctgtcattttctgtctgtgcgggtgacatgagatgacttgtacagcccatgtttgaccttgtcatgttgaagatggacagatacagcccagggcctgtgccaaacatccactgctcctcttgaacacagagagggctgccaaactgaccctttattttgtgatggatggaatgtggtatttggattatgtacattaacctcaaattaaattaatatcccacttgccacctggaattgagactggggtgggtgagcccccagaacacccccctctttagaggactccccctcctccagttttcctctccctcaagctgcctgtagtttccaagcccggcaggacacaggctgtgtcccctggggcccccacatctatcccgtcacctgtaaagggaagattggtttgacctgtgtgtattgaacgcctgtctcctctgtctctgccattagaccaggagctcttgggatgggggaggtgggggattaagctctgttttcagtcagtgcaacctgttaggtggataaatggcgtgaataaggttccccaaatcttgaagcttttaatggggatactcagcaaacccttcagcccctcgggcccctccctgagctgagcactagggatcccgtcccgcaaggtggttgtccttgctggggtacatacaacggttccggggaggggccccaccctgacatcaagctactgccgctctgggaaggaaagtcgcccggaatcggggtctaagtggccagggcactgccaggcgcaggccagccggcgcctcagccgaccacgcgcccgctctcatcggtaccaccgagggctggagagcagcgacctcgcagcggaggaaggcgctttgtcaatccccgacggggtgggggggcgtggattcctccaggtgggtgtggggggtgtgacctcgcacggggaggacaagctcggaggcggcagggaggtgagcggggcggccggccctggcggtccccgggggtctccgcccctccgcagccccgccccctcgtcccggtactccccctcgccccggcgcccggggggctcgggcagcctcggccgcggtcggcgcggctcggctcggcgtcgccaaggcaacagcggcttagggggcgggggcgacgtggcgggcggggtgggctgggccgcgctgcgcgggccgggccgtcggcgctcggtcggcgggcgggcggcgcgggccgcgagctgctggggccgagcccgagcccggcccgccctcggccgcgcggccgcccagcaagggtgcgggtcccgcgcgggtcccggcccgccgccgccgcgctaaccccgcctccccttccccctcttgtccccccgtgcgcag

SEQ ID NO: 416 - DNA, 110 bp, Homo sapiens
ggggcttgcaggagctttcgggacactttgagaaccagaaggtgatgtacggcttctgcagtgtcaaggactcccaagctgctctgccaaaatacgtgctcatcaactgg

SEQ ID NO: 417 - DNA, 113 bp, Homo sapiens
aagggggcttgcaggagctttcgggacactttgagaaccagaaggtgatgtacggcttctgcagtgtcaaggactcccaagctgctctgccaaaatacgtgctcatcaactgg

SEQ ID NO: 418 - DNA, 222 bp, Homo sapiens
ggggcttgcaggagctttcgggacactttgagaaccagaaggtgatgtacggcttctgcagtgtcaaggactcccaagctgctctgccaaaatacgtgctcatcaactgggtatgcggccggggctggggaagggggctgagggcccagagctgctcatcaactgggtatgcggccggggctggggaagggggctgagggcccagagctgctcatcaactgg

SEQ ID NO: 419 - DNA, 225 bp, Homo sapiens
aagggggcttgcaggagctttcgggacactttgagaaccagaaggtgatgtacggcttctgcagtgtcaaggactcccaagctgctctgccaaaatacgtgctcatcaactgggtatgcggccggggctggggaagggggctgagggcccagagctgctcatcaactgggtatgcggccggggctggggaagggggctgagggcccagagctgctcatcaactgg

SEQ ID NO: 420 - DNA, 166 bp, Homo sapiens
ggggcttgcaggagctttcgggacactttgagaaccagaaggtgatgtacggcttctgcagtgtcaaggactcccaagctgctctgccaaaatacgtgctcatcaactgggtatgcggccggggctggggaagggggctgagggcccagagctgctcatcaactgg

SEQ ID NO: 421 - DNA, 169 bp, Homo sapiens
aagggggcttgcaggagctttcgggacactttgagaaccagaaggtgatgtacggcttctgcagtgtcaaggactcccaagctgctctgccaaaatacgtgctcatcaactgggtatgcggccggggctggggaagggggctgagggcccagagctgctcatcaactgg

SEQ ID NO: 422 - DNA, 290 bp, Homo sapiens
gtatgcggccggggctggggaagggggctgagggcccagagctgctcatcaactgggtatgcggccggggctggggaagggggctgagggcccagagctgctcatcaactgggtatgcggccggggctggggaagggaactgaaggcccagagcagtcgccctccccgtcggccctctgacacccgtggagagggaagcccaccctcttcccaccccggggaagatgcaccctatcgtgtagggccccccttgtcctttcctgaccccctctttgctgggtactttgcag

SEQ ID NO: 423 - DNA, 178 bp, Homo sapiens
gtatgcggccggggctggggaagggaactgaaggcccagagcagtcgccctccccgtcggccctctgacacccgtggagagggaagcccaccctcttcccaccccggggaagatgcaccctatcgtgtagggccccccttgtcctttcctgaccccctctttgctgggtactttgcag

SEQ ID NO: 424 - DNA, 234 bp, Homo sapiens
gtatgcggccggggctggggaagggggctgagggcccagagctgctcatcaactgggtatgcggccggggctggggaagggaactgaaggcccagagcagtcgccctccccgtcggccctctgacacccgtggagagggaagcccaccctcttcccaccccggggaagatgcaccctatcgtgtagggccccccttgtcctttcctgaccccctctttgctgggtactttgcag

SEQ ID NO: 425 - DNA, 146 bp, Homo sapiens
attatcgacgaggctgaccggatgattgacagcatgcatcagtcctggctgccgcgggtggtggcggccgccttccagagcgaggaccccgcggacccctgtgccctgctccagcgaaggcaggcccaggctgtgacagccgccag

SEQ ID NO: 426 - DNA, 318 bp, Homo sapiens
attatcgacgaggctgaccggatgattgacagcatgcatcagtcctggctgccgcgggtggtggcggccgccttccagagcgaggaccccgcggacccctgtgccctgctccagcgaaggcaggcccaggctgtgacagccgccaggtatccagcagcacgcccaggtgctggcctcccctgagcagagtcctctgcacacagctctccttccttaatgcccagagataagggtggcttgagctctggtgcacagaaccgcatcgtactgtcacgtgagctggacccaccttgctcctggtctgcggcagtctctaca

SEQ ID NO: 427 - DNA, 254 bp, Homo sapiens
gtatccagcagcacgcccaggtgctggcctcccctgagcagagtcctctgcacacagctctccttccttaatgcccagagataagggtggcttgagctctggtgcacagaaccgcatcgtactgtcacgtgagctggacccaccttgctcctggtctgcggcagtctctacagtgcgtagcatgaggaatcctgttccctggaggttcggggcagccactggtagggtgccagcaacacccccttctcttccag

SEQ ID NO: 428 - DNA, 82 bp, Homo sapiens
gtgcgtagcatgaggaatcctgttccctggaggttcggggcagccactggtagggtgccagcaacacccccttctcttccag

SEQ ID NO: 429 - DNA, 774 bp, Homo sapiens
aaacccgcggcactaagctctctctgagaggcagaattgcgccggccgccggcgagaatctgcctagagccgtccagccctgtcggccggggacgacagccgcctcagcctgtcaggacagtgaggagagcaggggccgagtctctcggaagccctcgtgaggactcggacctattcggactgattcggcttcccacttcggggaacttcgaccctcctcggttcaggactcggtctcggctcggcggcttcgtgcaggttcggctcctactcgggcagcctctgttcgcctcggctccgctccgcgggcggactcggctcggctctgctcggcggctggctgccttttcggtccctattcgggcggcggcttcgggcggcctcggcccagctcgggcgtcctcttcgggccccgcttcgggctccgcgaccggcgcttcgggcggtcccggacggcgccttcgggaaggctcggcggagtccggatggaggactcggactcggcggcaaagcagctgggcctggctgaggcggcggcggtggcggccgcggccgctgtggcggcggcggccgcggccgcggcaggaggcgaggcggaggagccggtgctgagcagggacgaggactcggaggaggacgcagactcggaggcggagcgggagacgccgcgggtcacggcagtggcggtgatggcggcggagcccgggcacatggacatgggcgccgaggccctgcccggccccgacgaggccgccgctgccgcagccttcgcag

SEQ ID NO: 430 - DNA, 854 bp, Homo sapiens
aaacccgcggcactaagctctctctgagaggcagaattgcgccggccgccggcgagaatctgcctagagccgtccagccctgtcggccggggacgacagccgcctcagcctgtcaggacagtgaggagagcaggggccgagtctctcggaagccctcgtgaggactcggacctattcggactgattcggcttcccacttcggggaacttcgaccctcctcggttcaggactcggtctcggctcggcggcttcgtgcaggttcggctcctactcgggcagcctctgttcgcctcggctccgctccgcgggcggactcggctcggctctgctcggcggctggctgccttttcggtccctattcgggcggcggcttcgggcggcctcggcccagctcgggcgtcctcttcgggccccgcttcgggctccgcgaccggcgcttcgggcggtcccggacggcgccttcgggaaggctcggcggagtccggatggaggactcggactcggcggcaaagcagctgggcctggctgaggcggcggcggtggcggccgcggccgctgtggcggcggcggccgcggccgcggcaggaggcgaggcggaggagccggtgctgagcagggacgaggactcggaggaggacgcagactcggaggcggagcgggagacgccgcgggtcacggcagtggcggtgatggcggcggagcccgggcacatggacatgggcgccgaggccctgcccggccccgacgaggccgccgctgccgcagccttcgcaggcaagtgcgcccgccggcctctcgcctcgtccggttcccgcgcgcctaccccgcgcgcctgccccgcacaactgtcccag

SEQ ID NO: 431 - DNA, 3160 bp, Homo sapiens
gcaagtgcgcccgccggcctctcgcctcgtccggttcccgcgcgcctaccccgcgcgcctgccccgcacaactgtcccaggtgaccagcccgccacacctgtccctcacacctgctccacgtgaccagcccgctccacccgccctgcacacctgcccctcacacctgctccacgtgacccgcccgccccacccgccctgcacacctgccccacgtgactagctcacccctcacatctgcctctcacacctgccccacccgcccctcacactttccccacgtacctgctccaggtgaccagcctgccccacctgccacaaatacctgcctcgcacacctgctcgacgtttccagccttccccacctgccccacgtgatcggcctgccctacctgccccgcacacctgccccacatacctgccccaggtgaccagcctgccccacctaccccaaacacctgccccgcacacctgcccctggtgacctgcctagcctcacctgacctggccctgccctgcacacacctgccccctgccccccttttctttgtggcagccccgcctcctactggtcccccctgtgcagctctgcccctgccctgccttcgtccatcctggctccccccacctgtcctggagaagccctggggtgggtgggcacctgtggtcaccaggaaccccccacttcctgagggccagttcaggcatgacctgagcgctggggagccaggggtgggcagcctgctggaggccatgatgccagaggtcagcgtggctgtgtggtggcccaggggggctgcggagccacctgtgcaggctcccctcccagtcctccctcttcctcttgcctttttccctaaggacctgctcctcctgccccgcttcctgtcgggcttcctttggggaggctgctgtggctttccagtccacatttttatataagctgcttatagtttcttgccacacaggtcagtctccttctcaggctccaaaacactgggagcccgtggcagagctcacagatgccctacggggctggtgccgtccacccacctcctgtgtcccgcccttgtgtccgtggggcatagacttccccacccactggcttcctaacgcactgtattcttccccattggagttcccgagtgtcccccagggactcacagctcagtgttgagacccttgggaggagcttcttgttgcgttgtgaggcacttttcccctacggagctttgcgggttgaggaactggatcccagtcctggtgtgctgggtatgtcagggcattgcgtgtgctctgggtgcttgttcggcctgggggctgggtgggggccagcagcgtctgggctgcccttggtcagctgagtggccctcgaaggcaaaggggtcactgctgcttgtttggttggttaagaaaaaaaagtgagggaaggctttgtgactctcaggggttggcgtccgtcgctaaactctggtttgacgttgggatttggagccatgaggttgatttcaggtttttgtcatttttgcacgtatttttctgaatgcataaaagaaaaatgatgctgttcatcatgatgtcagagaaatgtgctgacgtgtgttttcttctgaaaaatatggtagttgtgttttgatgtggtaaaagcactttaatactttttaaaaattacgaacagctgacgtcaagtggtttccaggtttaagtaactcagcaggacacgctgccgcctgaggaggctttgggcggctgctcccagggctgccatgggcctggcgttgagcactcactgtggccgcgcgccgcatgccggggcttgtggtgctgagaggcgaggatgagggaaccgtgcacctggtgtggtctggtcgtggagacagacagcaaacatgcctttttttttttttgagacggagtttcgctcttgttgcccaggctggagtgcaatggtgtgatctcagctcaccgcaacctcccgcctcccgggttcaagtgattctcctgcctcagcctcccgagtagctgggattacaggcatgtgccaccacgcccggctaattttgtatttttagtagagatggggtttctctatgttggtcaggctggtctcgaactcctgacctcaggtgatccgcccgccttggcatcccacagtgctgggattacaggcgtgagccaccgcgcccggctgcaaacaggcatttttagggcagtttggtgagtgctgggttaatggtatggtcaggactcattcaaccagtatcttttaagcatctgctgtgtgccagagattgccctggacacaggacattctagaactctgggtgacagaagagccacttgcttggcctaggagcatcacaggaagactttgcagaggcagagaggagggtgtgggggtgttggcggcagaaagtgtttctctagaaacactccagcatgtagaggctggagctgcaggacctatctgggatgacaggggcaggaggtggggtgcagctgacctctgtggtaactgccctgtgtgcagatgctgctgaagggcctgtctgcatgccagggggctgagttccatgttgtagggggtgcggtggggtggcaccaagggacataggcaggttagatgtactttttaggaggaaggggtcagagaccaagggcaatggctgtgagcatggggccgaggtcacctgacgatggtggcctgacccctgcggtggaggagaggcaggaatggagctacaagagtgggtccaggaggtgtcctcacctgcggggaggccgagagctcctcgtaggcatagggcacacctgaccagcagaacccacagctgtgccgcagaaggagatagaagccccgtggtggtttgatagagctggggctggctggggtggcgggtttgttgtatgcattttttactgcacgtaaaaggctttactggggaagaatagatttcctctctttttcctggaagagccgaatgacttagacaatggaatagaaatgtaggtcgagcgtgttcatggaagtgttaagatcttcctggttacaagggcacacacctgagggggagtcactttgtttgaagcacctgagcgaggctgttcgctttgtccattctggcttttgttgcttgttaaatgaggctccttctgttgcag

SEQ ID NO: 432 - DNA, 3080 bp, Homo sapiens
gtgaccagcccgccacacctgtccctcacacctgctccacgtgaccagcccgctccacccgccctgcacacctgcccctcacacctgctccacgtgacccgcccgccccacccgccctgcacacctgccccacgtgactagctcacccctcacatctgcctctcacacctgccccacccgcccctcacactttccccacgtacctgctccaggtgaccagcctgccccacctgccacaaatacctgcctcgcacacctgctcgacgtttccagccttccccacctgccccacgtgatcggcctgccctacctgccccgcacacctgccccacatacctgccccaggtgaccagcctgccccacctaccccaaacacctgccccgcacacctgcccctggtgacctgcctagcctcacctgacctggccctgccctgcacacacctgccccctgccccccttttctttgtggcagccccgcctcctactggtcccccctgtgcagctctgcccctgccctgccttcgtccatcctggctccccccacctgtcctggagaagccctggggtgggtgggcacctgtggtcaccaggaaccccccacttcctgagggccagttcaggcatgacctgagcgctggggagccaggggtgggcagcctgctggaggccatgatgccagaggtcagcgtggctgtgtggtggcccaggggggctgcggagccacctgtgcaggctcccctcccagtcctccctcttcctcttgcctttttccctaaggacctgctcctcctgccccgcttcctgtcgggcttcctttggggaggctgctgtggctttccagtccacatttttatataagctgcttatagtttcttgccacacaggtcagtctccttctcaggctccaaaacactgggagcccgtggcagagctcacagatgccctacggggctggtgccgtccacccacctcctgtgtcccgcccttgtgtccgtggggcatagacttccccacccactggcttcctaacgcactgtattcttccccattggagttcccgagtgtcccccagggactcacagctcagtgttgagacccttgggaggagcttcttgttgcgttgtgaggcacttttcccctacggagctttgcgggttgaggaactggatcccagtcctggtgtgctgggtatgtcagggcattgcgtgtgctctgggtgcttgttcggcctgggggctgggtgggggccagcagcgtctgggctgcccttggtcagctgagtggccctcgaaggcaaaggggtcactgctgcttgtttggttggttaagaaaaaaaagtgagggaaggctttgtgactctcaggggttggcgtccgtcgctaaactctggtttgacgttgggatttggagccatgaggttgatttcaggtttttgtcatttttgcacgtatttttctgaatgcataaaagaaaaatgatgctgttcatcatgatgtcagagaaatgtgctgacgtgtgttttcttctgaaaaatatggtagttgtgttttgatgtggtaaaagcactttaatactttttaaaaattacgaacagctgacgtcaagtggtttccaggtttaagtaactcagcaggacacgctgccgcctgaggaggctttgggcggctgctcccagggctgccatgggcctggcgttgagcactcactgtggccgcgcgccgcatgccggggcttgtggtgctgagaggcgaggatgagggaaccgtgcacctggtgtggtctggtcgtggagacagacagcaaacatgcctttttttttttttgagacggagtttcgctcttgttgcccaggctggagtgcaatggtgtgatctcagctcaccgcaacctcccgcctcccgggttcaagtgattctcctgcctcagcctcccgagtagctgggattacaggcatgtgccaccacgcccggctaattttgtatttttagtagagatggggtttctctatgttggtcaggctggtctcgaactcctgacctcaggtgatccgcccgccttggcatcccacagtgctgggattacaggcgtgagccaccgcgcccggctgcaaacaggcatttttagggcagtttggtgagtgctgggttaatggtatggtcaggactcattcaaccagtatcttttaagcatctgctgtgtgccagagattgccctggacacaggacattctagaactctgggtgacagaagagccacttgcttggcctaggagcatcacaggaagactttgcagaggcagagaggagggtgtgggggtgttggcggcagaaagtgtttctctagaaacactccagcatgtagaggctggagctgcaggacctatctgggatgacaggggcaggaggtggggtgcagctgacctctgtggtaactgccctgtgtgcagatgctgctgaagggcctgtctgcatgccagggggctgagttccatgttgtagggggtgcggtggggtggcaccaagggacataggcaggttagatgtactttttaggaggaaggggtcagagaccaagggcaatggctgtgagcatggggccgaggtcacctgacgatggtggcctgacccctgcggtggaggagaggcaggaatggagctacaagagtgggtccaggaggtgtcctcacctgcggggaggccgagagctcctcgtaggcatagggcacacctgaccagcagaacccacagctgtgccgcagaaggagatagaagccccgtggtggtttgatagagctggggctggctggggtggcgggtttgttgtatgcattttttactgcacgtaaaaggctttactggggaagaatagatttcctctctttttcctggaagagccgaatgacttagacaatggaatagaaatgtaggtcgagcgtgttcatggaagtgttaagatcttcctggttacaagggcacacacctgagggggagtcactttgtttgaagcacctgagcgaggctgttcgctttgtccattctggcttttgttgcttgttaaatgaggctccttctgttgcag

SEQ ID NO: 433 - DNA, 114 bp, Homo sapiens
gaattcacaatgaacaactatttttctgttggacctgatgctctcatggctctcaattttcatgctcatcgtgagaaggcaccatctctgttttctagcagaattcttaataag

SEQ ID NO: 434 - DNA, 154 bp, Homo sapiens
gaattcacaatgaacaactatttttctgttggacctgatgctctcatggctctcaattttcatgctcatcgtgagaaggcaccatctctgttttctagcagaattcttaataaggtgtgttggataaaataacatttcctgcttatcaccgaag

SEQ ID NO: 435 - DNA, 1968 bp, Homo sapiens
gtgtgttggataaaataacatttcctgcttatcaccgaaggtacagtaaaaatcaatagttcaattatatttagcactcctagattcagatttaactaacttacagaaatatttacctgctctgttttgtgtagggttgtcaaattagatcttttttttttttaattagatctttaaatgtgctttatcaggccaggcacagtggctcatgcctgtaatcctagcacttttgggaggcggaggcaggtggatcacttgaggtcaggagttcaagaccagcctggccaacatggtgaaaccctgtctctactaaaaatacaaatttagccgggcatggtggcaggtgtctgtaatcccagccactcgggaggctgaggtaggagaatctcttgaaaccaggaggcaaaagttgcagtgagccgagatcataccactgcactccaacttgggcaacagaatgaaactccatctcaaaaaacaaaacaaaacaactttatcaaagtattatataactctaacaaattttttaaattcaaatttgggatgttttataggatattttgcttagatggcaactaaatggaatatatgatagtttatcttaaatggcagctaaaattggaaggaaattttaggcagaataaatttttggtgaagtcattaatggaaaagtagatttcattggtttgaaaaacctccaaaaggcagatgagataaaagagcagcctgtttgccacagctttgaactaaggtcatctctggtttctagtatagttgattccgttgatggaattttgcttaggaatttttttaataacgttcggtgattgaccaacaggatatcaaaaataaatgcctagcaattatattcctggttctgttttacaaatatttcaaattttgaaatagttcccttttattaatatagttactaaggtaatacgtattactatttatacaattgataattaactcagtccttacatcaacctttttgtattcataagtgattagaaaatgtttgttagattaatacgcattactattcctaagtaatctgaagtactaggaaaaagtggaattttctaattcgaatatttttctttataaaatacaacttttttgataaattgggagaaaacaccatttagaaaaaaatcacttctaggccgcgcatggtggctcacgcctgtaatcccagcactttgagaggccaaggtgggtagatcacgaggtcaggagatggagaccatcctggccaacatggtgaaaccccatctctactaaaaatacaaaaattagccggatgtggtggtgcacgcctgtagtcccagctacttgagagactgagtcaggagaatcacttgaacccaggaggcggaggttgcagtgggccgagatcgcgcagctgcactccagcctggtgacagagcgagactccatctcaaaaaaaaaaaaaaaaaagaaaaagaaaaaatcacttctatcccacatttcccctgagaaagaggataattaaacttaaatggaatggcctgtattgtcatcttccaaaaaagaaggatgagtaatatttcatctactgtaccacagttcacctagaacttttaaactattaatagcctaagagaataaaatgtaaaatacaaatgatgccaaaagtatctgtaatatgttaaaggcatttttatttttacattgtgttttgattatagatttccattgctgctcctagtggattccaattttaccctttaaaattactagaatggaggtgttggatagggccagaggttgcacaccaaaagtatcccctttggttgcccttcttttcatcagcatctagtctaccataaggagaatgtgtgcttcaacattcttaaagggagctttgatacagcgtattttttcttattgtttacagggttagattgttttaatattatattttctgtccatttttcatag

SEQ ID NO: 436 - DNA, 1928 bp, Homo sapiens
gtacagtaaaaatcaatagttcaattatatttagcactcctagattcagatttaactaacttacagaaatatttacctgctctgttttgtgtagggttgtcaaattagatcttttttttttttaattagatctttaaatgtgctttatcaggccaggcacagtggctcatgcctgtaatcctagcacttttgggaggcggaggcaggtggatcacttgaggtcaggagttcaagaccagcctggccaacatggtgaaaccctgtctctactaaaaatacaaatttagccgggcatggtggcaggtgtctgtaatcccagccactcgggaggctgaggtaggagaatctcttgaaaccaggaggcaaaagttgcagtgagccgagatcataccactgcactccaacttgggcaacagaatgaaactccatctcaaaaaacaaaacaaaacaactttatcaaagtattatataactctaacaaattttttaaattcaaatttgggatgttttataggatattttgcttagatggcaactaaatggaatatatgatagtttatcttaaatggcagctaaaattggaaggaaattttaggcagaataaatttttggtgaagtcattaatggaaaagtagatttcattggtttgaaaaacctccaaaaggcagatgagataaaagagcagcctgtttgccacagctttgaactaaggtcatctctggtttctagtatagttgattccgttgatggaattttgcttaggaatttttttaataacgttcggtgattgaccaacaggatatcaaaaataaatgcctagcaattatattcctggttctgttttacaaatatttcaaattttgaaatagttcccttttattaatatagttactaaggtaatacgtattactatttatacaattgataattaactcagtccttacatcaacctttttgtattcataagtgattagaaaatgtttgttagattaatacgcattactattcctaagtaatctgaagtactaggaaaaagtggaattttctaattcgaatatttttctttataaaatacaacttttttgataaattgggagaaaacaccatttagaaaaaaatcacttctaggccgcgcatggtggctcacgcctgtaatcccagcactttgagaggccaaggtgggtagatcacgaggtcaggagatggagaccatcctggccaacatggtgaaaccccatctctactaaaaatacaaaaattagccggatgtggtggtgcacgcctgtagtcccagctacttgagagactgagtcaggagaatcacttgaacccaggaggcggaggttgcagtgggccgagatcgcgcagctgcactccagcctggtgacagagcgagactccatctcaaaaaaaaaaaaaaaaaagaaaaagaaaaaatcacttctatcccacatttcccctgagaaagaggataattaaacttaaatggaatggcctgtattgtcatcttccaaaaaagaaggatgagtaatatttcatctactgtaccacagttcacctagaacttttaaactattaatagcctaagagaataaaatgtaaaatacaaatgatgccaaaagtatctgtaatatgttaaaggcatttttatttttacattgtgttttgattatagatttccattgctgctcctagtggattccaattttaccctttaaaattactagaatggaggtgttggatagggccagaggttgcacaccaaaagtatcccctttggttgcccttcttttcatcagcatctagtctaccataaggagaatgtgtgcttcaacattcttaaagggagctttgatacagcgtattttttcttattgtttacagggttagattgttttaatattatattttctgtccatttttcatag

SEQ ID NO: 437 - DNA, 33 bp, Homo sapiens
actctgcggtggtgtttgaacctgggcatccta

SEQ ID NO: 438 - DNA, 75 bp, Homo sapiens
actctgcggtggtgtttgaacctgggcatcctagaggtgacagtctacgcattcagcattgagaacttcaaacgc

SEQ ID NO: 439 - DNA, 143 bp, Homo sapiens
actctgcggtggtgtttgaacctgggcatcctagaggtgacagtctacgcattcagcattgagaacttcaaacgctccaagagtgaggtagacgggcttatggatctggcccggcagaagttcagccgcttgatggaagaaaa

SEQ ID NO: 440 - DNA, 4446 bp, Homo sapiens
gtgggtgtgtatggcagagcccaaagtgaacagtctgtggagaggtagattatagctagaaaaccaggctctgagtttgctgtggttggagagtgttttttgtatctgtctctgtgttttattgtttgcttgctagctatagatctcatcttgacattggccagacgtggttgcttttgcctctaatcccacactttgggaggccaaggcaggaggattgcttgagcccaggggttcaggactagcccgggtaacatagtcagaccctgtctctacaaaaaaatttaaaaattagccagacttgatggtgcacacctgtgcccccagctactcaggaggctgaggtgggaggactatctgagcccaggaagcttgaggctgcagtgaatagagattgtgcccctgtactctagcctgggtgacagagtgacaccatctcaagaaaaaaaaaatgacattaacaaagaagtaatcatccagtgaatgaccataaaatactggaaataagaacaaaattgcctcttcttattttaataaatcaatagtttatattttatgcctcatccaatccttattgtatgctctacgtgacttaacattaataaaattgcatctgtagcttcagtaaccttattttcacttaacattttggttttgtttatttgtttgagacagtctcactctgttgcccaggccagagtacagtgcatgatctctgctcacggcaacctccgcctcccgggttcaagtgattttctgcctcagcctcctgagtagttgagattgaacacccgtcaccatgtccaactaatttttttgtatttttagtagagatggggtttcaccatgttggccaggctggtctcgaactcctgacctcaggtgatccacccccttcagcctcccaaagtgctgggattacaggcatgagccactgcacccggccaacatttggggaggcattttttaaggtgtatatataagctttctatctgtatctttcaatgactgtagaacattttatcaagaggatctgatataatttaactgctccactattacttgacattacaataaacattataaatagtactgtttcagcctgggcaacatggtgagatcctgtctctacaaaacaaaaaaaaaaattagccaagcatgatggtgcatgcctgtggtcccagctacttacgagactgaggtggaaggatgacttgaaccctggaggttgaggctgcagtgagctgtgttcacgtcaccgcaatccaacctggtgacagagcaagaccttgtctaaaaaaaaaaagtactctttttggataaattcttagaagtgacatttctggacgaacattgagtgactactcattctgctttgccaaggctgaggggtttctcaggacacaggtctttcagtgctaaaactggtgaaagtccccggcaaaccaggacatcactctacacagaggtcatgaacattttatggtataatgcatgttataaattggaagacattaagtttaacaaaagaatggaatatgacaatcttggtgaaatttttaagaagaatggagggccgggcgcggtggcttacgcctgtaatcccagcactttgggaggctgaggtgcgcggatcatgaggtcaggagatcaagaccatcgtggctaacacggtgaaaccccatctctattaaaaatacaaaaagttagccgggcgtggtggcgggcacctgtagtcccagctactcgggaggctgaggcaggagaatggcatgaacccaggaggcggagcttacagtgagccaagattgtgccactgcactccgcctgggcaacagagtgagactccgtctcaaaaaaaataaataaataaaagaatggaaatatggtctgtagttcacaggtcccagtgtcctagcacagggacacagtttgatgccagggccgtgatatttttttccttgagtgaatggcagtgaggttctcaccagaaccttgtagaagtctttacgtttgttgactccagcttctcttttgtaactgagaggcagttttgcctaatgcttaggagcttgagctctggagtcactcagaattcattggcacccctgctttgtcactgtctggctttgtgacctgcagcgagttatgtagcttccctttgcctcagtttcttcatctataaaatggggttagcaatctctatctcagtagattatttgaagataaataagatggcacaatgaaaagcatgtagcacaggccctgacctaaaggaagtactcaaaaaattgaaacttgttattagcaactgtattgactgatgtcagtggtgggttccaacccagatgtgccatccacagtggctgccttgcaaggtctttagggcctgaggctattcaagtgtcaggttctcactggcaattttcctaagatgacagtagatttgtttgcttgtatgtttgttaaggggttagagaggcagctcttcagcttgtttcttctgttctgtttgaatgtcttctgttgtctacgtttaacctcccgctctccatctctcaacattgtcctccacctctcaacattgttctccacctttagtggtacaggattagagcagccccaaaggactaagttttcttctttttttttttttttgagacggagtgttgctctgtcacccaggctggggtgcagtggcgcgatctcagttcactgcaacctccgcctcccaggttcaagcgattctcctgcctcagcctcctgagtaactgggattacaggcctgcgccaccacacccggctaatttttgcatttttagtagagacggggtttcaccacgttggtcaggctggtcttgaactcctgacctcgtgatccgcctgccttggcctcccaaagtgctgggattataggtgtgagccaccacgcccggcctgtttttttttgagttgaagtctcactctgtagtctaggctggagtgcagtggtgagatctccactcactggttcaagcgattctcctgcctcagcctcccaagtagctgggaatacaggtgtgcgccaccgcacccagctaagtttctgtatttttagtagaaatggggtttcaccatgttggccaggctgggcttgaactcccaacctcaggtaatctgcccaccttggcctcccaaagtgctagggttataggagagacccaccacacccagccagtttcatttctttttgagttataatttcatatggtgaactgcacagattttaggttttgacaattgcatttatttatctaacccatacccctgtcaagatataggacatttcctgccgggctcagtagctcatgcctgtaatcccagcacttcgggaggccaaggcaggcaatcacctgaggtcaggagttcgagaccagcctggtcagcatggcgaaaccccatctctactaaaaatacaaaaagttagccagatgtggtggcacatgcctgtaggcccagctactcgggaggctgaggcaggagaatcacttgaacgtaggaggtggaggttgtagtgagccaagattgcaccactgcactccagcctgggtgacagagcaagactccagcttaaaaaaaaaaaaaaaaaaagatgtaggacatttccatctctccaaaaaaattccctggtgccccttctcaatcaacttctgttctacctcctccttttcctctctaggcaactaccgttctgatttctgtaactataaatttgtttttcccattctagaactccatataatggaatcagacagttgaggatttttgacatattcttcaactctgagcctgttttatcatttgtaaagtaggcatgaaaacagtagtgtcattttaaagtggttgttcaaagaatcaaatgaaattatgtgaaaaccctttgcaggctattaaatgctacacagctgtccagttgttgctttttttcttttaactcagcctctcaacctaccagaataatgaagttatgctgtgagtaataacaccttgtgtttttatattgttcgttagccaccttgtaagggatggattgtgatcccatattacaggtaaggagacttcaacctagagaaattaaatgatttgattccagtcacataagtgcatgctggagtcagggactagagcctatgtctttacactctcagtgcagagttctttcttgtagtgcacaatgccatcagcattcactaagatcacatttttcagtttcttcaatggtggttttctgcttatttgatgcattaattctgacataaacactgatgttatcctagcttcacccagctttggggaggagaaaagtctgtctcctatctccaactctgagtcaggaccaaaaagtatctcttatttccccttcccactcttccttgtatcctagctccttgccttctcccctctcag

SEQ ID NO: 441 - DNA, 56 bp, Homo sapiens
ctccttgccttctcccctctcagactctgcggtggtgtttgaacctgggcatccta

SEQ ID NO: 442 - DNA, 98 bp, Homo sapiens
ctccttgccttctcccctctcagactctgcggtggtgtttgaacctgggcatcctagaggtgacagtctacgcattcagcattgagaacttcaaacgc

SEQ ID NO: 443 - DNA, 166 bp, Homo sapiens
ctccttgccttctcccctctcagactctgcggtggtgtttgaacctgggcatcctagaggtgacagtctacgcattcagcattgagaacttcaaacgctccaagagtgaggtagacgggcttatggatctggcccggcagaagttcagccgcttgatggaagaaaa

SEQ ID NO: 444 - DNA, 4423 bp, Homo sapiens
gtgggtgtgtatggcagagcccaaagtgaacagtctgtggagaggtagattatagctagaaaaccaggctctgagtttgctgtggttggagagtgttttttgtatctgtctctgtgttttattgtttgcttgctagctatagatctcatcttgacattggccagacgtggttgcttttgcctctaatcccacactttgggaggccaaggcaggaggattgcttgagcccaggggttcaggactagcccgggtaacatagtcagaccctgtctctacaaaaaaatttaaaaattagccagacttgatggtgcacacctgtgcccccagctactcaggaggctgaggtgggaggactatctgagcccaggaagcttgaggctgcagtgaatagagattgtgcccctgtactctagcctgggtgacagagtgacaccatctcaagaaaaaaaaaatgacattaacaaagaagtaatcatccagtgaatgaccataaaatactggaaataagaacaaaattgcctcttcttattttaataaatcaatagtttatattttatgcctcatccaatccttattgtatgctctacgtgacttaacattaataaaattgcatctgtagcttcagtaaccttattttcacttaacattttggttttgtttatttgtttgagacagtctcactctgttgcccaggccagagtacagtgcatgatctctgctcacggcaacctccgcctcccgggttcaagtgattttctgcctcagcctcctgagtagttgagattgaacacccgtcaccatgtccaactaatttttttgtatttttagtagagatggggtttcaccatgttggccaggctggtctcgaactcctgacctcaggtgatccacccccttcagcctcccaaagtgctgggattacaggcatgagccactgcacccggccaacatttggggaggcattttttaaggtgtatatataagctttctatctgtatctttcaatgactgtagaacattttatcaagaggatctgatataatttaactgctccactattacttgacattacaataaacattataaatagtactgtttcagcctgggcaacatggtgagatcctgtctctacaaaacaaaaaaaaaaattagccaagcatgatggtgcatgcctgtggtcccagctacttacgagactgaggtggaaggatgacttgaaccctggaggttgaggctgcagtgagctgtgttcacgtcaccgcaatccaacctggtgacagagcaagaccttgtctaaaaaaaaaaagtactctttttggataaattcttagaagtgacatttctggacgaacattgagtgactactcattctgctttgccaaggctgaggggtttctcaggacacaggtctttcagtgctaaaactggtgaaagtccccggcaaaccaggacatcactctacacagaggtcatgaacattttatggtataatgcatgttataaattggaagacattaagtttaacaaaagaatggaatatgacaatcttggtgaaatttttaagaagaatggagggccgggcgcggtggcttacgcctgtaatcccagcactttgggaggctgaggtgcgcggatcatgaggtcaggagatcaagaccatcgtggctaacacggtgaaaccccatctctattaaaaatacaaaaagttagccgggcgtggtggcgggcacctgtagtcccagctactcgggaggctgaggcaggagaatggcatgaacccaggaggcggagcttacagtgagccaagattgtgccactgcactccgcctgggcaacagagtgagactccgtctcaaaaaaaataaataaataaaagaatggaaatatggtctgtagttcacaggtcccagtgtcctagcacagggacacagtttgatgccagggccgtgatatttttttccttgagtgaatggcagtgaggttctcaccagaaccttgtagaagtctttacgtttgttgactccagcttctcttttgtaactgagaggcagttttgcctaatgcttaggagcttgagctctggagtcactcagaattcattggcacccctgctttgtcactgtctggctttgtgacctgcagcgagttatgtagcttccctttgcctcagtttcttcatctataaaatggggttagcaatctctatctcagtagattatttgaagataaataagatggcacaatgaaaagcatgtagcacaggccctgacctaaaggaagtactcaaaaaattgaaacttgttattagcaactgtattgactgatgtcagtggtgggttccaacccagatgtgccatccacagtggctgccttgcaaggtctttagggcctgaggctattcaagtgtcaggttctcactggcaattttcctaagatgacagtagatttgtttgcttgtatgtttgttaaggggttagagaggcagctcttcagcttgtttcttctgttctgtttgaatgtcttctgttgtctacgtttaacctcccgctctccatctctcaacattgtcctccacctctcaacattgttctccacctttagtggtacaggattagagcagccccaaaggactaagttttcttctttttttttttttttgagacggagtgttgctctgtcacccaggctggggtgcagtggcgcgatctcagttcactgcaacctccgcctcccaggttcaagcgattctcctgcctcagcctcctgagtaactgggattacaggcctgcgccaccacacccggctaatttttgcatttttagtagagacggggtttcaccacgttggtcaggctggtcttgaactcctgacctcgtgatccgcctgccttggcctcccaaagtgctgggattataggtgtgagccaccacgcccggcctgtttttttttgagttgaagtctcactctgtagtctaggctggagtgcagtggtgagatctccactcactggttcaagcgattctcctgcctcagcctcccaagtagctgggaatacaggtgtgcgccaccgcacccagctaagtttctgtatttttagtagaaatggggtttcaccatgttggccaggctgggcttgaactcccaacctcaggtaatctgcccaccttggcctcccaaagtgctagggttataggagagacccaccacacccagccagtttcatttctttttgagttataatttcatatggtgaactgcacagattttaggttttgacaattgcatttatttatctaacccatacccctgtcaagatataggacatttcctgccgggctcagtagctcatgcctgtaatcccagcacttcgggaggccaaggcaggcaatcacctgaggtcaggagttcgagaccagcctggtcagcatggcgaaaccccatctctactaaaaatacaaaaagttagccagatgtggtggcacatgcctgtaggcccagctactcgggaggctgaggcaggagaatcacttgaacgtaggaggtggaggttgtagtgagccaagattgcaccactgcactccagcctgggtgacagagcaagactccagcttaaaaaaaaaaaaaaaaaaagatgtaggacatttccatctctccaaaaaaattccctggtgccccttctcaatcaacttctgttctacctcctccttttcctctctaggcaactaccgttctgatttctgtaactataaatttgtttttcccattctagaactccatataatggaatcagacagttgaggatttttgacatattcttcaactctgagcctgttttatcatttgtaaagtaggcatgaaaacagtagtgtcattttaaagtggttgttcaaagaatcaaatgaaattatgtgaaaaccctttgcaggctattaaatgctacacagctgtccagttgttgctttttttcttttaactcagcctctcaacctaccagaataatgaagttatgctgtgagtaataacaccttgtgtttttatattgttcgttagccaccttgtaagggatggattgtgatcccatattacaggtaaggagacttcaacctagagaaattaaatgatttgattccagtcacataagtgcatgctggagtcagggactagagcctatgtctttacactctcagtgcagagttctttcttgtagtgcacaatgccatcagcattcactaagatcacatttttcagtttcttcaatggtggttttctgcttatttgatgcattaattctgacataaacactgatgttatcctagcttcacccagctttggggaggagaaaagtctgtctcctatctccaactctgagtcaggaccaaaaagtatctcttatttccccttcccactcttccttgtatcctag

SEQ ID NO: 445 - DNA, 48 bp, Homo sapiens
gcttcccgggtgcaacctggcctgctgcagtgggtgaagttttggtag

SEQ ID NO: 446 - DNA, 166 bp, Homo sapiens
gcttcccgggtgcaacctggcctgctgcagtgggtgaagttttggtaggtgagtgtcagagtgagccgacccaggccacatcctggcagtggaggcacagtcacccggggcagggccaggatcttggtatatcctcagatctcagtgggcagcgacatgaagtcag

SEQ ID NO: 447 - DNA, 1177 bp, Homo sapiens
gtgagtgtcagagtgagccgacccaggccacatcctggcagtggaggcacagtcacccggggcagggccaggatcttggtatatcctcagatctcagtgggcagcgacatgaagtcaggtatgctctgggtgcgtgctctaaaggtgataaggaagaggggacctcatggtggggtgtggagaaagacccataataaagtgatctagggctgggtgcagtggctcatgcctgtaatctctgtgctttgggaggctggggtgggaggatcacttgagtctgggagtttgagaccagactgggcaatatagcaagaccccatctctaaaagaacaaaacaaaacaaaccaaaacaaaacaaaccattccagcctgggaaacatggcaaaaccccgtctactaaaaatacaaaaaattagccaggtgaggtggtgcatgattgtaatcccagctactctggaggctgaggtgggagaatcacctgagcttgggaggttgaggctgctgcgaactgcgattgcaccgctgcactccagcctgggcaatcacagtgagaccttgtctcaaaacaaacaaacaaacaaatgaaaaaccttagccaggcatggtgacacatgcctgtagttctagctacttggaaggcagaggcaggaagatcgcttgagcccaggagttcaaaactgcagtgagctatgatcacaccattgcactccaagtctgggcaacagagggagaccctgtctggaaagaaagagagaaagagagagagagagaaagagggaaagaaagcaagcaagagagaaagaagaaagaaaatgacctaggaccctcggaaagcaccttagggtgggaccacataggcacagctctgagaagatggtgttctagatggagcacagggaccgggatagagatgttacaggggaactgtggagaaaagagcctcctggtggaagggttcagaggtgggacgcagcgaggctgcatgggcgagaggtgatagcttggctcggcagaaccacaaactctgttttaggcggagcaaaagtgaggggcaccacaggcgaacaggtaggacagcaaaagaatggtgggtgcccagacgctgggtgaaaagatgccccgtttccgcaggcttaggagtggccacgtgctaccatttgattttctttcttctag

SEQ ID NO: 448 - DNA, 1059 bp, Homo sapiens
gtatgctctgggtgcgtgctctaaaggtgataaggaagaggggacctcatggtggggtgtggagaaagacccataataaagtgatctagggctgggtgcagtggctcatgcctgtaatctctgtgctttgggaggctggggtgggaggatcacttgagtctgggagtttgagaccagactgggcaatatagcaagaccccatctctaaaagaacaaaacaaaacaaaccaaaacaaaacaaaccattccagcctgggaaacatggcaaaaccccgtctactaaaaatacaaaaaattagccaggtgaggtggtgcatgattgtaatcccagctactctggaggctgaggtgggagaatcacctgagcttgggaggttgaggctgctgcgaactgcgattgcaccgctgcactccagcctgggcaatcacagtgagaccttgtctcaaaacaaacaaacaaacaaatgaaaaaccttagccaggcatggtgacacatgcctgtagttctagctacttggaaggcagaggcaggaagatcgcttgagcccaggagttcaaaactgcagtgagctatgatcacaccattgcactccaagtctgggcaacagagggagaccctgtctggaaagaaagagagaaagagagagagagagaaagagggaaagaaagcaagcaagagagaaagaagaaagaaaatgacctaggaccctcggaaagcaccttagggtgggaccacataggcacagctctgagaagatggtgttctagatggagcacagggaccgggatagagatgttacaggggaactgtggagaaaagagcctcctggtggaagggttcagaggtgggacgcagcgaggctgcatgggcgagaggtgatagcttggctcggcagaaccacaaactctgttttaggcggagcaaaagtgaggggcaccacaggcgaacaggtaggacagcaaaagaatggtgggtgcccagacgctgggtgaaaagatgccccgtttccgcaggcttaggagtggccacgtgctaccatttgattttctttcttctag

SEQ ID NO: 449 - DNA, 153 bp, Homo sapiens
gcctgcctgtgttactgaccaatgtggagctgggtctagggtgcgaagaactgcaatggctgctgcaacgggagcagctgagtccaccccaggtgcagcctggcttctgtctgtatctcagcaccaccctctccctctgtgccatggaaaaag

SEQ ID NO: 450 - DNA, 293 bp, Homo sapiens
gcactaactatattgaagcgtcttgtgggaaccctcctatcagccacagggaagctggtcagagccagacctcgtgcctggggaatggggatcatgggtgctggcattgtgggtagggtgcctttgcctccctctcacaggcctgcctgtgttactgaccaatgtggagctgggtctagggtgcgaagaactgcaatggctgctgcaacgggagcagctgagtccaccccaggtgcagcctggcttctgtctgtatctcagcaccaccctctccctctgtgccatggaaaaag

SEQ ID NO: 451 - DNA, 249 bp, Homo sapiens
gtgagagctggtccccacccaccctggcccctttttgacttgccccattctgtgaccccacaggcctcccacacctcagtctaacttcagttcccatccttcatcccaggcactaactatattgaagcgtcttgtgggaaccctcctatcagccacagggaagctggtcagagccagacctcgtgcctggggaatggggatcatgggtgctggcattgtgggtagggtgcctttgcctccctctcacag

SEQ ID NO: 452 - DNA, 109 bp, Homo sapiens
gtgagagctggtccccacccaccctggcccctttttgacttgccccattctgtgaccccacaggcctcccacacctcagtctaacttcagttcccatccttcatcccag

SEQ ID NO: 453 - DNA, 165 bp, Homo sapiens
gacagacgaggtttgcgcttggctgggcatgttccgcggctactctgcggcgcgccaggcccccgctttccgcaccccgcgaccctagaagccaccgaaccgccggcgggccatggccactctgccgagcgcagagcgccgcgcgttcgcgctcaagatcaacag

SEQ ID NO: 454 - DNA, 552 bp, Homo sapiens
gacagacgaggtttgcgcttggctgggcatgttccgcggctactctgcggcgcgccaggcccccgctttccgcaccccgcgaccctagaagccaccgaaccgccggcgggccatggccactctgccgagcgcagagcgccgcgcgttcgcgctcaagatcaacaggtaagacgccccccgcggcgcgcaggttgcggccggacagcccagcgctggtgtgaagcggagcttcgctgcaggggccgaggccggacgagtccattcgcgtccgcggcggggcgcgcctgagacctggggcgcccggttcccgaggctgcggcggtggagccgctggacgcgcggcggctcctgcgctgggcccggcgaggtcctccccaagaatctcggtgctcctggatgtcctcagccgccggggatcccttccccgaacaacctcgcccgctccgccctccaggttcttacaggtggccgggtcccagaagggtgataggcgcctgggtaaccgtgttgggcgcgccacggagtgtctcataaacggctccttcctttgag

SEQ ID NO: 455 - DNA, 56597 bp, Homo sapiens
gtaagacgccccccgcggcgcgcaggttgcggccggacagcccagcgctggtgtgaagcggagcttcgctgcaggggccgaggccggacgagtccattcgcgtccgcggcggggcgcgcctgagacctggggcgcccggttcccgaggctgcggcggtggagccgctggacgcgcggcggctcctgcgctgggcccggcgaggtcctccccaagaatctcggtgctcctggatgtcctcagccgccggggatcccttccccgaacaacctcgcccgctccgccctccaggttcttacaggtggccgggtcccagaagggtgataggcgcctgggtaaccgtgttgggcgcgccacggagtgtctcataaacggctccttcctttgaggcaagtctgagcgcggggggaagaagtgaagtggctgaaattagagttgcgtttgaggcaggctgcaagccttctgtcgtcctgagcaaggctccgtcctcgcctgcttcattattccagaaagagcttggctcctggtggcatcgctatttttataccctggtccaaaggagccatgaagtggaaaaagtgattttttaaaaaatctacacttaaataaaccaaaagaaatggcctgtggctgacattttgagatttacagaactccagcaaaaagctaaggactgggggatcccaactcaccatccaattcctaatcaaagttgcacaaactaaatatgtaagcacatttactgctcaaagttctcagtaaaggtgctttaactgcagtttttcctccactaaaaactgctgacaagtaattgggacatttttgtcttgccctgagaaagctagactgtctagttaaaagataataggaaactcattctaaagtgtcaacttattctattgcccacagggctgtccgatttgttaatcttcacttagctgagcctgtgaaaggtggattccaccgtaggttcatctttgtgctgttagtgtgtgaagaggtttgaacaaggaattaaaagcctagaaaaacaaggcgataaggtcttctagagggcatatcgagctttattgacgattttatttccacttgatacgtgactgccagcaaactgtttctcttaccttactatttcgtcatctgtaaaatgagtttaattatttatgtatattgcatattaatgttggaggccaaaaggtactagtcaaaaggcataaagaggctgggtgccatggctcacacctctaatcccagcaatttgggaggcccagatgggaggattacttgagcccagagtttgagaccagcctgggcaacatagtgggacccctgtggctacaaaaaaataattttaaaacattagccaggtgtggttgcatgcacctgtagccccagctattcaagaggctgagacaagagcatcgcttgagcccaggaggatcacagctgtgatcatgccactgcattccagcctgggtgagagagtgaaaccttgtctcaaaaaacagacaaaaaaaaaaaaaaaaaagcaaaaacaaggcatgaagtatatcagggatctccctatgggaatttttttctacattaaggttcatagctgttgcatgccaggaggggtaattcattcaaggagtatagggaatcaaactgaagttactgatgggtgtattatttgctatagctcctgatcctctgtctttgtgaattttagatcaggaagtgtgactggggcagaaagatgttagaaactatggggttgggcagggttgatctggggtgagtggccgagacccggactaatcctacaggcagtcttgcaagcaactgcggggtcggtgtcacctgggggttaagaataaaggccctggttagtgtctgatctgcttgcaaattggctctctgctacaaagtcactgtgcaacattggacatgttacttaacttctctaagctttggtttctttatgtgccaagtagagttgatcatagtacctacttcttatgactgtggggaggattaaatgaataataggtacaaagtccgaattgccaagtgctggatgtgtaacatacacattggaatttagagacagtacagaaaaaataatgcaaaatgtcttgttaatgattttcatgttgattgcatgttgcttgtagtgtctggctcagaataaatggtgaataattcttagttgccatcattaacattacaatcagcttcactgctgtcattatctccatcatcaccatctttgagagcctaagatagaaaggtaggaaggaaagctgaagttggagagcttcaggcagagatcagtttgggttaggtatggagatgccagtggctggctgggagctttcttggggccagtgtttctccgcctgtgccttccatctggtgctgagaacccaaaacacattcaatggaagaaaatatgtgatgaaatctgatcaagaagagccccctcaagtttaataaagtataaaaggttctataatcctcaggcaagaaaatggattggaaattcgtattcttagagttctgttttcctttttgaagcactctgtgtgttgtgtgggagagttatgctaaggagcttggcagaaattattattcaaaggagcagattaataaggacatacctagtattcatatatcatttaatttcaccatttattgtttacttattgtgtcccagacactatattatacagttaatggattttatgattaaattctcacaaaaagcctatcaaactcatgaagtcttgtacagaagaggaaaaggaatcttggagatacagctgcacaaggccatgtaattttttcaagaccatacaaccagcaatggcagagctgggattgcaaactgctccaaagactgtgctcttaattgggccgattgttattttgatgcatatgtatcccaagaatttcctttaaagcaagaggggaattaatttttaaaaaatcatcattttggtagcagcattggcaaagtgttctgtttctgattagtgtttaatatataaacattaacaatgtgatgttttgcaatgttgaaggtggaaaagaaatgttttcccttacgtgcctacctattattttttttaaataggtcaaattccaaaagtaagactgtgttgaaatatggccattagtacattcagcatgtgctcatgtttttcaccttactactcagaatagtgtaaactatctcttaaaaatatttgtgggataaaaccagtgtgcttcctgttaatgaagtattcaaatctgatatattaaaaatattatttgtaaagcgttcagttctgaccacaccagtctccagaaggagtgagcagactatctcacagtctgagaagaaaggtgaaattaattttcttgtaagtgctatatacttgtcttcatttccatttttttgttgctgacttgcgtgccaaggaaagactagatctaagttaggcagttcgtaataacatttgcgtttgggatttcaggtgctgctgcattaaatgtcataacatggtacttgtgggaacatctagtcttgttaattgccttttttcttactggaatttagtgcctttgtagattataaaaattattactagtactctgaaaatttattaaacaaaatcttagtgtctttcaaatacagaatagatgtaaaatttgatcaaatattaaagtaaaataagaaccttggataaagaggacgaaagtgtagaatgcagaaaaaaacattaaccctcttgtggacagtcaggattgaaaggaagaaaaaataatggcttacacttctagaatgctttctatgtggcagagacagttctaaatatttacatatcgtaactcattcacctctatgagataggagcaatgactatctccgttttacagatggagaaactgagtgcagagaagatatagaaattgtccaaactcacaaacaactaattaaggtcacagctgagattcaaatgcaggcagcctggctccagagtcttctcttttaatcattataccatgctgccatctcagttttattttaaaataataataggtaacatttattaattatttactatgtgctacatattgtgctaagaactttatataccttcatttcgtcctttcagaaaaggaacaaacagagctgggtgcactggctcacgcctgtaatctcagcattttgggaggccaaggcgggacgatcacctgaggtcaggagttcaagaccggcctggccaacatggcgaaaccccgtctctactaaaaaatacaaaaattagccaggtgtagtggtgtgcacctgtaatcccagctacttaggaggctgaggtgggataattgcttgaacctgggaggtggaggctacagtgagctgagatgtgccactgcattccagcctgggcgacagagtgacactctgtttcaaaataaaataaaataaaaaataaaaaaggaacaaagtattaggcataataatcatcaccagagagtgattttatgaaagacaaaaacaaggtggcaagaagagagaataaagttacataaagatagcatttaagaacaaccacaggctgggcatggtggctcacacctgtaaccctagcactttgggaggcctaagctggtagatggctcgagcccaggagttcgagaccagcctgggcaacatagcaaaaccctgtctctacaaaaaatacaaaaattagccagctgtggtggcttgcacctgtagtcccagctacttggaaggctgagatgggaggatcactcgaacccaggaagttgaagctgctgtgagcagtgattgcgccactgcactgcagcctgagtgacagagcgagactctatttcaaaaaaaaaggaacaaacccaataattttgggcataacgaccagagcacaatgagctacagagagctttctgagaagtatttgctaattttatctgcaaagataatacaagcataaaaatatatgtattcaaatgtatagatgtgtatctgcagtgagagcagagctgttcctcagtagtgggggtggctggcagagtgaggtagtgtgctttcaggaattgctttatttgtctgatgtgttctagaccaaagaccaacagaggggcttgggcaatcagacacagaatttttggcctttcacatttagaatcggttccttccagattcttggaaaaggtccatttgtgctttaggcatctagtgctattctgaagatgccttacaaaatgtatgctgaaataaccttctaccagggtgaattttcttcatttggagttctttgagttctgaccatttatgtatattgatgaagctaatgtttacttcttcatagaccagtggaaagaaaacgtagtaacatgtagttgcccagggaaagatgaagaactcaggggaccaagtctcccatctcaactccccataaaggtagtgatggaatgggatgatgttaaaaacacctcaactttccgtcctctttaagggaccgtgagaaggtagggatgttaccatactcagacttcttgctgagaaagctaagaaacaaaagcatttagtttttttcagtggcaggtgcttattaacgtttggcctatttgataaagggttaaagcaacaggaatgtgctactgctgttcccacaagcagtagtctaatttctttctttttttttttttttctttttttgagacagtcatgctctgtcgcccaggctggagtacagtggggccatctcggctcactgcaacctctgcctcccggattcaagcgattctcctgcctcagcctcctgagtagctgagattacaggtgcgcaccaccacgcccggctaatttttgtatttttagtagagatggggtttcaccgtgttgttcaggctggtctagtcttacccagtcagcagcagaaaggctctctgggctctaggtaaacacatgaaatttatatagtgtgtttaagtgtggttcctgtgcttctggagttggcacagtagtggtaccatttgctgtatcgacaacagtgggggtatagacgaaaaacagattgacacctctgaaagtatatatgaacacatgtcgatgcagcatttctggtgaaactaagcaaattgataaagttggcctagggtacaagacattatgtcatgtcccactgcattatgattaaacccaagattagaaaggagaaatgatggcaacagaaccagtttctccagctgtctattctcatgttcatcatcacagataggaaagggcagccggccctctgcatctgtgggcacatccctggattcagccaaccacagatcaaaaatatttggaaaaaaatgtagatagttgcatctgtactgaacatgtacagacttttttcttgtcattattccatacaaaatatagtataataactatttacatagcatttacattgtgttaagtattataaataatctagagatgatttaaagtatacaggagggctggccaccgtggctcatgcctgtaatcccagcacttttggaggccaaggtgagtggatcacttgaagtcagaagtttgagaccagcctggccaacatggtgaaaccccatctctactaaaagtacaaaaaaaaaaaaaaattagccaggtgtggtggcaggtgcctgtagtcccagctactcaggaggttgaggcaggagaatcgcttgaacctgggaggcggaagttgcagtgagccgagatcgcaccactgcactccagcctgggtgacagagtgagactctgtctcattaaaaaaaaaaaaatcatgaacaactctgcatgtaaatcaatacagagctgcattataatttacataggctgtataaaatcctgttgattagatgtaaaatgatttattaaattaattttctattattgggcatgaagataggttccaggctgggcacagtggctcatgcctggaacctgcctcccggtgctttgggaggcagacacaggagaatcagttgagcccaggagttcaagaccagcctgagcaacatagtgagacaccagctctacaaaaagcaaacaaaacattaggcagacagggtggtgcatgcctgtggtcccagctacatagaaggctgaggtgggagggtcacttgagaccaggagtttgaggctgcagtgagctatgattgcgccactactctccagcctgggccacagagtgaaaccctgtctcaaaaaaaaaacacaaaaaaccaaaagagataggttctgacttttcacaatagtgtatagagtttgatggagcagtcttatacatacttttttctgcgctagtgcaaacacctccttacaaatttctaacagtataattggtcataggaaagaaacatttttcaagcttttgattgccaaattgacgcccagaaaaggtatacctgtttctgctcctaccagtggccctacgaatgctcctttccccacattcacacccccaccgagttttatcattcttttaaatctttatttgccagtgttgacctcttctcttaaatgcctgtaacctcttcctgtttagcttctctcctaggtcagagagtgaactctgaagtcattctttagggattaaaatagtcatgcatttctccttttttctttgccttacatgcaaccataaatggtgagaacttctatcctttttcactttctgcttctgttcctttaataggtggattaatgataaaggtagattgttcaaacaacttagttatttcttaattttgttgtaagctctagttgccagactttaaactgtgctttttactttgcttaacaatgtaatccaatctacctcctcctttgggtgcctaagccatagcccttttaaataaaatagcaaatggaaaatcagaatccctttctatcgcaaaataagagtccagattacataactcattgtatgtgttttcacttggatgagagaatagagagtatggacctctttcatactttttttttaatgttccttttcctctagaattggtttctggggctaaaaggaaacagtagttagtaccactctgctcagaaacctcaaaaaacttcgacttctgtcattctcatcaaagggcaaaattcattgttcttctgtgatagagaccaaaaatacaaatagctaaactggaactaaattaagaaaaacagaagttaataaactccaccgcctcactcccatctcttcgtaagttagtaggcttgtaagtcctaggctggttagttcattcatttgttcactcatgccagccattgaggattattgtgttctaagtgctgtgctaagccccagaaatacaaagacaagtgagtcatgggcctgcctgcaaggagtgaggagatttactcaaaattgagagctggaaaaagaaaggcactttccctggcctcatagccctccgtgacttcaaagtattcctctctggggtcatgccactagggataatagcattatccaaaaacatttttggaaatccttttagaattattctcagggactggagtacatttatttttaaaaagaaacttggtgttttaaaatctttttttttttttagggagaatctgctttattatttgagaagtttcaaaaaatatagaaaatacagatgataatatggcaagtatctaaaggtctccacttaacagaattaacatctgttaacattttgtcacttttgctttagttgttttttttttaattaaaaaagagaacattacagataaatgtgaagtccctgttattctgttgcccatttctgttctccctgctgctccctgagagtactaacacaaaggtgtacttctggggtgtgtgtgtatatgcatatccataaacaatatatggtatagcttctggagggatccaaagtcattagcactcaagcaagcctattaaataaaataatatcagcttgagttaaagataacatatagccgtgaaataacggagctgatttttaggtaccttgtcaaatagttctgaaagtaattgcaaagaggagttccaaaagtgagttcagaaagacagctttatcagaataaattgcatggtactgcatacaggaaactataaagaacaacggttatttagaactgttcattctgacagtgtttttcaattactccttaatattataaccacttactcatttcctgaaatcaccaggaaatttttcaaaaagatttttctcccccgatgaatatacccacgatttgcatttgacccaagataagcagttgagtcgataacatgttaatttttaaatacatggttttaaaacacagaataaaaattctacctcattgcttggagactcaattaaggagagtatgcacattagcaaaaagaagatgtgatatttgctcagaagtcttgaagtggatattttggccttcgtatggctgaatggtcaagcttgactctctcgtttgctcagggaggcccagtccctctgctgccacgggtagaaatactttttcctaaatcgctgcttcttctcactgccatacagagcaatattcaggacacagccaaaaccttctttggcagacctttttgagttctctctactcagctttctgctgtgtaatatgagcactctagagaagttgggctgtcctcaggaaattacacttggggtctgtggttccccaggaagacaaactggagctccctaaggggtactagtcatcatacggcatttatactagcattgcagtccactttcacctatgcaagtagaaaaactcaggctcaaagtccactgacaatgcaggagtcccttatctgctggttaacataaatgttgttttaagatgatggccatctgttgtctgtgagaacaagactatcacccacctgttgacatgctggctggtttaatatcttactctttcattccaaataactacctggtctcacagatccccttagatggggtatccaatttacctcctgtaccttattctctgtccaataatttcactcaaatcaacaagatattttattgcctatgacttcctctaggtattacgggagattcaaaacacaaacagacaagcagcctatgccctcagaatccagctggggtgagtgggtgactataaatgcaaaagttagagagcatggggaacagtgtttgattgtgtggctggggaggggtaaggacaaaaactcagagagagagaagcctgtagccctggctacagaagggcaacacctctgaggagatgagtctcagctgggccctgaagggaggtgactcacagatgaaacaaacctggtgggaagaatagttagcagtgtgcagaaggcattggaagggattccaggggaggagtgaggagggagccacagtcattccgatgtgaggtagtgagatctgggattagactgggtcatcagaatggaaaaaaagggcctgcttctgcagacagtttaaaggaatcagctggatgtgggaagcaactacatacttattcattcattcatttcatgcatattgcttatagcctactatgtgcctagcactattctaagtgctgaggatagagtcatgaataagatagacagggttcttattctaaaaaaagtaatataccagtggggagacaatgaagaaataaaccactaaataaacaaggaaacatcagataaaataagtgtgatacagagaatgtaaacgggccattgagagggcatggattctttagatgggatggtcaaggaaagcatctcttagagaaaaacctctgagccaagatcaagcaggggaatgacgaagcacatgactgaggcaggagtaaatttgatgtgttggaagaaaagcaagaactggtctgtctctagtggagtgaatgaggggagaggaggagagctgaagagggaagttagcaaagaacgaatcacataaaagccttaaaggcaatggaaaaaatttaaatgttattcaaagtgcaatggtgtattagtccattttcatactgctatgaagaaatacccaagactggataatttataaagaaaaaaaggtttaatggacttacagttccacatggctggggaggcctcacaatcatggcagaaggtgaatgaggagcaaaggcatatcttaaacggcggcaggcaagagagcgtgtgcaggggaattgccctttataaaaccatcagatctcgtgagacttattcactatcatgagaatagcatgaggaaaaacctgcctccatgattcaattatctcgcacaacatgtggggattatgggagctacaattcaagatgagatttgggtggagacaaagccaaaccatatcaaatgggatggtttatggagcagggcatgatgcgattgacttttgtgtttaaaagatctattgtacaaagaagcaaggaaaccagctgggaggcagtggagaatccaggggaaagatgacgatggcaaaactagagagcagagctgagaaggagagaaccaggcagctctgggataacattctggagctagggctgacgaattagatatggggtggggcaatgaaaaacaaaaaaaaagagaaatcaagatgtctccagggttggatattgatgcttttaacagagattgaaaagactggaggagaagcaggcttttagggtgaatcaagggtttaactggggacatatggagtctaagatgcatgttagacattcaagtagaattagctactatgcagttttatttaggaatctgaaactcaggggagaagtcaagactggatatttaagtttgcaagtcaataccaaacatatttttacataagaaggaaaaaatattgatatgattttgataagtttttaatagccagaaagctatatgcgtaatatggtatcattttaattaaaaaataaatatatgcataactctctgcagagataaatgatcaatacatataacaaggagagaaccagaaggacatacgccaatatgtcatgagtgttatctctgggtagtagaattattgatgacttttgtgtacttgggacatgcatgtatgagtgtatgtatgcatgcatattttgcaagttttcctcaaaggatgcttttgtaattggaagaagaagcaattataaaataaatggcacaagatttccatcctggtcaaatgggataaggatgatgccaatgagaaattatgaaaattggaaattagacttagttttggggggatgattttttacttccctcgtagaggttttgtttaagacgatgtagtagactgtacctttacatatatttgctgtccctcccgatgggaggattttacttttcacctgttgaaggtgatgtggtcacttggaggtgaagagatagcctggactttgtcacattatctttctcctattctaaacaatctgcagcgttccaggtggtggatgatctgtcatcctgcatcctggagtaaagatgattaaagcagagctgcagctgccctctgaaggcctttgtttttgtaaaccactgagatttttgaattgtttgttatctcaccataacctagcccaccctaacacagatgaacataaaatacagaacatttctattgggcggcttgaaatacaggcttggggcatcagtggtaggtcagcatggaaaatgttgattaaaaagtcatctgtgaggtggagattgggactgaagaatggataaattttctgaatggaaagtataaggggaagagaagaggaatgggcctagaggaagagtcactgtcaatccatacaaaaagaagagatacgaaaagataggaggggggatttggccaacacatggcagaccgttgtagtatcagaaaagagagctaggagggtagttacaaagatcacatgccaaattatgagggcaaagagccattggatttaccctgaaggtggtcattgaaaacctctgaattagcagttttagcggagctgtggggaaggaagtcaggtttcataaggttatagagggagtccatgcagaggaaatagaggaagctggtggaggccactcctttaaaaagcctggatgaggccgaagagaaatgggacaagtggtaaccagaaggcccctacaaggctgtgacttttacacaaatatgacatacaatgctgaacaaaggatgtgctgatcttacagaggaaggatgtgttttattcccaaaaaaaactttacatatgggtaaagttattcaagagaccctgtgctgtctaatatgcaacaaatttttctttgcaccagcattaagacttctaacaataagtaaaatattctatttagatactttttacaggagattttgaaactctgatgacactgacatactacctttcagaacatggtactgtttaaaattttattatttttatatttatcttcatatgtttaaatttgaaaaattacaggaaagagtacttttataattatgtttttctgtttacaaaccacctcctgtgtgctgaattttgcctccccaacatttttcaggggagcatggccctactcgcactttgagttcagatttctggccttcagaactctgagaaaataaatttcttttgttttacgctatccagtttgtggtagtttgttacagtagtcctgggaaactaacaaaccaccccaaagtttagtgacttaaaacagccattattatttctcacaattctgtgggttggcaatttgggctgggctcagctggacagttattctgctggtcttcctgtagacattcacatggctgccattatcgggtggctcaagtgaagctgtagggtctaagatgggctcactcacaagtccaggaccttggtgctgactgttggctgagctttccctcttcacacggtctcttgttgttcagaaacctagctggtcttttttgcattcttagctggtaaagggaacattctaagagaaggaaggtggaagctgcaaggcttcttgaggcttaagtctagaactctccaacgtcacttccaccacattcattggttaatgcaagtcataaggcaactcagcttcaaagagtaggagaatagaatcaacctattgaaaggaggggctgcaaaatagttggtcattttaaccaaccacagcacccaaccaaaaaaattaatactatcccgtttcagatttcagaatgtttaatcagaaggccttgtctttccctacgtatatcacaatacccattttagtggcagagaaactgagaccaaataaaactgactcctttaaagttaccaagtgagtcatgctttgtgagagacatgaagacaactatatgtctggaagagctaaacatagtcctgcctggaggcaggtatatgaacttaataatcccttgagatgctcttaaatcccataattacactgatggactccagattgcagagctgtctggtccagagataaagcagcggtttgagagtatcagagagagaaggtgcctgaaaattgccacatgtccccaaaggcaggatttgaggctaaattaaatgataaagagttaccaagctctttattctcaagagttaccaaataagcttagaaactcaatgactgctgctgtctagtgttagttctggaatgggagaattaaaaatgagtagaaaaagaaaatagagacagagagactaacatatctgaaagataggtgctgtgggcagtcttagaaggatcacccctatatcaattaggattgcttttagctgctgcaagtaacagccaaccaaaccatccaatggtttaaacaaattaggggtttatttttttcttttcatttatttatttatttttaaatttaattttattattattattatactttaagttttagggtacatgtgcacaacatgcaggtttgttacatatgtgtacatgtgccatgttggtgtgctgcacccattaactcatcatttagcattaggtatatctcctaatgctatccctcacccctccccccaccccacaacagtccccggtgtgtgatattccccttcctgtgtccatgtgttctcattgttcaattcccacctatgagtgagaacatgcggtgtttggttttttgtccttgcgatagtttgctgagaatgatggtttccagtttcatccatgtccctacaaaggacacaaactcatcatctttatggctgcatagtattccacggtgtatatgtgccacattttcttaatccagtctatcgttgggcatttgggttggttccaagtctttgctattgtgaatagtgctgctataaacatacgtgtgcatgtgtctttatagcagcatgatttatagtcctttgggaatatacccagtaataggatggctgggtcaaatggtatttctagttctagatccctgaggaatcgccacactgacttccacaatggttgaattagtttacagtcccaccaacagtgtaaaagtgttcctatttctccacatcctctccggcacctgttgtttcctgactttttaatgatcgccattctaactggtgtgagatggtatctcattgtggttttgatttgcatttctctgatggccagtgatggtgagcattttttcatgtgttttttggctgcataaatgtcttcttttgagaagtgtttgttcatatccttcgcccactttttgatggggttgtttgtttttttcttgtaaatgtgtttgagttcattgtagattctggatattcgccctttgtcagatgagtaggttgcaaaaattttctcccattctgtaggttgcctgttcactctgatggtagtttcttttgctgtgcagaagctctttagttgaattagatcccatttgtcaattgtggcttttgttgccattgcttttggtgttttagacatgaagtccttgcccatgcctatgtcctgaatggtattgcctaggttttcttctagggtttttatggttttaggtctaacatttaagtctttaatccatcttgaattactttttgtataaggtgtaaggaagggatccagtttcagctttctacatatggctagccagttttcccagcaccatttattaaatagggaatcctttccccattgcttgtttttgtcaggtttgtcaaggatcagatagttgtagatatgtggcattatttctgagggctctgttctgttccattggtctgtatctctgttttggtaccagtaccatgctgttttggttactgtagccttgtagtatagtttgaagtcaggtagtgtgatgcctccagctttgttcttttggcttaggattgacttggtgatgcaggctcttttttggttccatatgaactttaaagtagttttttccaattctgtgaagaacgtcattggtagcttgatgcggatggcttgaatctctaaattaccttgggcagtatggccattttcacgatattgattcttcctacccatgagcatggaatgttcttccatttgtttgtatcctcttttatttcattgagcagtggtttgtagttcttgaagaggtccttcacatcccttataagttggattcctaggtattttattctctttgaagcaattgtgaatgggagttcactcatgatttggctctctgtttgtctgttattggtgtataagaatgcttattatttttatacattgattttgtatcctgagactttgctgaagttccttatcatcttgaggagattttgggctgagacaatggggttttcaagatataaatcatgtcatctgcaaacagggacaatttgacttcctcttttcctaattgaataccctttatttccttctcctgcctgattgccctggccagaacttccaacattatgttgaataggaggtgagagaggacatccctgtcttgtgcccgttttcaaagggaatgcttccagtttttgcccattcaatatgatattggctgtgggtttgtcatagatagctcttattattttgagatatgtcccatcaatacctaatttattgagagtttttagcatgaagcgttgttggattttgtcaaaggccttttctgcatctattgagataatcatgtggtttttgcctttggttctgtttatatgctggattacatttattgatttgtgtatgttgaaccagccttgcatcccagggatgaagcccacttgatcatggtggataagctttttgatgtgctgctggattcggtttgccagtattttattgagtatttttacatcaatgttcatcaaggatattggtctaaaattctcttttttggttgtgtctctgccaggctttggtatcaggatgatgctggcctcatcaaatgagttagggagtattccctctttttctattgattggaataatttcagaaggaatggtaccagctcctctttgtacctctggtagaatttggctgtgaatccatctggtcctggactctttttggttggtaagctattgattattgcctcaatttcagatcctgttatttgtctattcagagattcaacttcttcctggtttagtcttgggagggtgtatgtgtcgaggaatttatccatttcttctagattttctagtttatttgcaaagaggtgtttatagtattctctgatggtagtttgtatttctgtgggatcggtggtgatatcccctttatcattttttactgcgtctgtttgattcttctctcttttcttctttgttagtcttgctagcggtctatcaattttgttgatcttttcaaaaaaccagctcctggattcattaattttttgaagggttttttgtgtttctgtttccttcagttctgctctgatcttagttatttcttgccttctgctagcttttgaatgtgtttgctcttgcttctctagttcttttagttgtgatgttagggtgtcaattttggatctttcctgctttctcttgtgggcatttagtgctataaatttccctctacacactgctttgaatgtgtcccagagattctggtatgttgtgtctttgttcttgctggtttcaaagaacatctttatttctgccttcatttcattatttacccagtagtcattcaggagcaggttgttcagtttccatgtagttgagcggttttgagtgagtttcttaatcctgagttctagtttgattgcactgtggtctgagagacagtttgttataatttctgttcttttacatttgctgaggagtgctttactgccaactatgtggtcaattttggaataggtgtggtgtggtgctgaaaagaatgtatattctgttgatttggggtggagagttctgtagatgtctgttaggtctgcttggtgcagagctgaggtcaattcctcggtatccttgttgactttctgtctcactgatctgtctaatgttgacagtggggtgttaaagtctcccattattattgtgtgggagtctaagtctctttgtaggtcactaaggacttgctttatgaatctgggtgctcctgtattgggtgcatatatatttaggatagttagctcttcttgttgaattgatccctttaccattatgtaatggccttctttgtctcttttgatctttgttggttgaaagtctgtttcatcagagactaggattgcaacccctgcctttttttgttttccatttgcttggtagatcttcctccatccctttattttgagcctatgtgtgtctctgcacgtgagatgggtttcctgaatacagcacactgatgggtcttgactctttatccaatttgccagtctgtgtcttttaattggagcatttagcccatttacatttaatttaatattgttatgtgtgaatttgatcctgtcattatgatgttagctggttattttgctggttagttgatgcagtttcttcctagcttggatggtctttacaatttggcatgtttttgcagtggctggtactggttgttcctttccatgtttggtgcttccttcaggagctcttgtagggcaggcctggtggtgacaaaatctctcagcatttgcttgtctgtaaaggactttatttctccttcacttatgaagcttagtttggctggatatgaaattctgcattgaaaattctttcctttcagaatgttgaatattggcccccactctcttctggcttgtagagtttctgccaagagatcagctcttagtctgataggcttccctttgtgggtaacccgacctttctctctggctgcccttaacatttttcccttcatttcaactttggtgaatctgacaattatgtgtcttggaattgcttttctcaaggagtatctttgtggcgttctctgtattttctgaatttcagtgttggcctgccttgctagaatgggggacttctcctggataatatcctgcagagtgttttccaacttggttccattctccctgtcactttcaggtacaccaatcagacgtagatttggtcttttcacatagtcccatatttcttggaggctttgtttgttgctttttattcttttttctgtaaacttctcttctcacttcatttcattcatttcatcttccatcactgatacccttttttccagttggtcacatcggctactgaggcttctgcattcatcacgtagctcttttgccttggttttcagctccatcaggtccttttaggacttctttgcattggttattctagttatccattcgtctatttttttttcaaagcttttaacttctttgccattggtttgaatttcctcctgtagctcagagtagtttgatcgtctgaagccttcttctctcaactcatcaaagtcattctccatccagctttgttccattgctggtgaggagctgcgttcctttgcaggaggagaggcactctcatttttagagtttccagtttttctgctctgtttttttcccatctttgtgtttttatctacctttggtctttgatgatggtgacgtacagatgggtttttggtgtggatgtcctttctgtttgttagttttccttctaacagacaggaccctcagctgcaggtctgttggagtttgctagaggtccactccagacgctgtttgcctgggtatcagcagcggtggctacagagcagtggatattggtgaaccgcaaatgctgctgcctgattgttcctctggaagttttgtgtcagaggagtacctggctgtgtgaggtgtcagtctgcccctactggggggtgcctcccagttgggctactcgggggtcagggacccacttgaggaggcagtctgcccgttctcagatctgaagctgtgtgctgggagaaccactcctctcttcaaagctgtcagagagggacatttaagtctgcagaggtaactgctgtctttttgtttgtctgtgccctgcccccagaagtggagcctacagaggcaggcaggcctccttgagctgtggtgggctccacccagttcgagcttcccggccgctttgtttacctaatcaaacaactaactcggcaatggtgggcacccctccccaagcctcgctgccgccttgcagtttgatctcagactgctgtgccagcaatgagcgagagtccatgggcataggaccctctgagccatgtgtgggatataatctcctggtgtgccgttttttaagcccgttggaaaagcgcagtattagggtgggagtgacccgattttccgggtgccgtctgtcaccctttctttgactaggaaagggaattccctgaccccttgcacttcccgggtgaggtgatgccttgccctgcttcggctcacgcatgttgcgctgcacccactgtcctgtacctactgtctggcactccccagtgagatgaacccggtacctcagttggaaatgcagaaatcacccgtattctgtgtcgctcacgctgggagctgtagactggagctgttcctattcggccatcttggctcctccccttatttatttttttcttacataacaagaatgccagtggttggccctgcaggcttggtgtcatggcccccaaggtaccactggagactctggttctttgtgtctttgtgtcccaccaaccttagtgtgtggctttcatccttatggtcacaggatgactcctaaaactctgtacagtgaatcagtattggagacaggaagaagaaaggaggtaaaaaagacatgccagctaactttgctcccattaggaagctcttctagaagctcacagaattacatttgtttatgtatttcattattcagagctgcgttagctttgtctacaagggagattggcaaatgtagttttcattagcccagcacattgtcacccccaacaaaactagggttgagttagaatgaaggggctagtgcatattgataggccactagtagtttctacacagcctccaacaattgctgtggatgtagattagtaacagaacttccactatggcatcatagcacctctatcccactagtacctgtagtaggtccaaatcatctaattccaggagcctggcttaaagaagaggaatattgaggcttctaggtccagtattaatcaaggtaagctagctgtgagaacaaacaatctcaaaatctcagtgaacgaaaccaacaaaaacttgtttcatgtttatatcacagtctgatgcagatcgagtggttctcctccaagcagtgactcagggacccaggctgcttccatcttacagctctaccatcttgtgactttcagattatgttggcatcattcagccagtgactaggaagaagagagaatgaaagattgtgcacccaattcttaaatacctccactcaacactgggacacatagcttctactcacacttccctggggaggactgcttacaagattcatcaatctgcaaggagggctgggggaatatattatagttcttgcctggcggcacttccagcaggaacacttcactatgaaaagggagcacaagtctttggggggacagctagccttctgtgccacaaaagcccagtcacaaagaaaaagccattaccaaaatgttccataaacaatgtagacctactgtggtttgctgttgtctgatagataaaaactgtgttgttttagtcacaaggatttggatgtgggagctgcaaggaaagcaaaagccaaacaagtacagctgaagcacctgagatcctaggaggagacaagaagaatacaaggtgccattgtcctatcagccaggcagaaagatggtaggaaacaaggccatttaaaatctaattgcaattgcaagggctgggtgctgtggcttacgcctgtaatcccagcactttgggaggctgaggcaggtggatcacttcagctcaggagttcaagaccagcctgggcaaagtggtgaaacctagtctctacaaaaaatacaaaaattagccaggcatggtggcatgcgcctgtagtcccagttactcaggaggccaagatggaaggatcaattgagcctgggaggttgaggcttcagtgagctgtgattgtaccactgcactccagtctgggtgacagagcaagaccctgtctcagaaaaaataataataaaataaaatctaattgcaggcaaggccacaggaagtggcaagtgcaactaaagacttcctagaaatcccacacattgataagcagccgggttgttcagccagtttttttttctgagaacaaccaattttaaaatattttaggaaaaaccacaatattgagatatttttaaacagcttatatttaaacagcatatatttaaacaaagtgattaatttagaattcatattttatttgagaaaaaaacaagatgttcctggtctggcagatgacattctaaattattcactcccacttgtggaatagctgagttatagtccggcccctcctctgtagaggaggatttataggagaagatgagtcacgttactttttgtgactatttttctttgcatttgttgactcctcttgttttattcaccttctaatcattgaataatctgtacaatcagactgccttattcatgttggcagttgttttaataataacaatgcacagagccattgctactaacagaaagcagggcagacctttgagtctgagtttggggatacaagtttgattccatcccagctccactgattcccagcgagatgtggttcaacatcataggaccaaatgaaataaaaagcgtgaaaatgctacacaaatcaaagagtgctaaagacatattaatgaaacatctgtaaaatgggaataagtaccacgtttctgaggtagcatgtaatacaactggcacagggttccacacttggtagatactcaaaaaagaaaataaaaagttaacatggacaaagtaaaataaactggaaataggagatggagaaatgttaaaacaacaggcaccataataatgtaaagtaggatttcagctcatttacaagcacagaggttatatggtaagtcctcacttaatgttgtcagtaagttcttggaaacagtgtctttatgtaaaacaacataaaggaaaaccaattttgccataggctaatggatataaacaagagttaagttccagtacatatgtgatggcatatttccagttacaaaatatcaccaaacttctaaataaagaccaaaagactcctaatattaaacattgaaataaatgtgagctatactttcatataagaaaaattaatgcaaacaagtacaataattatttactgagttattccagttcggggtcgtggatggccagagtctatcccagccgtccagggccaagtttggaacccaccctggccaggacgccatcctatcacagcttgcactcacacacactctcactgggaccatttagacacaccgattcacctactctgtgcatgtttgggatgtcaaggaaaccggagtaccctgagaaagcccacatgggggaacatgcacactccacacagacggtggctccagccaggaattgatttattttctcatcaatgttataactaaatgactttgaatgaaacaatgttatttgataacctgctgtatttagagttcacaaaatttatccctctgaaacacatacacacacgcatggccgcacacacacgtgcatgcacacactgcacacacttaatgctaaacttgaaagagatttaaaggctaaaaggaaagttggactttaaatttcccctggagctcacattttctgggtactgaaagatatggtagatacatatgattgccttttccaaaaataacttctatggaaaatcctgagagttataagagactacaaaggtgatttgatagagccacttaagtaatgtatgcaatatgatcaccaggtatacttgtatgagagatgggaaagaaaggaaatattgaaagagcagaaccatgaaggagaagaagcaattgatcctgaagaatagcaactgtagtcagggattagagacctgcaaacaagtttcctattcttttcaaaaatgaagaatagcttcttattacaaaagctgtatatataaattatagaaaagtcagaagtgcaggtaagcaaatactttaaaaatcaaaattatctctaattctttgacttattaatcattttaacagcttgattgatattttttcagatacacacatacatacatacttctacaaaactggaagtatgcttatatattgtatcataacctgcttttttatttaaaaaatatcatgaacaacttttcatgtcattaaatattgttgcattacatttctaatgaatgcataacattccattgtaaggatacagcgtaatttaactcagtctgtattgagctacattgatttccagttattcacattagaaacagtacaccactgaataaatttatgcattcatctttgcttacctctttaatgattcttcacgataaatgctagaaatagaaccacagacttaaaggtctccattgatatgtgtggctcccttgttttcctttgcaaggttttgtgtggcatctgcctttaaaaggttaaagatatttttacttataacatccctgaactttacctcaagtcttggggaaagttattgaaaagtagtttgtattcaaataagtacaaactggcaaggtcaatcttttatacaggttatcagaaacaaatcaacctcataagatggaactaaacccattattatgattgagtcagcaaacttaaagatgtgtttggtttggacaaatactattaattccttaagttccctgtggccacagtttttttttttaatgaatgtttttctgagtaatcttggtcctatttgaggccatcttcatatgcactaccaatatttccagctatacccaacaggtaaactagccctctgtaggcaattaaatgtatattttcctgaagaaagtaaggttatatagaatataagtataaggtcacctagaagagctattaatgtattatggacaatttctttttattgccagagctacatgttacttatatttaagtctgatatttaattctctattatattcccttattattgaattaattaattcatccattcatatgacagatatttcttgagcacttacttgtgccaggcactgtgttagactctggggatttggaaagaccctgcttccctcatgaaacttacattccaatgatggaaacagatcatctgtaagtgcgtaaactaatatatcatgtcagataatgtctcatttccttatctcttaaataaaaaaatattctattccatagggctgttatgagaactgagtgagactatgtggaaattaccatacacatgtttaaaaaatattgtttctttttcctcttatcttttagaaaagggaaaatgattattgtttctttttcctcttatcttttagaaaagggaaaatgatttgtataaatcattaaatactcccttgatattacaaaactagcaaattgttttttgattttattttttaaattgtcacataataattgtacatattcatggtggtacatagtgatgttttggtacatataattatagtgatcagatcaggacaattagcatatccatcatctcaaactctaatcatttctttgtattgggcatgttcaatatcctccctttaagtatttgaaacgacacaatacattattgttaactacctcatcccacagtagtatagagcactagaacgtattcctcctatgtagctgtaatttcgtatcccttaacaaatctctcccatctttcccttccccctacccttcctggcctccagtaaactctgttctactttttacttctatgagatcgaagttttttagcttctgcatgtgagtgagaatgtgaagtgtttaactttctgttcctggcttatttcacttggtgtaatgtcctccatttccatccatattgctgcaaataacaggatttcattttttaatggataccattccagtgtgtatctatcccacattttctttatccattcatttattgtcagacacgtaagttgattccatatcttggctattgtgaaaatgctgcaggaaacatgggggcgcagatgtctcttcaatataataatcttttcctttggataaattcccaggagtgggattgctagatcatatggtagttctaattagcaaattctatattccatattaaaggaaggaataggtaaatttttttcaaattttttattttgttaaagatggagtaatcctcccacttcagcctcctgagtagctaggattacagaggtgagccacagcacctggcatgggataggtaaacattttttaaaatgtttgttttgtttcaggcaaaattaggtatcaactgtttctccacaaagaagagcagcttaagccttcacagcacatagttctgataattcaggtcttcttttgccatttctcaaacatagctatcttgtgttggtacatgcgatctgcagggccttagacgaatcatacatttcatctctctgggcctcagtttcctgaagatgaagttatgttatatggttcgtaaagttcatttcagggctaacttcactttgtccttgtaaaaattatctgcctagtgggtccactccccacctcaccaccccccaaaaaatgactgctgtgctccaacccaagccaatcaaaaatgataaacacttgactgtgacttttttcaagactctgttttacagagaagtggaaaggtctactgtggaatgcttatattttaatttgtcctcattgataggagaggacaaatgtaaactaggagaaatggaaaaaccagtgatacatgtcttgttatgttaaaggaaaaagctagagacaatatgattattaataattattttttaaaattaattcttgcatttattgagcacctgctgtatccctcatatgcattaccttgtataagtcttgtaatagcccaaaaagttaagagtgttcttattctcccaaggatgcagatatggaaactgaaactgagtacggttatgcagtatgtgaggggcaatgctgccacagaaactcaagtctagctgagaccaaacccatgtttttaaccacttgcttcttgcctttgccaatcattgccaccaacgagtcaaaacttacttgttgctggaacatggtttcatcctggccttccacggaatctgttgagcttgttttttttttttttccatatgccataatatgtttagtttcacctcagatgagacagaggatttactttcaagaaagttggacgctgtccactctaaacagtaccagaggtagccttacagcatcagaaaatcctgtggtagtatctcttcatcggaacttggaatatgattttaagagttttttctatcttttcattagagcaggccaacactgacttgatttttctctgaaattagctgtggacaaagattccttttcaaactaaagattctaagcttattttcccccatcactttatcaaaactagaaacaatccattaaaaacactgcccagccttcaggggcttaatcaactcagtggtataaagcatgaaacttgattctgagatccaggagagaatatttggattgccgggaggtgacctttatatgtttctttacgtgtataacaaatacatttcaattcgcgtctagccccttaaaaccagtgcatgtttctgaccctgagtgctactgacattgtgaatcgcactgcaaacagaacacgggtcactgttgttttcctgatctgggaagacatcatggtgtggtgaaagggacagtgcgctgctgatcagacttgggttctgtctctcctctgctaccagtgaaatgaatttcagatgcaaagtggaaagatcaattgtttcttggcctctttgctgagatcaagggaagaagaaagatcagattagttccgtgacagtccaatatttactgactgacccatgttctgtttcatctcaggatttccagggggctccaatttggaccactgcagcggtcccaactgccaacctatgttttcccttcttccctacctttcccctgcagcctcaagtggttccagataaagtgttattccatgtatctcactgtctgaatctagaggactctgatacccaaatgtgtttctcagagtgtgtcaatgaaagggactctttgacccacaatccccctttttcttcacaactccatcatcggcatcctcaaagacaatccatggtgcctactactcctcatcttattgacatgattttaatgtcagctctcgccgggcgcggtggctcatgcctgtaatcccagcactttgggaggccgaggcgggcagatcacgaggtcaggagatcgagaccatcctggctaacatggtgaaaccccgtctctactaaaaatacaaaaaaaaatttagccgggcgtggcggcgaccgcttgtagtcccagctactctggaggctgaggcaggagaatggcgtgaacccgggaggtggagcttgcagtgagcagagatcgcgccactgcactccagcctgggtgacagagccagactccgtctgaaaaaaaaaaaaaaaaaaaaaattttagctctcaaagttttcctccatgttccatgaaaatacactttacaatctagtattccccccaccacacacacacacacacgcacacacatatatactgaaacgaaaccatatccaacttcatttccatttccaattcattcaacattttctattctgttctattgcatttaaaaaacgctggtcacaagccactaaactgatctcagatcagactttaataaatcagactcccccttttatacgcacagagcactctctactgtttcttcctagtacttgtcacaatttgtaagtcctaaatcatgtgattgcctacttaatgtctcccgcaacctgcccctggtgttctgtaaacttcaagaggatatgttttgctcacctttgaatttttagatcccatacaacacctatcatatcataaatgtttaataaatatttattaaaagaattaataaatgaatgtggccaaacctattcaggtctgcatggttcctccctagagttccatcacacttcacagatctaaagtttcctcccagttgtggaggtttgaagctcaaaactgctggaggtgcttcccaccatagctcgtgaaggccctattggtgttttcttcctagtccgtctctagttgatcatgacagatgggccagtgtgttttgaagaagactggctgatgcctcaccaaattctggggacaggtgcctttctccaggggaattcatgaagagactctccaggggcagggcagaccactgggaaaaacaagacccttgggttttctgaccactggccacttgtttttcccacatcaggagagtttatcatctgtgctcatccacctcctgaggttgctttgctggtgctgatttcaggtcccaggcccctaaggtctcacactcactccacaagccacctacacagctgtagttgttttcagccgacagctaggttattttgccttccaagatattttcttttatttatttattcatttatttattttttgagatgaagtctcacactgtcacccaggctggagtgcagtggcacaatctcagctcactgcaacctccacctcctgagttcaagtgattctcctacctcagcctccccaatagctaggattacaggcaagcaccaccatgcctggctgatttttttgtatttttttgtacagatggtgtttcaccatgttggccaggctggtctcgaactcctgacctcaggtgatctgccctcctcagcctcccaaagtgctgggattacatgcatgagccaccatgcccggccaatagtttcttttttgataggcagctcttaaagccctcagaatacatctctaatgatgaaatcatcaggcaacttgacaaagagtgaagaaattgaagggttctctcaatagcatcccaaggaggctgacccacaccctactgcctaccataggctggcttcatgtgctctagtgctgtgaataaaggaaaaaactaacatgttgaagcatttatttagtgccaggaggcaggtactttctcagataccctttttcttctcacataattccaggtcattggcagaatagagatgcaaaccaagaacttgggcagcaccaagatgtagatgctaaaactttaaacttgctggacaaaatgataggggactttgaaataattattcagacaatttaggcaagcaaacaaaagcaattaaaaattgggcatctggctgggcatggtggctcacacctgtaaccccagcactttgggaggccaaggagggtggattgcctgagctcaggagttctagaccaacctgggcaacatggtgaaacctagtctctactaaaaatacaaaaaattggccaggcatagtggcgtacctgtagttccagctacttgggaggctaaggtgggaggattgcttgagcctgggagatggagcttgcagtgacctgagactgtgccactgcactccatcctaggtgacagagtgacacccatctcagaaaaaaaaaatgggcatctggccaggtgtggttgctcatgcctataatcccaacactggaaggccaagtctggacaattctttgaagccaggagtttgagaccagcctgggcaacatagcgtgaccccatctctacaaaaaaattaaaattaaaattaaaaacagccagacatggttgtgagcacctgtagtcccacctactagagaggctaaggcaggaggatcatcaaaactgcagtgagctaagatcgcaccactgcactccagtctgggtgacagagtgagaccctgtctcaggaaaaaaggaggcatccaaaaaaatgttcccttagatccattttttgtctgacagagacaggagaggtgatgaaagggaatgtaagagtatttaagggattatttctttatggtagcagaaggacaaagacatgtttgaaaaatttttaatattgtataaaatgatgatattttcttagtggtcttgttgttgaatccagagattgtggtcatgtagttcataggtaatttatcagttattatttattttttaaagcttttatttatttatttatttattttagagatgaagtcttgcaatgttgcccaggctggcctagaattcccgggctcaactgatcctcctttctcagcctccctagtagctgggactataggcacacaccactgtgcctgtctaatttgtcaacttttaaatgagatcatctgcaagttcaaggaagttagataaagggtgataccacagaaaaaaaatgagatttttctctttaagatgaatattgaatttagaattccttaattaatattgaggatcacatgcgagctacagatagggaatattgagtatttaaagcattctgaatgacctgagtgttttccttctcatgcttattaaaaacatttaccacttacagctgaattggaatatagttctacataaattgttatttacacctgatacacagaaagaaatgtgtttccttatttatcatactattaatttgaatgtgctattctttttttaattgctttaaagtcaattggggaatcagattatgaatatctattttactgcttccacatttcctaagttaatcaaatacgacaagttagtgagcttgtggaatttacttgaatttcctaatcttttaactgagagggtattttcgacagcaaatattttgtagcatccatttgtcattttttaaatattcaaactagttttttttaaaataatgccaagtacacttagtgcctagtaaatgctggccactgttattgctgttatcattattcttttttgtttgtttgtttgagagggagtctcgctctgtcgcccaggctgaagtgcagtgacgtgatctcggctcactgcaagctccgcctcccgggttcacgcccttctccggcctcagcctcccgagtagctgggaatacaggcacccaccaccacgcccggctaattttttgtatttttttttagtagagacggggtttcatcgtgttagccaggatggtctcaatctcctgacctcgtgatccaccctcctcggcctcccaaagtgctgggattatggcagagaaatgtttgtttcaaaagtgtgttagtctctaaggaaatgaatacttccagactaaattctgtttatagtattatcattaataaataaactaaaacattacttctgtttcattgccccaatgtatattgtattaaaatgttcttttctgatcttctctaagttaaaaaaaaaaaaaagaaacaaagttgagtaaacaagctgagcaaactttgtgttgaaactttaatatgtccgaggaaaagaatcttgcattaagtccaatacagagagtctgataatttggtggagcagagagcctcatctgaggtggctttccgtgaacagcatctctgaggtgtcacctgctaccacattcactgtccaccctgggctttgcccctcaagcaccagggctcaggtctcttgttttgcctgtttctccctatagtctccctggcctgtgccttttagacaaaacagattaacatcacctttaagccgtcaatactgaacattctgtctttataaggcctgactcattaccaattttatttggtcaattttaccttccttgctttcaaaggaacaccatttgcctatgtcaagtgttctctttcttttatttttcccttccttctgtctttcccctccttccttccttccttcctccctccctcctctctcctctctttcttccttccttgcctccttccatccttccctccctctctctctttctttctttctttctctctctctctctttctttctttctctctctctgtctttctttctctctttctttctttccatcttcttttctttctatctttcttacttttgatgtagctgtcacgacctaatgaaaatactggcatgagtgatgccacctttagattctccaccttcctgttcctgtcctattcaccaacatgaattggtttgtggctgtaagtacttggtgggttattgctcatagattcagttgcatttttgctgagatagtgctgttaccaaaagcaggggtgctgcttgaagaagtaaacctaactctgaaaaatagagactctccagaaacatcataatcttaaggatggacatttgtggcctgttattgttacttcattctaggtgacagagtgaagtgagtgagggcaaaaatgactgcacacttatggaaagagggctgcctccaccacagacaggtagtgggaggtcccactcttccaggttgaacccaatatcctatcttctccttccgctcttggtacctgttgttgctattgtaaacacttccctcacctgggactgcatatagatgaaagattgctggggggtttcccaggatcttgggccagtgccaacaaatggcaaactttcaagtctagagatggtcctatggcatgactgggggacaccacttccttcaccagaacattcacatccttcccaaggtgccacgcccagttcttttgtccaacaataaactctgcgaagtggagtgaagtcaccacccaagccttagcctacctctgaccacagcctgtgactccacaaagataaatgaaaagaggaaagtcagtgatgttttctatactgtcagcagcaatctcacagcctcaatacattttctttcaaaagtttaatatgtaataactggcatttcttcttcattcctagttggttagactgcatcacatctgccatgccaaactattaagagtaatacaattcttactcttagtttattaagagtaaaaactattactcttaatagtttagcatgctattactcttttcttattttttaatttttttaattttttattttttgagacggagtctcgccctgttgcccaggctggagtggtgcagtggcacaatcttggctcactgcaacctctgcctcccaggttcaagcgattctcctgcctcagcctgccaagtaactgggattacaggtgcccaccaccatgcctggctaatttttttttttttttgtatttttagtgggcaaggggtttcaccatgttggtcaggttggtctcgaactcctgacctcaagcgacgcccccgcctcggcatcccaaagtgctgggattacaggcgtgaactgctgcacctggctgacgtgctattactcttacagcatctggacaatccctaacagtctgaaagctctataatgttgcaggtagtccaaaggccctatcccttattctagaacacaggctttatagcacaggctttggcaagtctgtaacagtctgaactcctccactgtattccacatactagggatcttttaagttgtcattatgtcctggcacaagcatttatcatatttctgggagcatgtagggttcaagatgcgagggcaagagagggctgagttgtttgttattaagctgacaggaaatggccaaggctcatgtgctactgcttgcagttgggcaaaagaggataaattaattgctttgtagaaattcctttctgcattctttagggaaaatttttccatgtgagctaaatgagtcaaagggggtggttttgggctcaacagctttgacattgtcccttcaaggaatgaaacaattaaagaaactgatctcctctgagaaaaagaccatttacaataacctatctactctacataaaatattcccagtagactcatcaaaacaagaccctctgataccacaccatactgggtttttccttattgggattcccccatgttttttctttaatgcttccccatgttttagaaacagatttgcttacccggaaccttccacactcaattccaaatttatcatagtactatcatttgggagtaaacaacatgtaaggggcctacacgggtggaaagcccattcaagaaactgaggatgatcaaatagtagagttgatagtatgtgtataatcccagggaggagtttcatgacggattagaaggtcaacactgcctgatgcagccgaaagatcacattaaaacaggacaggaaggaagtcctggctgtccagcaaaaggtctttagtggctatatcaagagaagcttttacagaagggtgagggtggtagcctgcgaacattggattaggagtgagagggactgaaggaagtagaaactcgagctcaggggaaggggagagaatgagcttgaggaaggccctctgatgaagggaaggctcttttctgatgccagtgagttgagcagacttataggaagcaaagaggagtctagggacagacagggattgtccaggtaatgtaggaaacatttgacaaggacagatctcgaataaaaacatgaatgcaatttctgtttcagatgtctcctttgcctgccccatcccacattctagaaaaatatttggtgcattaacagattttggacttcacagggcttcacttttattgtgcttaatatttgttccttggtgaaacacaaagagacaaactacacaaaaagagaatcatacttgatgaaaaaaatcaatgtttagaagttgctcttaaatcttttacccattgctaacatgggtatttggatgccatttggaacgtattccaggactacttatccatgaaaggattaatgatattggagccaggttcaaagtctcagcaacaagctaaaacctgctctttttagtagtcaggggcaaagcttagtatcctttcttctgaaagctttcgcatgctaagctttccattgccaagcccccgggaaggaaaataccagaagtttcactccgatagcagctttttctgagatgcgcctggtgataacattttccagtagggctatcttctgtctccttccttctctgtgtgtaccagtaaagccttgtacaagtctcttaacctttcttggcttcagtttccaaatttgtaaagtgaagataataatacctccctcatagagttgttgtgaggactacatgggctaacgatcagacagaaagcactcattaagtgtgactagcattgttaattgcagtaatagtagttctagtagcaggcttttccaggttataaggattaaagatacgctcatgttacctaagttaatggtgcattattttaagggtacaccaaaaagtaagaagaatgggaaactacttaaccagcacatggggtgcagaagcgagagcaattgtgttttctttttttttttttttttttgagatggagtcttgctctgttgcccaggatggagtgcagtggtgagatctcggctcactgcaacctctgccacctgggttcaagtgattctcctgcctcagcctcctgagtagctggggctacaggcatatgccaccatgcccggctaatttttgtacttttaacatagacgggggtctcaccatgttggtcaggttggtctcgaactcctgacctcatgattcactggcctcggcctcccaaagtgctgggattacaagcgtgagccaccgtgcccagccccaagggaattcttacagcctgacaggtttggaactctgagtctctctgtgtgtctgtgtctctgtcactccaccatatgtttagcagggttaattaatttgcccaagatcacacaattagtagatgattatgcaagatttgaaccagttgttattcattggaatatgattactgtgtaagttagcatgagaatattgaaaataaatgtcttgttagattcatttattttttaaaaaattcctatgtaggtcgggcacagtggctcacccctgtaatcccagcactttgggaggccgaggcgggcagatcacctgaggtcaggagttcaagagcagcctggccaacatggtgaaaccccatctctactaaaaatacaaaaaattagccgggcctggtgatgcatgcctgtagccccagctacttggtaggctgaggcaggagaattgcttgaacccgggaggtcgcagtgagccgagatcacaccactgcactccagcctgggcaacagagcaagactccatctcaaaaaaaaaaaaagtcctatgtatacttcttcacatcaatttaggcaggctttatttgttaacttttgttggtagccaacatgcatttaaactacttattattgtcctaatctaagaaaaactgagaaatggatgaagttggtcctagggtatcccaaagcacagagtgttttattctgtccttgggacagaggtttgattcaaaatgttttttcggaaactagccttgaacacctaattttattaatattctttttacactccatccctcctggaaaaggactggaccccaattcccaccattgcttttttgggacccattatcttccttagcttcctatgcatctacagggtagtctgggcttcacttcctcagtgtccctgtatgaaattaggtggatatagattagtctgatgtaggaatatcacactgtactaaggtttagtttgtatgttattctctcaagtaactgatctttcaatcgaactaaacacttcctatgtgctttaaggtggtgggaattacaagcatagcaagttatgattggtcacggatttctttcctctttaaatggtgacctactgcccattgtacctactcaaagcaactttctttaggaaaaaagaccacagtctactttcctaagcataaactcagttctcattccacctctaccacctgcaagatttgttaggcttaagcagtcccttaacttctttgagtgtttgttgccttgcctacttcattggaagtaaggctctggaacagggaaggtttgcctccataagactaaaagttatgctaatataagagactagcaaaatgggagacatattcagctctcttcttgtggggaataccttgcccttgaccaaaagccttgtcccagaaagagccgtgtgggtgttggctttgtgcccaacatgtggctcctctgccatgattgatggcttcatttaagaaacaggttttaggattttttcccctaaaatcttattcctgttaattatcatggatcaactttaccttagctcgtttaatacacagtcacctggtataaaagcatgtgaaaacccccagggatcgtaaccacatttatgcattgagaaaagagagtgaggccaagattttgagatgtgttcaaatgcaagaagcttttaaaatgcaaagtattctaaaactgttgaaagttgaagctaactgttgttcccttgttgaaggtaaaaagtaaagcatttttaggaaagcacttttccttatgtgtctaatatttgggaactgcataggagaacagtttaataggaaccctgatattgacagtaagatatattcttaatgtagtaaccagacccagggcagaatttgcaaacccatggtaggcatacaggtggctgaagaagaatcgggacagcaagatctcactgagatgcaattccattcctccatttgatacagattaagatttctgaaaaagaccatcctcctaaaccctcatggactctgcagataatatgaggccagaaaatgaataattcccaactcttgctatctcgttactggccagtgtgtctggcttcgctgagtgtgtgccttctgaagcgtaccctataattattcagcaggtatagtccagttcgtcctacttactttagcaagattacctttcttttatttttcctgtgaaaatccttctcttccttctttcctcctttgtctttcctctttgttaactttttaaatctaaagtgccttgaaaaacttgtttacatagtagtaagaaggaaaatgttgacttgtgctatcctgggaaccttgaccttcctgcattatggataaatcatttccctgcaggtggaagtggaaaattgcagatagaaccacattgactcacattctccttctacttccatttgagtgagcaccaagtatgcatcacgacttgagattataaagttggcttaatgatgagacaggtttctcagtcgggttttccattggctcgaagttcacaaggcagttgttgcttgtctcagagtgtccttaggtggactacatctgaacccttggcgttattataatgcagattctagctgtgctcaaaccaatgaatcagaatctcaggagggtggcgctcagaaatctgcatggttgatcagttctttagcagattcttatttttgtatgctaaagtttgagggtcaccactggagagattccagaacagggcctgcaagggaattgttcaaagtttgctcaagttaactttgttgttacagcattagcttgaatatcaggaggttttgtatttaagttctctaaaaaaagaaaaagaaaaaaagagaacagtctcaatatataaaaggaaaggttttcatatatgtgcccaattataagtatcttgagtattctaggagtctaaacagaatgtctttagatcatccttataacgatcctgagactcttttgactgttttgagttgaagacaggtaataagaaagaaatcaccaattaatgcagaaggaaataaatttctgtatataataatattcacatttgccatgtctcttttaaaaagtccaaataacaggcagagcgcggtggctcatgcctgtaatcccagcactttgggaggccaaggcgggcagatcacctgaggtcaggagtttgagatcagcctggccaacatggtgaaaccccatctctactaaaaatacaaaaattagccaggcgtggtggcacttgcctgttgtcccagctactcgagaggctaaggcagtattatcacttgaacccaggaggtggaggttgcagtgagccgagatcgcgccactgcactccagcctgggggatagagcaagactccatctccaaaaaaaaaaaaaaaaaaaaaaaaacagctcaaataactttaccgtacataactttaccatacatgtcctctagtctcttatcatttcttcatatgaagaataatttatactcattgatgtaaattttgctatattttatacaacaaacatagtattattttaatattgcacatagagaaaaatacctcttcccctcaaaattagaagggttggtatttttattcaggcttattgatttaaaatacctgcttgatccgtaattcaggccatacgatttcaccaaaacaaatatcctaatagttgtcatcttgaataactgtttagtgcacagaatgtagtctcatttattaagaagtgatttaagagattattacttctgcatctatcacactaacatgaccaactctttagtaagggaagagtaagggaacttattttatatctagatagaaattttattaaggatacagtattaggattcataggggaaatagtggatagatcacaagaacgaggctctttctgagccctgcaggaaagaatatttgcagaacaataaaggacatggtggcttcctggagaatgttggccgaagactgagccttacttctggaaaaggctcagtgctagagccaagtgagcatcgatatgccaatacaggcaagaaaatcctgcaagaggcagacttggttcttaggtcggaacaggctctgcttcagaacttgatccggtacccaattcgtttctgcttcagcttctttttctataaaatgagggtagtacttatcccatgagggagctgttatgaggataaatttggctttattgaatgtgcatgattcctggaacccataaagatgtcaaatttagaagcctcagagagatttcctttgctctgtgaataactaaatttggttagctggggtggggtctgggtacttttccttgtgaagaatttttccctcattctggtcatctcctcccctcctatagaggcaccatatatttttcttgtctcaggtacctatagtgataaaacaccctgagctgaaaggatcgctggatagggcagtctcaatacaaaagaatgtggcagaagctcaggcttcagtgcacatcagaatagaagcttcatgagggcagaggcttttgtctgctttcctcattgcagtatccccagaactttgagcaagtgcacactcgatgaatacttgaaagaataaatcaatgtcagacatctgggcttatgtctcatctttctactgttctcaactaagagattctcgtcattctacaactttcctgagcctgctctccttctccaaatattcacccttccaggcactgactccacctcccacatcagagctttttcttaaagtaaataacagtcaacaattaatagcttcataactttggaacagtgcagtgtctttggtttaagaagcattgtttccatcctccaaactaaaataaattttgagaaaagatggagatggtttgggactggggaagaagggaatggaagaagtgattatttgagggcacattaactatttgtacaaagtagaatatcttagttaaatttggctacatagcaagcaggtatcattaaatggatgtctgttagaatcttgattttcaaattaactagatagtcagcgttagttagactgagggagggtgattacagtcctatgtcactgagggagaatggtgaaagggcaagagaaggctggcaggtagagctggaatttttctgccagcaatagaccagtggttcccaaatgtaagcctgcaacagaatcatctggagggcttgttttttgtttgttgttgttgtttgtttgtttttggttttgtttttttgagacagagtctcactctgtcgacaggctggagtgcagtggcgcgatctcggctcactgcaccctcagccttccaggttcaagcgattctcctgcctcagcctcctgagtagctgggattacaggcatgtgccaccagcccagctaatttttgtatttttcgtagagacggggtttcaccatgttggccaggatggtcttgatcccttgacctcatgatctgcccacctcggcctcctaaagttctgggattacaggcgtgagccaccgcgcccagccaggagggcttgtgaaaacacagatagctgggcccatccctagagtttaggattcagtaggtctggcggaggcctgatagtctgcatttctagcttggccaggggatgttgatgttgctggtcccaggaccacattttgagaaccactgcaatagagagtgtgcatgaaaatacaacaacaattacctgatggtccttagcttagttcagttgtcccccacaggttgaagcagtgttcaagggcaaacaaaaactttctctctcagccacctccataagttccatagtttatttaacaaagcaaactcacaaagaaggaggaagttaggactgctccatttccccttatagcaaaggcatgtgtatttcacaactgcaatcagcttgaatagcagaggctggaaggctctccatgtctttactgaagtcacgtcactaagtcacacagacatgctgctaattcactgccttggccagcacatctgaaaataaatagcaccattataggccctttcatgaatatacagcatgtggcctctaaattggccaaggagctggctatgctgggacaaataacttagataaatcacaaatcagagtggagaaatgaggtgtttttaatcaacagcatccaacaatgtgtgttgagtttaactgaatccaggtagaggagggagtgggtgcaagagctcaaagtatgctgagaatagttttatttcaaaattccaggagacttagaaacaacatggtaatgatgaaaggagcctgaagagactctttttttttttttttttttttttgagatggagtcttgctctgttgcccaggctggggtacagtgtcacgatctcggcatactgcaacctctgcctcccgggttcaagcaattctcctgcctcagcctcccgagtatctgggattacagacatgtgccaccatgcccggataatttttgtatttttagtagagatggggtttcaccacgttggccaggctggtctcgaactcctgacctcaggtgatctgcccgccttggcctcccaaagtgttgggattacgggcgtgagccaccatatctggccctgaagagactcttaagatactttcataatagtttaaaaagctgtatgtgtgtttacaatttctgtcataaatctatggtaaccacagcacaaacattttagaaaaagaaaaaaaaaaacaactctcggttgagtgtggtggttcatgcctataatcccagcaatttgggaggctgaggcaggaggatcacctgcatccaggaatttgagaccagcttgggcaacatagcatgacccatctcgacataaaattaaaaattaggtatggtggtacatgcctgtagtcctggctactctcaggggactgaggtaggaggatctcgtaagtcctggagtttgaggctgcagtgagctgtgatctcgccactgcactcagcctgggtgacagagcaagaccctgtctcaaaaaagaaaaaaaattctattttcccacctctctaacataactgtgaatagtagtatttccttctagtttttaagtacactatttaaaaacatggaaggttttcaaataatgtacttagatttaaatgcatttttaagcttatacccatataataagcatagtaactaacagaatgttctttggagtcagatagtcttgggttcaaatcctccagacatttccagccctgagttttgcatttgttaaatagggatgataaacctggttcatagcattgctgtgtggattcactgaggtgctcatcaagtgctcagcacagagccctgtgtcatgtaagcactcagtaaatagtggcatcattttctgttttcacacacaaaaaatgagtcgaccttctgcaatcctaataatcagtaagttcttcttaatggccagaagtatacctatttttagtctatgcatttggcaaaatttcattccacaaattgtttggtggtcccaggagctgctttcaagatcttctctgaccagcttgtcgagagcttttgttatctgtgttttcctcaaagattagactcatgaaagatgtgtgaaagccaaaacaaaggaatgaccactggtgctcagagtgagagagattggtttagttgtttagccaggctatgtggctttgttcccagaccacagattataaccacaccattgtgggcaccacatatagccattttggtaaactagatatgggttgctagggacatgggcaagaaaccatgggtggggaggtgtggacctctcagccctgccctctcaagcctggccaacttcacatctgcaactgggactttgtttctgttccagacctgtttatccaactgccaacttgacagccacttggagtcctcatgagaacctcaaacttagtatgcccaaatgaaattttcagctcaccagaaggtaaccatactgtcttgagtcttacagttaccctgtaaacaaagggattaactttactagatagcaacttcctgcccataaagttaagaaaagagcccctcaatgcaaatgttggttttgcttatcaaataaatggattcttggttcttcaggatagttacagataacaatgggcagaatagccagtaaattcagtaactccttaaaattgttgaaagtattttgtgcactttctttatatcgctgcttagagtgttaattggtaaaatactctgaaggactaatacacaaacactttcacccagcaattccaattctaggactttattccacagatatatttatacatgtatgagttcacatgtacagttttctgaatttttttgtgctggcagaaaactagaaacaacagaaatgaatgaaagagactagttaagaaattattgcccagttttatagtagaatacatatgcagctgtaaaaaaagaatgagggaattattatgtatttatctattaagtgaataaagcaaaatgaagatcaccagcaaacagataaagaaattgtggtattcatacagtggaatactcctccataataaaaaggaatgaacaatgggtgaacactacaacatagacgactctcaagtactgtattcccatttgtgtaaataaaaatgtgggaaagaatgtatacatgtatttgcttataaactctatatgcacagaaggaaacacaagaaattattaccccgggaggcagagcttgtagtgagcggagatcgtgccactgcactccagcctgggcgacagagcaagactccgtctcaaaaaaaaaaaaaaaaagaaattattacctagattgtctatgcagagggaactgggtacctggcagacaggagtaggagggagacattgtacaatatgcttttttatactttttatatttaaaattgcaaaatatcttacatgctcaaaataaaaatagaatagcttatataactatgtctaaatattacatgtagttttcttctctggctattttctttttggtttttatataattttttaaaatccacttacttagcccaggcacataaatggaaagaaagatatgcttaaaattatgttatttgcaaaaacaaatatttagatgttttagagctagtatgtttttgttggtttctagtttagttctacatggcatcagactagctactctatatgatttctggacctttgcaatttgttaagatttgttttatggtcggggatatggtcaatatgtaaatgtttaatgtgtgcaagaagaatgtgtactctgaagttaggcatagtgttttctgtatatgtcaattagcacaagtctgtttatcatgttcaagctctgtgtatctctgggtttttttaatctgcatgatagaacagaagtatgtttgaaacttttattgtagttgtggatgtaatatttttcctctacttttgcagttcttgctttatatattttgagcctatattacttggtacatacatatttagaattgttgtgtcttcctggtggattgccctttgattatttaggaaatgtctctctcttcggtaatgcttcttaaagtccattttgtctgatagtactatagctacctcagctttcttttggctaggtttcataactttttaaattctttcactgtcagtctttttatgtccttatatttaaaatgtgtcaaaagaaagaaggagaaagaaagaaagaaagaaagaaagaaagaaagaaagacaccgcgatttacctatgttacaaacatgtatatgtaaccctaaacctaaaataaaagttaaatataaataaataaagtgtctcttcatgaaaactttcttagcatcattagtcattagggaaatgcaaattaaaaacacaatgagataccaccacatacaacatgtctagtataatggctaaaatgaaaaatactaacaacaccaagtattgttgaacatatggaaaaactggaacactgattatgggagtatacaaccatgttgtaaaacactttaactggtcatttacccaagaggaatgaaagaatgtatccatataaagatttgaacacaaatgtttacagcaactttatttgtaataggtaaaaactgaaaacaactcaaatgtccatagacagatgaatggatttaaaaaaaaccatgttatatccatacaaaggaatactcctctataataaaagggagtaaactactaatacacagtgcaatatagatggattgcaaaatgattctgttgaatggaagaagccagaccaaaaaaagagatatattgtatgattctatttatgtaaaattctcgaaaatgcaaaggatctacagtgacagaaagcaaattagtagttaccaggagacggagggtaaaaattaagaaggggcatgaagaaacttttttattgtagtaatggtctcatgggtctatacgtatgtcaaagcttatctaattgtatactttaaatatgtgcagttcattgccagctaattatactcaatctgtttttaaaagtaaaatgtgcttcttataagtaacaattttttaaaatgtagtctgatgacctttgtcttttaattagagaatttaatctgtttacatttaataactgatataggcagggcacggtggctcccgcctgtaatcccagcactttgggaggccgaggcgggtggatcacctgaggtcaggagttgaagaccagcctagccaacgtggtgaaaccccgtctttactaagaatacaaaaatgagccgggcgtggtggcaggtgcctgtagtctcagctactcaggaggctgaggctggagaatcgcttaaactggggaggcagaggttgcagtgagctgggattgcaccactgcacttcaacctgggtgacagagggagattccatctcaaaaggaaaaaaaaaaaacctgatatatttgggtataaatgttcaatcctactgtaggtttttttttccattttgcccacttgtttcttgttgctatagtcattacaacaatacatgtttgacttattagaatcctagtattaattagtacttttaccatttcccagatgatataatatgggctttaaaacacatgaaatccgtttacccctcaaaccttttgtgtatcattgatgttttaattctatgtatattttaaacttcacattattatcattattatatttatattgcacagtcactatcatttagatttacttatgtttacccttttggtgtatttcaatgctttcagcacttctgtgtttccctttgggattgcttttcttctgcctcaaaaactctccttactatttattttagtatggctctgctggtgataaattctctccatttttgtttatctggtaaaatatttttccttcattacttatgaagaatattttcactaggtagaaaattctagattgttagttattttatttcagcactttgaagatgtcattgcattggtttgtggatttcactttttcaattgagaagttaattttgttggttgcattattacactttgaagataatgtgtcttttccctggatgttttaaagatttttctctttgactttcagtagttctactatgatgtgtctaggtttgatttcctctgtattgattctgatgggcatttatagaactttatgaagctgcgtctggtatttttgccagccagtatttctttaaatattacttctgctccagtttcatctctcctcctcctttgggatccagcttacacaggttacatctgttactttatgactcaacacacttttctggaaagactctcttttctttaaacacaagacactaaatggttacaggtgttcttttaggtgattatgctgcttcatcagcagatggtgattatatcaagaaggaaacttatatgatgacatataaaagctggggagaggagatgtctctgaagacagtgagaaatccttctctagtcttgctgctggaaccctcaaacacttaagtcatctaataaacattctactgtcttcagaggaattttctcagtgaaagggatttgggacacccctgtgaggaagaaacataagttccatgccttccaaataaggggcaaacttttctttgtagtcatgtttccacctgttgaatccgttttatggaagttgtacagttatggcttgtctgtttatgagaagagatagagaatatgagaaacgataaaacctgaaataatccattgtgaggccacaggctgaagaacttacaaggaatttattctagactttatggctgaaaatatgtatgcatatatgtatatgagtgtatggagatacagttatggatagagatctatagatatatgtgtagatatatagatacataaagtttgctacagaaattcattttgtacacttttaaaagtgcactttactaaaagcatccaagaatgcatctcagaaaaagccttagatttcttttatgtggtcaactccaggaactactcactcttgagatagatgtgtgttttcagagcttatccatgccatgcacaatgatctaaccctttgatagctgcatcattcaaagtcagtttttctacatgcaacaaatttttaaaccttgatttttatttatttatttattttgagacaaagtctcgctcttgtcccccaggctggagtgcaatggcgtgatctcagctcactgcaacctccacctcccaggttcaagcgattctcctgcctcaacctcccgagtagctgggattacatgcacctgccaccaagccaggctaatttttgtatttttagtagagacggggtctcaccatgttggccaggctggtcttgaactcctgaccgcaggtgatccacccgccttggcctcccaaagtgctgggattacaggcttgagccaccgtgcccggcctaaaccttgatttttaaaaaaatactaccctgccctaaccttgtaacttaggaagtttggggagaggggtgtgtaacaacctttcactgcttatttgatgtaaatcatttctagtcctgaaacaatggctattttgcaaggtttaattatactgtgtgttgtggttgcatgcataggtacacccacaaatgtctgtcattaatacgtatcactagctttgtactttacactgtatttttggagtgttttacagtcgttcgttaccaagagtaaattatatatttgcttttctttaccccacccctttcactattgtttaaaacatgtcagattcaggaaaacctcaagagacccaaacctctttcaatacttatagacaaagtttttttttccttaaatcagttttaaaatccatccagccattttggctgccggccataccagcagataatgaaagaattttccttgagggtcaaaagccagggagaagccttccagggctgtttggtttcctagcacagctgctggagtagctcgtggtgctgattgatctgcttggagattcttgtgcatcttcacctgttagagctggaaagatgctcaggactatacagcccagcccttctggtttacatataatgaaactaaggcccaccttagtcaactaatgtgcttaaactcaagcaaatggcaaatggcaaaactcaggactctgtcaatgagttttcattctttttctttattcttctagacacatattttataaagaaatgaggcagcatgatgtttaaaatacttaaagtgagaatgagaaaaactgatgtctacatatcatgaaatggttaaaaagtttaacgtgcattgtcttctccattagaacttcttttacgaatttttttctcaaaatctggctcagaaatcttgttttaaaagctccctaaacattcctaggcagaattagtaacgccttcctctttgctaacaaggaactgtgcatattcctgtaatagaatacttaccatattatattgtaagtattaaattattcatctgccctcctcccacctacccactggatcaggcttcccaggaacagcaacagagagcccagcaatttgtgtgttctcagtgtggaatgaatgaatgaatgaatgaatgaatgaaccaaccattccttcacagtcttgcactatcagtgaatcttatgctttattgaacataaaaatcacctggaattgctgacttaaaatacagttttccaggctataccacaagagatgctaatacaggactggggtaggtccaggaattcgaatttttatctaagtagctgatgacttaatgcaaatgatccagcagccacactttgcaagctctacgctatgattagttgtggtttgtagtcccaattgtatatcataattatctgctgatctgaaaaaaacatagagcttctctacccactccttaccaccagtccatcaccaccattctgactccttagtcacaatgggtattgacattttaaataaatcccaaggctcccttccgggagaataaagaggataatatttataaactattttgagttccttagaagaagggtatcttagctcattaaggaaatattatcatgatataaatctaacatcatgaaacttatcttggacatgtcaaatttggtctaagaatcaaatgtagaggaaaataaaacccacacacagtacctgcatggaaacggaacctgtgcaaacacctgctttggctatgttcctttttgtggagacagatgtcccccttcactaggaccagggtagagatgaagaaggttgatttggacattggggtgctatatgttcttttgggactgaagttccatattaggaaacttaatagctgacatttacataacttttaaacatcccaagtagtacgctctgtctgcacactattttatatgtatgcaatttgtttgtttttgtttttgttttgagacagggtctcactttgtcacccaagctggagtgcagcaggcatgaacacagttcactgtagcctcaacctcccaggctcaagcaatcctcccacctcagccccctgagtagctgggactacaggcacacaccaccatacctggctaatttttgtattttttgtagagactgggtttcaccatgttgcccaggctggtctcaaactcccgagctcaagtgatccacctgctttggcctcccaaagtgctgggattacaggcatgagccactgtgcccagccatatggatttttttaaaattatgaacttacataacttcacaggagacagacctgaatgaggtagttattaaactactttctgactatggaaaggatttctgatccttgtagtatatttccacgtatattgttatactgttgtgtgtttgtatttagttgctcatactattttttactgtagcttactttatatgcaggtttccatgggtcaacctaatttatatttttgtcattttaaatggaaaaatgatatcccatatattttgtagtattatttgttcagtgttctttccaatgtgggatgctttggttatttctaattatttgctatcatgctatcatatacagaattcttatgttcatttctgctcaaaattatatttttgtttgtatgaattccacggtgtatatttcccaaagcgagatagttagataaaagagtaacagcagtttcatagttctggttgcatattacagtattactttccagacacacagagccaatatacaaccccaccaggggtgtgaggcatgctggttttcccacagcttgaccaacatgaaattttatcattccagcctatttctgctagcttaatatgtgtgtagggcctcactagagatattttattttgaagttcttcaaatgatatgaagcaattcttttccacgtggaatgattcactattttcattttaaggacaaaccattcgtttgtatttgacagttttgaagtgacaggtttaattgccttctgtataattgattctgtagggagagaaaataggagtgctattaggtattgggttaggctcaaagagtcaagaaagaagattagttgtgtagttctgaatttggaaacttgtatgtggacgactggaacagaaataccagttgaccctgtttaagaagggctagagagcaggaacattctgatttcatgatgacaaaaatactagagttttgacataggacaacagatcttgcttcaaaatgaaagcaagaccctatccttcctgcctctttgatcctctcacagtgccactttctttcctgaacattttcagatattcttatttcagatagaccactctggtgtataataggaccagttttagagtggccatgaagctaagacatgttatttgagagctcttaggggaagacctggacacagcagtcgcaggagaagtcagtcttatctgtaaaaaggtcagcttgatcacagaaaaaggctttggcttggttgtgttggccctccatggcttatgatcctctttcaagtaagcaaataaatgattgcagtgttggtttgagtcctgtggtgccaaacacaagacacattgttgctcatgcaatatagacctttgttttggacagtggtctaatctgctggtttttaaaacattggtgactgtccaacttataattaaaatcagtctatcaagcacttggagacaaaatctgaggttattctttcattcctagttgtcacactaattttttgccttcacttttgtctctgtagaatatttacacgtacacctatctatatctatttagatataatttatatactacaaaattcacccatgtgtacagttcagtgatttttaatgtattcacagtcatcactacaatcaatttcagaacattttcattactccaaacagaaaccccaaactcattagcagccactctccatttctctacaatatccccaaccttaggtgaccacaaatctactttctgtctgtatagattttgcaattctgggcatttcatataaagaatcatagaacatgtggtcttttggtttagcttatttcacttaggataatgtttccaaggttcatttatgttgtggtgtatataggtactcttttcctttttattgctgagtaattttccattgtgtggatatacaactttttgttaagtcattcatcagttgatggacgtttggattttttccattttttggcctttatgaataaggctgctacgaacattcatgtgtaagtttttgtggggaagtgtggttgtctttttttttttttttttttttgcaacagagtcttgctccgtcacccaggctggagtgcagtggagcaatctcagctcactgtgacctccgcctctcgggttcaagcaattgtcatgcctcagcctcccaagtagctgggattacaggcacacgccaccacacctggctaatttttttgtatttttagtagagatggggtttcaccatgttggccaggctggtcatgaactcctgacctcaagtgatctgcccacttcagccccccaaaatgctgggattacaggtgtgagccaccacacactgccagaagtatgttttcatttctcctgggtaaatacctttgagtggaattgctgggatacatgggagctctgcttaaatttttcaggaactgccagatggctttccaaaatggctgcaccattttatactcctaccaacagcatatgcgtgctccagtttctccacatccttgcaaacacttgttattgcccctctttcttgttatagccagcctagtggttgtgaaatggcaactcattgtgatttgatctgcatttcccatttccctcacggctagtagaatacttacttcctatcctagtttttccttatacttttaaaaaattaaataaagaaaacgctgtagaaaattaaggagcaaaatgtatgcttgcagctacagcttcctctggggtttcacacttccttgcctcatcatgtaacgggccaccactaggatgaaggtgctccagtcttattcttccaatcttctctccatttgtcattcagaatcctgggaaagagagacacttgtcctgccgtgagttatgtgcccactcttttgatttgtgtttctgcctagacagtgcacagcatgagtgttggcatcttgaaaggaaactggggtgctcctgagggagaatagatgccaaagttgggacaagagcccagtttcctgcctttctaggtgtaactcattgccaaggtcgggagcaaagcaaaccatgtaggaaacctcatcatgctgggtagttaataagtatgccctagcacacgttttcacagagaaaacataatacgcttcatttgtaatatttaagtattacatctaaagttacaatgtttaaaaatttatatatacccttgttggatacaaagcatgtttaaaatatgtgacctcatttgatcctcagtaatctctgttagtttctaattatattcagtagtggtattggtattgtatgttttggcctcattgtggtttaaatacacttttgtgaactagcctgagaatccaaccaccaacacaatgatgtaatgagaaaacgtgctctgagttccaaacaaatggctaacagataagtgctcagaagtcaacctttttgtaagctggggtatcactggccagcagtcacatgccagcaggtgtgagtagacagtggggaacaatttcctctcatgtgtatggctccctaaagtgttggctgagcattgtccacatgggtgatgcaaaggatcactgaactaggagcagttgggaaaaaatacaatcattgggaattcctgtagcatcgaaggtgcctacagggaggtagaagtattcatacaacagttctctggtgttctctgttgtagcaaccagtcagccaaaagggttcagctgcttgaaatgagaatggctggatcaaaatggcagctcaggatttaaaggattctagtcagataccagacatcctcacatagagaaaactctgaatggctgggggagaaggagtcaaatgccctggatctttttcttgggcctcaaagtcctccttctgtcatcatccttccagtattgggcaggacctgactgcaggcatcatggcctctgtgaacttctcaagggtatgtattatctgacaaaaactacgatgtccactaacaggccactgaaaaggtatcttagtcagttctgctcattgcccagccaaggcctacgttttataacatgatatcaaagattgcatctaaaattgtgatgatttcctaaaataatcatttcatttagatttttctattttaatccaag

SEQ ID NO: 456 - DNA, 56210 bp, Homo sapiens
gcaagtctgagcgcggggggaagaagtgaagtggctgaaattagagttgcgtttgaggcaggctgcaagccttctgtcgtcctgagcaaggctccgtcctcgcctgcttcattattccagaaagagcttggctcctggtggcatcgctatttttataccctggtccaaaggagccatgaagtggaaaaagtgattttttaaaaaatctacacttaaataaaccaaaagaaatggcctgtggctgacattttgagatttacagaactccagcaaaaagctaaggactgggggatcccaactcaccatccaattcctaatcaaagttgcacaaactaaatatgtaagcacatttactgctcaaagttctcagtaaaggtgctttaactgcagtttttcctccactaaaaactgctgacaagtaattgggacatttttgtcttgccctgagaaagctagactgtctagttaaaagataataggaaactcattctaaagtgtcaacttattctattgcccacagggctgtccgatttgttaatcttcacttagctgagcctgtgaaaggtggattccaccgtaggttcatctttgtgctgttagtgtgtgaagaggtttgaacaaggaattaaaagcctagaaaaacaaggcgataaggtcttctagagggcatatcgagctttattgacgattttatttccacttgatacgtgactgccagcaaactgtttctcttaccttactatttcgtcatctgtaaaatgagtttaattatttatgtatattgcatattaatgttggaggccaaaaggtactagtcaaaaggcataaagaggctgggtgccatggctcacacctctaatcccagcaatttgggaggcccagatgggaggattacttgagcccagagtttgagaccagcctgggcaacatagtgggacccctgtggctacaaaaaaataattttaaaacattagccaggtgtggttgcatgcacctgtagccccagctattcaagaggctgagacaagagcatcgcttgagcccaggaggatcacagctgtgatcatgccactgcattccagcctgggtgagagagtgaaaccttgtctcaaaaaacagacaaaaaaaaaaaaaaaaaagcaaaaacaaggcatgaagtatatcagggatctccctatgggaatttttttctacattaaggttcatagctgttgcatgccaggaggggtaattcattcaaggagtatagggaatcaaactgaagttactgatgggtgtattatttgctatagctcctgatcctctgtctttgtgaattttagatcaggaagtgtgactggggcagaaagatgttagaaactatggggttgggcagggttgatctggggtgagtggccgagacccggactaatcctacaggcagtcttgcaagcaactgcggggtcggtgtcacctgggggttaagaataaaggccctggttagtgtctgatctgcttgcaaattggctctctgctacaaagtcactgtgcaacattggacatgttacttaacttctctaagctttggtttctttatgtgccaagtagagttgatcatagtacctacttcttatgactgtggggaggattaaatgaataataggtacaaagtccgaattgccaagtgctggatgtgtaacatacacattggaatttagagacagtacagaaaaaataatgcaaaatgtcttgttaatgattttcatgttgattgcatgttgcttgtagtgtctggctcagaataaatggtgaataattcttagttgccatcattaacattacaatcagcttcactgctgtcattatctccatcatcaccatctttgagagcctaagatagaaaggtaggaaggaaagctgaagttggagagcttcaggcagagatcagtttgggttaggtatggagatgccagtggctggctgggagctttcttggggccagtgtttctccgcctgtgccttccatctggtgctgagaacccaaaacacattcaatggaagaaaatatgtgatgaaatctgatcaagaagagccccctcaagtttaataaagtataaaaggttctataatcctcaggcaagaaaatggattggaaattcgtattcttagagttctgttttcctttttgaagcactctgtgtgttgtgtgggagagttatgctaaggagcttggcagaaattattattcaaaggagcagattaataaggacatacctagtattcatatatcatttaatttcaccatttattgtttacttattgtgtcccagacactatattatacagttaatggattttatgattaaattctcacaaaaagcctatcaaactcatgaagtcttgtacagaagaggaaaaggaatcttggagatacagctgcacaaggccatgtaattttttcaagaccatacaaccagcaatggcagagctgggattgcaaactgctccaaagactgtgctcttaattgggccgattgttattttgatgcatatgtatcccaagaatttcctttaaagcaagaggggaattaatttttaaaaaatcatcattttggtagcagcattggcaaagtgttctgtttctgattagtgtttaatatataaacattaacaatgtgatgttttgcaatgttgaaggtggaaaagaaatgttttcccttacgtgcctacctattattttttttaaataggtcaaattccaaaagtaagactgtgttgaaatatggccattagtacattcagcatgtgctcatgtttttcaccttactactcagaatagtgtaaactatctcttaaaaatatttgtgggataaaaccagtgtgcttcctgttaatgaagtattcaaatctgatatattaaaaatattatttgtaaagcgttcagttctgaccacaccagtctccagaaggagtgagcagactatctcacagtctgagaagaaaggtgaaattaattttcttgtaagtgctatatacttgtcttcatttccatttttttgttgctgacttgcgtgccaaggaaagactagatctaagttaggcagttcgtaataacatttgcgtttgggatttcaggtgctgctgcattaaatgtcataacatggtacttgtgggaacatctagtcttgttaattgccttttttcttactggaatttagtgcctttgtagattataaaaattattactagtactctgaaaatttattaaacaaaatcttagtgtctttcaaatacagaatagatgtaaaatttgatcaaatattaaagtaaaataagaaccttggataaagaggacgaaagtgtagaatgcagaaaaaaacattaaccctcttgtggacagtcaggattgaaaggaagaaaaaataatggcttacacttctagaatgctttctatgtggcagagacagttctaaatatttacatatcgtaactcattcacctctatgagataggagcaatgactatctccgttttacagatggagaaactgagtgcagagaagatatagaaattgtccaaactcacaaacaactaattaaggtcacagctgagattcaaatgcaggcagcctggctccagagtcttctcttttaatcattataccatgctgccatctcagttttattttaaaataataataggtaacatttattaattatttactatgtgctacatattgtgctaagaactttatataccttcatttcgtcctttcagaaaaggaacaaacagagctgggtgcactggctcacgcctgtaatctcagcattttgggaggccaaggcgggacgatcacctgaggtcaggagttcaagaccggcctggccaacatggcgaaaccccgtctctactaaaaaatacaaaaattagccaggtgtagtggtgtgcacctgtaatcccagctacttaggaggctgaggtgggataattgcttgaacctgggaggtggaggctacagtgagctgagatgtgccactgcattccagcctgggcgacagagtgacactctgtttcaaaataaaataaaataaaaaataaaaaaggaacaaagtattaggcataataatcatcaccagagagtgattttatgaaagacaaaaacaaggtggcaagaagagagaataaagttacataaagatagcatttaagaacaaccacaggctgggcatggtggctcacacctgtaaccctagcactttgggaggcctaagctggtagatggctcgagcccaggagttcgagaccagcctgggcaacatagcaaaaccctgtctctacaaaaaatacaaaaattagccagctgtggtggcttgcacctgtagtcccagctacttggaaggctgagatgggaggatcactcgaacccaggaagttgaagctgctgtgagcagtgattgcgccactgcactgcagcctgagtgacagagcgagactctatttcaaaaaaaaaggaacaaacccaataattttgggcataacgaccagagcacaatgagctacagagagctttctgagaagtatttgctaattttatctgcaaagataatacaagcataaaaatatatgtattcaaatgtatagatgtgtatctgcagtgagagcagagctgttcctcagtagtgggggtggctggcagagtgaggtagtgtgctttcaggaattgctttatttgtctgatgtgttctagaccaaagaccaacagaggggcttgggcaatcagacacagaatttttggcctttcacatttagaatcggttccttccagattcttggaaaaggtccatttgtgctttaggcatctagtgctattctgaagatgccttacaaaatgtatgctgaaataaccttctaccagggtgaattttcttcatttggagttctttgagttctgaccatttatgtatattgatgaagctaatgtttacttcttcatagaccagtggaaagaaaacgtagtaacatgtagttgcccagggaaagatgaagaactcaggggaccaagtctcccatctcaactccccataaaggtagtgatggaatgggatgatgttaaaaacacctcaactttccgtcctctttaagggaccgtgagaaggtagggatgttaccatactcagacttcttgctgagaaagctaagaaacaaaagcatttagtttttttcagtggcaggtgcttattaacgtttggcctatttgataaagggttaaagcaacaggaatgtgctactgctgttcccacaagcagtagtctaatttctttctttttttttttttttctttttttgagacagtcatgctctgtcgcccaggctggagtacagtggggccatctcggctcactgcaacctctgcctcccggattcaagcgattctcctgcctcagcctcctgagtagctgagattacaggtgcgcaccaccacgcccggctaatttttgtatttttagtagagatggggtttcaccgtgttgttcaggctggtctagtcttacccagtcagcagcagaaaggctctctgggctctaggtaaacacatgaaatttatatagtgtgtttaagtgtggttcctgtgcttctggagttggcacagtagtggtaccatttgctgtatcgacaacagtgggggtatagacgaaaaacagattgacacctctgaaagtatatatgaacacatgtcgatgcagcatttctggtgaaactaagcaaattgataaagttggcctagggtacaagacattatgtcatgtcccactgcattatgattaaacccaagattagaaaggagaaatgatggcaacagaaccagtttctccagctgtctattctcatgttcatcatcacagataggaaagggcagccggccctctgcatctgtgggcacatccctggattcagccaaccacagatcaaaaatatttggaaaaaaatgtagatagttgcatctgtactgaacatgtacagacttttttcttgtcattattccatacaaaatatagtataataactatttacatagcatttacattgtgttaagtattataaataatctagagatgatttaaagtatacaggagggctggccaccgtggctcatgcctgtaatcccagcacttttggaggccaaggtgagtggatcacttgaagtcagaagtttgagaccagcctggccaacatggtgaaaccccatctctactaaaagtacaaaaaaaaaaaaaaattagccaggtgtggtggcaggtgcctgtagtcccagctactcaggaggttgaggcaggagaatcgcttgaacctgggaggcggaagttgcagtgagccgagatcgcaccactgcactccagcctgggtgacagagtgagactctgtctcattaaaaaaaaaaaaatcatgaacaactctgcatgtaaatcaatacagagctgcattataatttacataggctgtataaaatcctgttgattagatgtaaaatgatttattaaattaattttctattattgggcatgaagataggttccaggctgggcacagtggctcatgcctggaacctgcctcccggtgctttgggaggcagacacaggagaatcagttgagcccaggagttcaagaccagcctgagcaacatagtgagacaccagctctacaaaaagcaaacaaaacattaggcagacagggtggtgcatgcctgtggtcccagctacatagaaggctgaggtgggagggtcacttgagaccaggagtttgaggctgcagtgagctatgattgcgccactactctccagcctgggccacagagtgaaaccctgtctcaaaaaaaaaacacaaaaaaccaaaagagataggttctgacttttcacaatagtgtatagagtttgatggagcagtcttatacatacttttttctgcgctagtgcaaacacctccttacaaatttctaacagtataattggtcataggaaagaaacatttttcaagcttttgattgccaaattgacgcccagaaaaggtatacctgtttctgctcctaccagtggccctacgaatgctcctttccccacattcacacccccaccgagttttatcattcttttaaatctttatttgccagtgttgacctcttctcttaaatgcctgtaacctcttcctgtttagcttctctcctaggtcagagagtgaactctgaagtcattctttagggattaaaatagtcatgcatttctccttttttctttgccttacatgcaaccataaatggtgagaacttctatcctttttcactttctgcttctgttcctttaataggtggattaatgataaaggtagattgttcaaacaacttagttatttcttaattttgttgtaagctctagttgccagactttaaactgtgctttttactttgcttaacaatgtaatccaatctacctcctcctttgggtgcctaagccatagcccttttaaataaaatagcaaatggaaaatcagaatccctttctatcgcaaaataagagtccagattacataactcattgtatgtgttttcacttggatgagagaatagagagtatggacctctttcatactttttttttaatgttccttttcctctagaattggtttctggggctaaaaggaaacagtagttagtaccactctgctcagaaacctcaaaaaacttcgacttctgtcattctcatcaaagggcaaaattcattgttcttctgtgatagagaccaaaaatacaaatagctaaactggaactaaattaagaaaaacagaagttaataaactccaccgcctcactcccatctcttcgtaagttagtaggcttgtaagtcctaggctggttagttcattcatttgttcactcatgccagccattgaggattattgtgttctaagtgctgtgctaagccccagaaatacaaagacaagtgagtcatgggcctgcctgcaaggagtgaggagatttactcaaaattgagagctggaaaaagaaaggcactttccctggcctcatagccctccgtgacttcaaagtattcctctctggggtcatgccactagggataatagcattatccaaaaacatttttggaaatccttttagaattattctcagggactggagtacatttatttttaaaaagaaacttggtgttttaaaatctttttttttttttagggagaatctgctttattatttgagaagtttcaaaaaatatagaaaatacagatgataatatggcaagtatctaaaggtctccacttaacagaattaacatctgttaacattttgtcacttttgctttagttgttttttttttaattaaaaaagagaacattacagataaatgtgaagtccctgttattctgttgcccatttctgttctccctgctgctccctgagagtactaacacaaaggtgtacttctggggtgtgtgtgtatatgcatatccataaacaatatatggtatagcttctggagggatccaaagtcattagcactcaagcaagcctattaaataaaataatatcagcttgagttaaagataacatatagccgtgaaataacggagctgatttttaggtaccttgtcaaatagttctgaaagtaattgcaaagaggagttccaaaagtgagttcagaaagacagctttatcagaataaattgcatggtactgcatacaggaaactataaagaacaacggttatttagaactgttcattctgacagtgtttttcaattactccttaatattataaccacttactcatttcctgaaatcaccaggaaatttttcaaaaagatttttctcccccgatgaatatacccacgatttgcatttgacccaagataagcagttgagtcgataacatgttaatttttaaatacatggttttaaaacacagaataaaaattctacctcattgcttggagactcaattaaggagagtatgcacattagcaaaaagaagatgtgatatttgctcagaagtcttgaagtggatattttggccttcgtatggctgaatggtcaagcttgactctctcgtttgctcagggaggcccagtccctctgctgccacgggtagaaatactttttcctaaatcgctgcttcttctcactgccatacagagcaatattcaggacacagccaaaaccttctttggcagacctttttgagttctctctactcagctttctgctgtgtaatatgagcactctagagaagttgggctgtcctcaggaaattacacttggggtctgtggttccccaggaagacaaactggagctccctaaggggtactagtcatcatacggcatttatactagcattgcagtccactttcacctatgcaagtagaaaaactcaggctcaaagtccactgacaatgcaggagtcccttatctgctggttaacataaatgttgttttaagatgatggccatctgttgtctgtgagaacaagactatcacccacctgttgacatgctggctggtttaatatcttactctttcattccaaataactacctggtctcacagatccccttagatggggtatccaatttacctcctgtaccttattctctgtccaataatttcactcaaatcaacaagatattttattgcctatgacttcctctaggtattacgggagattcaaaacacaaacagacaagcagcctatgccctcagaatccagctggggtgagtgggtgactataaatgcaaaagttagagagcatggggaacagtgtttgattgtgtggctggggaggggtaaggacaaaaactcagagagagagaagcctgtagccctggctacagaagggcaacacctctgaggagatgagtctcagctgggccctgaagggaggtgactcacagatgaaacaaacctggtgggaagaatagttagcagtgtgcagaaggcattggaagggattccaggggaggagtgaggagggagccacagtcattccgatgtgaggtagtgagatctgggattagactgggtcatcagaatggaaaaaaagggcctgcttctgcagacagtttaaaggaatcagctggatgtgggaagcaactacatacttattcattcattcatttcatgcatattgcttatagcctactatgtgcctagcactattctaagtgctgaggatagagtcatgaataagatagacagggttcttattctaaaaaaagtaatataccagtggggagacaatgaagaaataaaccactaaataaacaaggaaacatcagataaaataagtgtgatacagagaatgtaaacgggccattgagagggcatggattctttagatgggatggtcaaggaaagcatctcttagagaaaaacctctgagccaagatcaagcaggggaatgacgaagcacatgactgaggcaggagtaaatttgatgtgttggaagaaaagcaagaactggtctgtctctagtggagtgaatgaggggagaggaggagagctgaagagggaagttagcaaagaacgaatcacataaaagccttaaaggcaatggaaaaaatttaaatgttattcaaagtgcaatggtgtattagtccattttcatactgctatgaagaaatacccaagactggataatttataaagaaaaaaaggtttaatggacttacagttccacatggctggggaggcctcacaatcatggcagaaggtgaatgaggagcaaaggcatatcttaaacggcggcaggcaagagagcgtgtgcaggggaattgccctttataaaaccatcagatctcgtgagacttattcactatcatgagaatagcatgaggaaaaacctgcctccatgattcaattatctcgcacaacatgtggggattatgggagctacaattcaagatgagatttgggtggagacaaagccaaaccatatcaaatgggatggtttatggagcagggcatgatgcgattgacttttgtgtttaaaagatctattgtacaaagaagcaaggaaaccagctgggaggcagtggagaatccaggggaaagatgacgatggcaaaactagagagcagagctgagaaggagagaaccaggcagctctgggataacattctggagctagggctgacgaattagatatggggtggggcaatgaaaaacaaaaaaaaagagaaatcaagatgtctccagggttggatattgatgcttttaacagagattgaaaagactggaggagaagcaggcttttagggtgaatcaagggtttaactggggacatatggagtctaagatgcatgttagacattcaagtagaattagctactatgcagttttatttaggaatctgaaactcaggggagaagtcaagactggatatttaagtttgcaagtcaataccaaacatatttttacataagaaggaaaaaatattgatatgattttgataagtttttaatagccagaaagctatatgcgtaatatggtatcattttaattaaaaaataaatatatgcataactctctgcagagataaatgatcaatacatataacaaggagagaaccagaaggacatacgccaatatgtcatgagtgttatctctgggtagtagaattattgatgacttttgtgtacttgggacatgcatgtatgagtgtatgtatgcatgcatattttgcaagttttcctcaaaggatgcttttgtaattggaagaagaagcaattataaaataaatggcacaagatttccatcctggtcaaatgggataaggatgatgccaatgagaaattatgaaaattggaaattagacttagttttggggggatgattttttacttccctcgtagaggttttgtttaagacgatgtagtagactgtacctttacatatatttgctgtccctcccgatgggaggattttacttttcacctgttgaaggtgatgtggtcacttggaggtgaagagatagcctggactttgtcacattatctttctcctattctaaacaatctgcagcgttccaggtggtggatgatctgtcatcctgcatcctggagtaaagatgattaaagcagagctgcagctgccctctgaaggcctttgtttttgtaaaccactgagatttttgaattgtttgttatctcaccataacctagcccaccctaacacagatgaacataaaatacagaacatttctattgggcggcttgaaatacaggcttggggcatcagtggtaggtcagcatggaaaatgttgattaaaaagtcatctgtgaggtggagattgggactgaagaatggataaattttctgaatggaaagtataaggggaagagaagaggaatgggcctagaggaagagtcactgtcaatccatacaaaaagaagagatacgaaaagataggaggggggatttggccaacacatggcagaccgttgtagtatcagaaaagagagctaggagggtagttacaaagatcacatgccaaattatgagggcaaagagccattggatttaccctgaaggtggtcattgaaaacctctgaattagcagttttagcggagctgtggggaaggaagtcaggtttcataaggttatagagggagtccatgcagaggaaatagaggaagctggtggaggccactcctttaaaaagcctggatgaggccgaagagaaatgggacaagtggtaaccagaaggcccctacaaggctgtgacttttacacaaatatgacatacaatgctgaacaaaggatgtgctgatcttacagaggaaggatgtgttttattcccaaaaaaaactttacatatgggtaaagttattcaagagaccctgtgctgtctaatatgcaacaaatttttctttgcaccagcattaagacttctaacaataagtaaaatattctatttagatactttttacaggagattttgaaactctgatgacactgacatactacctttcagaacatggtactgtttaaaattttattatttttatatttatcttcatatgtttaaatttgaaaaattacaggaaagagtacttttataattatgtttttctgtttacaaaccacctcctgtgtgctgaattttgcctccccaacatttttcaggggagcatggccctactcgcactttgagttcagatttctggccttcagaactctgagaaaataaatttcttttgttttacgctatccagtttgtggtagtttgttacagtagtcctgggaaactaacaaaccaccccaaagtttagtgacttaaaacagccattattatttctcacaattctgtgggttggcaatttgggctgggctcagctggacagttattctgctggtcttcctgtagacattcacatggctgccattatcgggtggctcaagtgaagctgtagggtctaagatgggctcactcacaagtccaggaccttggtgctgactgttggctgagctttccctcttcacacggtctcttgttgttcagaaacctagctggtcttttttgcattcttagctggtaaagggaacattctaagagaaggaaggtggaagctgcaaggcttcttgaggcttaagtctagaactctccaacgtcacttccaccacattcattggttaatgcaagtcataaggcaactcagcttcaaagagtaggagaatagaatcaacctattgaaaggaggggctgcaaaatagttggtcattttaaccaaccacagcacccaaccaaaaaaattaatactatcccgtttcagatttcagaatgtttaatcagaaggccttgtctttccctacgtatatcacaatacccattttagtggcagagaaactgagaccaaataaaactgactcctttaaagttaccaagtgagtcatgctttgtgagagacatgaagacaactatatgtctggaagagctaaacatagtcctgcctggaggcaggtatatgaacttaataatcccttgagatgctcttaaatcccataattacactgatggactccagattgcagagctgtctggtccagagataaagcagcggtttgagagtatcagagagagaaggtgcctgaaaattgccacatgtccccaaaggcaggatttgaggctaaattaaatgataaagagttaccaagctctttattctcaagagttaccaaataagcttagaaactcaatgactgctgctgtctagtgttagttctggaatgggagaattaaaaatgagtagaaaaagaaaatagagacagagagactaacatatctgaaagataggtgctgtgggcagtcttagaaggatcacccctatatcaattaggattgcttttagctgctgcaagtaacagccaaccaaaccatccaatggtttaaacaaattaggggtttatttttttcttttcatttatttatttatttttaaatttaattttattattattattatactttaagttttagggtacatgtgcacaacatgcaggtttgttacatatgtgtacatgtgccatgttggtgtgctgcacccattaactcatcatttagcattaggtatatctcctaatgctatccctcacccctccccccaccccacaacagtccccggtgtgtgatattccccttcctgtgtccatgtgttctcattgttcaattcccacctatgagtgagaacatgcggtgtttggttttttgtccttgcgatagtttgctgagaatgatggtttccagtttcatccatgtccctacaaaggacacaaactcatcatctttatggctgcatagtattccacggtgtatatgtgccacattttcttaatccagtctatcgttgggcatttgggttggttccaagtctttgctattgtgaatagtgctgctataaacatacgtgtgcatgtgtctttatagcagcatgatttatagtcctttgggaatatacccagtaataggatggctgggtcaaatggtatttctagttctagatccctgaggaatcgccacactgacttccacaatggttgaattagtttacagtcccaccaacagtgtaaaagtgttcctatttctccacatcctctccggcacctgttgtttcctgactttttaatgatcgccattctaactggtgtgagatggtatctcattgtggttttgatttgcatttctctgatggccagtgatggtgagcattttttcatgtgttttttggctgcataaatgtcttcttttgagaagtgtttgttcatatccttcgcccactttttgatggggttgtttgtttttttcttgtaaatgtgtttgagttcattgtagattctggatattcgccctttgtcagatgagtaggttgcaaaaattttctcccattctgtaggttgcctgttcactctgatggtagtttcttttgctgtgcagaagctctttagttgaattagatcccatttgtcaattgtggcttttgttgccattgcttttggtgttttagacatgaagtccttgcccatgcctatgtcctgaatggtattgcctaggttttcttctagggtttttatggttttaggtctaacatttaagtctttaatccatcttgaattactttttgtataaggtgtaaggaagggatccagtttcagctttctacatatggctagccagttttcccagcaccatttattaaatagggaatcctttccccattgcttgtttttgtcaggtttgtcaaggatcagatagttgtagatatgtggcattatttctgagggctctgttctgttccattggtctgtatctctgttttggtaccagtaccatgctgttttggttactgtagccttgtagtatagtttgaagtcaggtagtgtgatgcctccagctttgttcttttggcttaggattgacttggtgatgcaggctcttttttggttccatatgaactttaaagtagttttttccaattctgtgaagaacgtcattggtagcttgatgcggatggcttgaatctctaaattaccttgggcagtatggccattttcacgatattgattcttcctacccatgagcatggaatgttcttccatttgtttgtatcctcttttatttcattgagcagtggtttgtagttcttgaagaggtccttcacatcccttataagttggattcctaggtattttattctctttgaagcaattgtgaatgggagttcactcatgatttggctctctgtttgtctgttattggtgtataagaatgcttattatttttatacattgattttgtatcctgagactttgctgaagttccttatcatcttgaggagattttgggctgagacaatggggttttcaagatataaatcatgtcatctgcaaacagggacaatttgacttcctcttttcctaattgaataccctttatttccttctcctgcctgattgccctggccagaacttccaacattatgttgaataggaggtgagagaggacatccctgtcttgtgcccgttttcaaagggaatgcttccagtttttgcccattcaatatgatattggctgtgggtttgtcatagatagctcttattattttgagatatgtcccatcaatacctaatttattgagagtttttagcatgaagcgttgttggattttgtcaaaggccttttctgcatctattgagataatcatgtggtttttgcctttggttctgtttatatgctggattacatttattgatttgtgtatgttgaaccagccttgcatcccagggatgaagcccacttgatcatggtggataagctttttgatgtgctgctggattcggtttgccagtattttattgagtatttttacatcaatgttcatcaaggatattggtctaaaattctcttttttggttgtgtctctgccaggctttggtatcaggatgatgctggcctcatcaaatgagttagggagtattccctctttttctattgattggaataatttcagaaggaatggtaccagctcctctttgtacctctggtagaatttggctgtgaatccatctggtcctggactctttttggttggtaagctattgattattgcctcaatttcagatcctgttatttgtctattcagagattcaacttcttcctggtttagtcttgggagggtgtatgtgtcgaggaatttatccatttcttctagattttctagtttatttgcaaagaggtgtttatagtattctctgatggtagtttgtatttctgtgggatcggtggtgatatcccctttatcattttttactgcgtctgtttgattcttctctcttttcttctttgttagtcttgctagcggtctatcaattttgttgatcttttcaaaaaaccagctcctggattcattaattttttgaagggttttttgtgtttctgtttccttcagttctgctctgatcttagttatttcttgccttctgctagcttttgaatgtgtttgctcttgcttctctagttcttttagttgtgatgttagggtgtcaattttggatctttcctgctttctcttgtgggcatttagtgctataaatttccctctacacactgctttgaatgtgtcccagagattctggtatgttgtgtctttgttcttgctggtttcaaagaacatctttatttctgccttcatttcattatttacccagtagtcattcaggagcaggttgttcagtttccatgtagttgagcggttttgagtgagtttcttaatcctgagttctagtttgattgcactgtggtctgagagacagtttgttataatttctgttcttttacatttgctgaggagtgctttactgccaactatgtggtcaattttggaataggtgtggtgtggtgctgaaaagaatgtatattctgttgatttggggtggagagttctgtagatgtctgttaggtctgcttggtgcagagctgaggtcaattcctcggtatccttgttgactttctgtctcactgatctgtctaatgttgacagtggggtgttaaagtctcccattattattgtgtgggagtctaagtctctttgtaggtcactaaggacttgctttatgaatctgggtgctcctgtattgggtgcatatatatttaggatagttagctcttcttgttgaattgatccctttaccattatgtaatggccttctttgtctcttttgatctttgttggttgaaagtctgtttcatcagagactaggattgcaacccctgcctttttttgttttccatttgcttggtagatcttcctccatccctttattttgagcctatgtgtgtctctgcacgtgagatgggtttcctgaatacagcacactgatgggtcttgactctttatccaatttgccagtctgtgtcttttaattggagcatttagcccatttacatttaatttaatattgttatgtgtgaatttgatcctgtcattatgatgttagctggttattttgctggttagttgatgcagtttcttcctagcttggatggtctttacaatttggcatgtttttgcagtggctggtactggttgttcctttccatgtttggtgcttccttcaggagctcttgtagggcaggcctggtggtgacaaaatctctcagcatttgcttgtctgtaaaggactttatttctccttcacttatgaagcttagtttggctggatatgaaattctgcattgaaaattctttcctttcagaatgttgaatattggcccccactctcttctggcttgtagagtttctgccaagagatcagctcttagtctgataggcttccctttgtgggtaacccgacctttctctctggctgcccttaacatttttcccttcatttcaactttggtgaatctgacaattatgtgtcttggaattgcttttctcaaggagtatctttgtggcgttctctgtattttctgaatttcagtgttggcctgccttgctagaatgggggacttctcctggataatatcctgcagagtgttttccaacttggttccattctccctgtcactttcaggtacaccaatcagacgtagatttggtcttttcacatagtcccatatttcttggaggctttgtttgttgctttttattcttttttctgtaaacttctcttctcacttcatttcattcatttcatcttccatcactgatacccttttttccagttggtcacatcggctactgaggcttctgcattcatcacgtagctcttttgccttggttttcagctccatcaggtccttttaggacttctttgcattggttattctagttatccattcgtctatttttttttcaaagcttttaacttctttgccattggtttgaatttcctcctgtagctcagagtagtttgatcgtctgaagccttcttctctcaactcatcaaagtcattctccatccagctttgttccattgctggtgaggagctgcgttcctttgcaggaggagaggcactctcatttttagagtttccagtttttctgctctgtttttttcccatctttgtgtttttatctacctttggtctttgatgatggtgacgtacagatgggtttttggtgtggatgtcctttctgtttgttagttttccttctaacagacaggaccctcagctgcaggtctgttggagtttgctagaggtccactccagacgctgtttgcctgggtatcagcagcggtggctacagagcagtggatattggtgaaccgcaaatgctgctgcctgattgttcctctggaagttttgtgtcagaggagtacctggctgtgtgaggtgtcagtctgcccctactggggggtgcctcccagttgggctactcgggggtcagggacccacttgaggaggcagtctgcccgttctcagatctgaagctgtgtgctgggagaaccactcctctcttcaaagctgtcagagagggacatttaagtctgcagaggtaactgctgtctttttgtttgtctgtgccctgcccccagaagtggagcctacagaggcaggcaggcctccttgagctgtggtgggctccacccagttcgagcttcccggccgctttgtttacctaatcaaacaactaactcggcaatggtgggcacccctccccaagcctcgctgccgccttgcagtttgatctcagactgctgtgccagcaatgagcgagagtccatgggcataggaccctctgagccatgtgtgggatataatctcctggtgtgccgttttttaagcccgttggaaaagcgcagtattagggtgggagtgacccgattttccgggtgccgtctgtcaccctttctttgactaggaaagggaattccctgaccccttgcacttcccgggtgaggtgatgccttgccctgcttcggctcacgcatgttgcgctgcacccactgtcctgtacctactgtctggcactccccagtgagatgaacccggtacctcagttggaaatgcagaaatcacccgtattctgtgtcgctcacgctgggagctgtagactggagctgttcctattcggccatcttggctcctccccttatttatttttttcttacataacaagaatgccagtggttggccctgcaggcttggtgtcatggcccccaaggtaccactggagactctggttctttgtgtctttgtgtcccaccaaccttagtgtgtggctttcatccttatggtcacaggatgactcctaaaactctgtacagtgaatcagtattggagacaggaagaagaaaggaggtaaaaaagacatgccagctaactttgctcccattaggaagctcttctagaagctcacagaattacatttgtttatgtatttcattattcagagctgcgttagctttgtctacaagggagattggcaaatgtagttttcattagcccagcacattgtcacccccaacaaaactagggttgagttagaatgaaggggctagtgcatattgataggccactagtagtttctacacagcctccaacaattgctgtggatgtagattagtaacagaacttccactatggcatcatagcacctctatcccactagtacctgtagtaggtccaaatcatctaattccaggagcctggcttaaagaagaggaatattgaggcttctaggtccagtattaatcaaggtaagctagctgtgagaacaaacaatctcaaaatctcagtgaacgaaaccaacaaaaacttgtttcatgtttatatcacagtctgatgcagatcgagtggttctcctccaagcagtgactcagggacccaggctgcttccatcttacagctctaccatcttgtgactttcagattatgttggcatcattcagccagtgactaggaagaagagagaatgaaagattgtgcacccaattcttaaatacctccactcaacactgggacacatagcttctactcacacttccctggggaggactgcttacaagattcatcaatctgcaaggagggctgggggaatatattatagttcttgcctggcggcacttccagcaggaacacttcactatgaaaagggagcacaagtctttggggggacagctagccttctgtgccacaaaagcccagtcacaaagaaaaagccattaccaaaatgttccataaacaatgtagacctactgtggtttgctgttgtctgatagataaaaactgtgttgttttagtcacaaggatttggatgtgggagctgcaaggaaagcaaaagccaaacaagtacagctgaagcacctgagatcctaggaggagacaagaagaatacaaggtgccattgtcctatcagccaggcagaaagatggtaggaaacaaggccatttaaaatctaattgcaattgcaagggctgggtgctgtggcttacgcctgtaatcccagcactttgggaggctgaggcaggtggatcacttcagctcaggagttcaagaccagcctgggcaaagtggtgaaacctagtctctacaaaaaatacaaaaattagccaggcatggtggcatgcgcctgtagtcccagttactcaggaggccaagatggaaggatcaattgagcctgggaggttgaggcttcagtgagctgtgattgtaccactgcactccagtctgggtgacagagcaagaccctgtctcagaaaaaataataataaaataaaatctaattgcaggcaaggccacaggaagtggcaagtgcaactaaagacttcctagaaatcccacacattgataagcagccgggttgttcagccagtttttttttctgagaacaaccaattttaaaatattttaggaaaaaccacaatattgagatatttttaaacagcttatatttaaacagcatatatttaaacaaagtgattaatttagaattcatattttatttgagaaaaaaacaagatgttcctggtctggcagatgacattctaaattattcactcccacttgtggaatagctgagttatagtccggcccctcctctgtagaggaggatttataggagaagatgagtcacgttactttttgtgactatttttctttgcatttgttgactcctcttgttttattcaccttctaatcattgaataatctgtacaatcagactgccttattcatgttggcagttgttttaataataacaatgcacagagccattgctactaacagaaagcagggcagacctttgagtctgagtttggggatacaagtttgattccatcccagctccactgattcccagcgagatgtggttcaacatcataggaccaaatgaaataaaaagcgtgaaaatgctacacaaatcaaagagtgctaaagacatattaatgaaacatctgtaaaatgggaataagtaccacgtttctgaggtagcatgtaatacaactggcacagggttccacacttggtagatactcaaaaaagaaaataaaaagttaacatggacaaagtaaaataaactggaaataggagatggagaaatgttaaaacaacaggcaccataataatgtaaagtaggatttcagctcatttacaagcacagaggttatatggtaagtcctcacttaatgttgtcagtaagttcttggaaacagtgtctttatgtaaaacaacataaaggaaaaccaattttgccataggctaatggatataaacaagagttaagttccagtacatatgtgatggcatatttccagttacaaaatatcaccaaacttctaaataaagaccaaaagactcctaatattaaacattgaaataaatgtgagctatactttcatataagaaaaattaatgcaaacaagtacaataattatttactgagttattccagttcggggtcgtggatggccagagtctatcccagccgtccagggccaagtttggaacccaccctggccaggacgccatcctatcacagcttgcactcacacacactctcactgggaccatttagacacaccgattcacctactctgtgcatgtttgggatgtcaaggaaaccggagtaccctgagaaagcccacatgggggaacatgcacactccacacagacggtggctccagccaggaattgatttattttctcatcaatgttataactaaatgactttgaatgaaacaatgttatttgataacctgctgtatttagagttcacaaaatttatccctctgaaacacatacacacacgcatggccgcacacacacgtgcatgcacacactgcacacacttaatgctaaacttgaaagagatttaaaggctaaaaggaaagttggactttaaatttcccctggagctcacattttctgggtactgaaagatatggtagatacatatgattgccttttccaaaaataacttctatggaaaatcctgagagttataagagactacaaaggtgatttgatagagccacttaagtaatgtatgcaatatgatcaccaggtatacttgtatgagagatgggaaagaaaggaaatattgaaagagcagaaccatgaaggagaagaagcaattgatcctgaagaatagcaactgtagtcagggattagagacctgcaaacaagtttcctattcttttcaaaaatgaagaatagcttcttattacaaaagctgtatatataaattatagaaaagtcagaagtgcaggtaagcaaatactttaaaaatcaaaattatctctaattctttgacttattaatcattttaacagcttgattgatattttttcagatacacacatacatacatacttctacaaaactggaagtatgcttatatattgtatcataacctgcttttttatttaaaaaatatcatgaacaacttttcatgtcattaaatattgttgcattacatttctaatgaatgcataacattccattgtaaggatacagcgtaatttaactcagtctgtattgagctacattgatttccagttattcacattagaaacagtacaccactgaataaatttatgcattcatctttgcttacctctttaatgattcttcacgataaatgctagaaatagaaccacagacttaaaggtctccattgatatgtgtggctcccttgttttcctttgcaaggttttgtgtggcatctgcctttaaaaggttaaagatatttttacttataacatccctgaactttacctcaagtcttggggaaagttattgaaaagtagtttgtattcaaataagtacaaactggcaaggtcaatcttttatacaggttatcagaaacaaatcaacctcataagatggaactaaacccattattatgattgagtcagcaaacttaaagatgtgtttggtttggacaaatactattaattccttaagttccctgtggccacagtttttttttttaatgaatgtttttctgagtaatcttggtcctatttgaggccatcttcatatgcactaccaatatttccagctatacccaacaggtaaactagccctctgtaggcaattaaatgtatattttcctgaagaaagtaaggttatatagaatataagtataaggtcacctagaagagctattaatgtattatggacaatttctttttattgccagagctacatgttacttatatttaagtctgatatttaattctctattatattcccttattattgaattaattaattcatccattcatatgacagatatttcttgagcacttacttgtgccaggcactgtgttagactctggggatttggaaagaccctgcttccctcatgaaacttacattccaatgatggaaacagatcatctgtaagtgcgtaaactaatatatcatgtcagataatgtctcatttccttatctcttaaataaaaaaatattctattccatagggctgttatgagaactgagtgagactatgtggaaattaccatacacatgtttaaaaaatattgtttctttttcctcttatcttttagaaaagggaaaatgattattgtttctttttcctcttatcttttagaaaagggaaaatgatttgtataaatcattaaatactcccttgatattacaaaactagcaaattgttttttgattttattttttaaattgtcacataataattgtacatattcatggtggtacatagtgatgttttggtacatataattatagtgatcagatcaggacaattagcatatccatcatctcaaactctaatcatttctttgtattgggcatgttcaatatcctccctttaagtatttgaaacgacacaatacattattgttaactacctcatcccacagtagtatagagcactagaacgtattcctcctatgtagctgtaatttcgtatcccttaacaaatctctcccatctttcccttccccctacccttcctggcctccagtaaactctgttctactttttacttctatgagatcgaagttttttagcttctgcatgtgagtgagaatgtgaagtgtttaactttctgttcctggcttatttcacttggtgtaatgtcctccatttccatccatattgctgcaaataacaggatttcattttttaatggataccattccagtgtgtatctatcccacattttctttatccattcatttattgtcagacacgtaagttgattccatatcttggctattgtgaaaatgctgcaggaaacatgggggcgcagatgtctcttcaatataataatcttttcctttggataaattcccaggagtgggattgctagatcatatggtagttctaattagcaaattctatattccatattaaaggaaggaataggtaaatttttttcaaattttttattttgttaaagatggagtaatcctcccacttcagcctcctgagtagctaggattacagaggtgagccacagcacctggcatgggataggtaaacattttttaaaatgtttgttttgtttcaggcaaaattaggtatcaactgtttctccacaaagaagagcagcttaagccttcacagcacatagttctgataattcaggtcttcttttgccatttctcaaacatagctatcttgtgttggtacatgcgatctgcagggccttagacgaatcatacatttcatctctctgggcctcagtttcctgaagatgaagttatgttatatggttcgtaaagttcatttcagggctaacttcactttgtccttgtaaaaattatctgcctagtgggtccactccccacctcaccaccccccaaaaaatgactgctgtgctccaacccaagccaatcaaaaatgataaacacttgactgtgacttttttcaagactctgttttacagagaagtggaaaggtctactgtggaatgcttatattttaatttgtcctcattgataggagaggacaaatgtaaactaggagaaatggaaaaaccagtgatacatgtcttgttatgttaaaggaaaaagctagagacaatatgattattaataattattttttaaaattaattcttgcatttattgagcacctgctgtatccctcatatgcattaccttgtataagtcttgtaatagcccaaaaagttaagagtgttcttattctcccaaggatgcagatatggaaactgaaactgagtacggttatgcagtatgtgaggggcaatgctgccacagaaactcaagtctagctgagaccaaacccatgtttttaaccacttgcttcttgcctttgccaatcattgccaccaacgagtcaaaacttacttgttgctggaacatggtttcatcctggccttccacggaatctgttgagcttgttttttttttttttccatatgccataatatgtttagtttcacctcagatgagacagaggatttactttcaagaaagttggacgctgtccactctaaacagtaccagaggtagccttacagcatcagaaaatcctgtggtagtatctcttcatcggaacttggaatatgattttaagagttttttctatcttttcattagagcaggccaacactgacttgatttttctctgaaattagctgtggacaaagattccttttcaaactaaagattctaagcttattttcccccatcactttatcaaaactagaaacaatccattaaaaacactgcccagccttcaggggcttaatcaactcagtggtataaagcatgaaacttgattctgagatccaggagagaatatttggattgccgggaggtgacctttatatgtttctttacgtgtataacaaatacatttcaattcgcgtctagccccttaaaaccagtgcatgtttctgaccctgagtgctactgacattgtgaatcgcactgcaaacagaacacgggtcactgttgttttcctgatctgggaagacatcatggtgtggtgaaagggacagtgcgctgctgatcagacttgggttctgtctctcctctgctaccagtgaaatgaatttcagatgcaaagtggaaagatcaattgtttcttggcctctttgctgagatcaagggaagaagaaagatcagattagttccgtgacagtccaatatttactgactgacccatgttctgtttcatctcaggatttccagggggctccaatttggaccactgcagcggtcccaactgccaacctatgttttcccttcttccctacctttcccctgcagcctcaagtggttccagataaagtgttattccatgtatctcactgtctgaatctagaggactctgatacccaaatgtgtttctcagagtgtgtcaatgaaagggactctttgacccacaatccccctttttcttcacaactccatcatcggcatcctcaaagacaatccatggtgcctactactcctcatcttattgacatgattttaatgtcagctctcgccgggcgcggtggctcatgcctgtaatcccagcactttgggaggccgaggcgggcagatcacgaggtcaggagatcgagaccatcctggctaacatggtgaaaccccgtctctactaaaaatacaaaaaaaaatttagccgggcgtggcggcgaccgcttgtagtcccagctactctggaggctgaggcaggagaatggcgtgaacccgggaggtggagcttgcagtgagcagagatcgcgccactgcactccagcctgggtgacagagccagactccgtctgaaaaaaaaaaaaaaaaaaaaaattttagctctcaaagttttcctccatgttccatgaaaatacactttacaatctagtattccccccaccacacacacacacacacgcacacacatatatactgaaacgaaaccatatccaacttcatttccatttccaattcattcaacattttctattctgttctattgcatttaaaaaacgctggtcacaagccactaaactgatctcagatcagactttaataaatcagactcccccttttatacgcacagagcactctctactgtttcttcctagtacttgtcacaatttgtaagtcctaaatcatgtgattgcctacttaatgtctcccgcaacctgcccctggtgttctgtaaacttcaagaggatatgttttgctcacctttgaatttttagatcccatacaacacctatcatatcataaatgtttaataaatatttattaaaagaattaataaatgaatgtggccaaacctattcaggtctgcatggttcctccctagagttccatcacacttcacagatctaaagtttcctcccagttgtggaggtttgaagctcaaaactgctggaggtgcttcccaccatagctcgtgaaggccctattggtgttttcttcctagtccgtctctagttgatcatgacagatgggccagtgtgttttgaagaagactggctgatgcctcaccaaattctggggacaggtgcctttctccaggggaattcatgaagagactctccaggggcagggcagaccactgggaaaaacaagacccttgggttttctgaccactggccacttgtttttcccacatcaggagagtttatcatctgtgctcatccacctcctgaggttgctttgctggtgctgatttcaggtcccaggcccctaaggtctcacactcactccacaagccacctacacagctgtagttgttttcagccgacagctaggttattttgccttccaagatattttcttttatttatttattcatttatttattttttgagatgaagtctcacactgtcacccaggctggagtgcagtggcacaatctcagctcactgcaacctccacctcctgagttcaagtgattctcctacctcagcctccccaatagctaggattacaggcaagcaccaccatgcctggctgatttttttgtatttttttgtacagatggtgtttcaccatgttggccaggctggtctcgaactcctgacctcaggtgatctgccctcctcagcctcccaaagtgctgggattacatgcatgagccaccatgcccggccaatagtttcttttttgataggcagctcttaaagccctcagaatacatctctaatgatgaaatcatcaggcaacttgacaaagagtgaagaaattgaagggttctctcaatagcatcccaaggaggctgacccacaccctactgcctaccataggctggcttcatgtgctctagtgctgtgaataaaggaaaaaactaacatgttgaagcatttatttagtgccaggaggcaggtactttctcagataccctttttcttctcacataattccaggtcattggcagaatagagatgcaaaccaagaacttgggcagcaccaagatgtagatgctaaaactttaaacttgctggacaaaatgataggggactttgaaataattattcagacaatttaggcaagcaaacaaaagcaattaaaaattgggcatctggctgggcatggtggctcacacctgtaaccccagcactttgggaggccaaggagggtggattgcctgagctcaggagttctagaccaacctgggcaacatggtgaaacctagtctctactaaaaatacaaaaaattggccaggcatagtggcgtacctgtagttccagctacttgggaggctaaggtgggaggattgcttgagcctgggagatggagcttgcagtgacctgagactgtgccactgcactccatcctaggtgacagagtgacacccatctcagaaaaaaaaaatgggcatctggccaggtgtggttgctcatgcctataatcccaacactggaaggccaagtctggacaattctttgaagccaggagtttgagaccagcctgggcaacatagcgtgaccccatctctacaaaaaaattaaaattaaaattaaaaacagccagacatggttgtgagcacctgtagtcccacctactagagaggctaaggcaggaggatcatcaaaactgcagtgagctaagatcgcaccactgcactccagtctgggtgacagagtgagaccctgtctcaggaaaaaaggaggcatccaaaaaaatgttcccttagatccattttttgtctgacagagacaggagaggtgatgaaagggaatgtaagagtatttaagggattatttctttatggtagcagaaggacaaagacatgtttgaaaaatttttaatattgtataaaatgatgatattttcttagtggtcttgttgttgaatccagagattgtggtcatgtagttcataggtaatttatcagttattatttattttttaaagcttttatttatttatttatttattttagagatgaagtcttgcaatgttgcccaggctggcctagaattcccgggctcaactgatcctcctttctcagcctccctagtagctgggactataggcacacaccactgtgcctgtctaatttgtcaacttttaaatgagatcatctgcaagttcaaggaagttagataaagggtgataccacagaaaaaaaatgagatttttctctttaagatgaatattgaatttagaattccttaattaatattgaggatcacatgcgagctacagatagggaatattgagtatttaaagcattctgaatgacctgagtgttttccttctcatgcttattaaaaacatttaccacttacagctgaattggaatatagttctacataaattgttatttacacctgatacacagaaagaaatgtgtttccttatttatcatactattaatttgaatgtgctattctttttttaattgctttaaagtcaattggggaatcagattatgaatatctattttactgcttccacatttcctaagttaatcaaatacgacaagttagtgagcttgtggaatttacttgaatttcctaatcttttaactgagagggtattttcgacagcaaatattttgtagcatccatttgtcattttttaaatattcaaactagttttttttaaaataatgccaagtacacttagtgcctagtaaatgctggccactgttattgctgttatcattattcttttttgtttgtttgtttgagagggagtctcgctctgtcgcccaggctgaagtgcagtgacgtgatctcggctcactgcaagctccgcctcccgggttcacgcccttctccggcctcagcctcccgagtagctgggaatacaggcacccaccaccacgcccggctaattttttgtatttttttttagtagagacggggtttcatcgtgttagccaggatggtctcaatctcctgacctcgtgatccaccctcctcggcctcccaaagtgctgggattatggcagagaaatgtttgtttcaaaagtgtgttagtctctaaggaaatgaatacttccagactaaattctgtttatagtattatcattaataaataaactaaaacattacttctgtttcattgccccaatgtatattgtattaaaatgttcttttctgatcttctctaagttaaaaaaaaaaaaaagaaacaaagttgagtaaacaagctgagcaaactttgtgttgaaactttaatatgtccgaggaaaagaatcttgcattaagtccaatacagagagtctgataatttggtggagcagagagcctcatctgaggtggctttccgtgaacagcatctctgaggtgtcacctgctaccacattcactgtccaccctgggctttgcccctcaagcaccagggctcaggtctcttgttttgcctgtttctccctatagtctccctggcctgtgccttttagacaaaacagattaacatcacctttaagccgtcaatactgaacattctgtctttataaggcctgactcattaccaattttatttggtcaattttaccttccttgctttcaaaggaacaccatttgcctatgtcaagtgttctctttcttttatttttcccttccttctgtctttcccctccttccttccttccttcctccctccctcctctctcctctctttcttccttccttgcctccttccatccttccctccctctctctctttctttctttctttctctctctctctctttctttctttctctctctctgtctttctttctctctttctttctttccatcttcttttctttctatctttcttacttttgatgtagctgtcacgacctaatgaaaatactggcatgagtgatgccacctttagattctccaccttcctgttcctgtcctattcaccaacatgaattggtttgtggctgtaagtacttggtgggttattgctcatagattcagttgcatttttgctgagatagtgctgttaccaaaagcaggggtgctgcttgaagaagtaaacctaactctgaaaaatagagactctccagaaacatcataatcttaaggatggacatttgtggcctgttattgttacttcattctaggtgacagagtgaagtgagtgagggcaaaaatgactgcacacttatggaaagagggctgcctccaccacagacaggtagtgggaggtcccactcttccaggttgaacccaatatcctatcttctccttccgctcttggtacctgttgttgctattgtaaacacttccctcacctgggactgcatatagatgaaagattgctggggggtttcccaggatcttgggccagtgccaacaaatggcaaactttcaagtctagagatggtcctatggcatgactgggggacaccacttccttcaccagaacattcacatccttcccaaggtgccacgcccagttcttttgtccaacaataaactctgcgaagtggagtgaagtcaccacccaagccttagcctacctctgaccacagcctgtgactccacaaagataaatgaaaagaggaaagtcagtgatgttttctatactgtcagcagcaatctcacagcctcaatacattttctttcaaaagtttaatatgtaataactggcatttcttcttcattcctagttggttagactgcatcacatctgccatgccaaactattaagagtaatacaattcttactcttagtttattaagagtaaaaactattactcttaatagtttagcatgctattactcttttcttattttttaatttttttaattttttattttttgagacggagtctcgccctgttgcccaggctggagtggtgcagtggcacaatcttggctcactgcaacctctgcctcccaggttcaagcgattctcctgcctcagcctgccaagtaactgggattacaggtgcccaccaccatgcctggctaatttttttttttttttgtatttttagtgggcaaggggtttcaccatgttggtcaggttggtctcgaactcctgacctcaagcgacgcccccgcctcggcatcccaaagtgctgggattacaggcgtgaactgctgcacctggctgacgtgctattactcttacagcatctggacaatccctaacagtctgaaagctctataatgttgcaggtagtccaaaggccctatcccttattctagaacacaggctttatagcacaggctttggcaagtctgtaacagtctgaactcctccactgtattccacatactagggatcttttaagttgtcattatgtcctggcacaagcatttatcatatttctgggagcatgtagggttcaagatgcgagggcaagagagggctgagttgtttgttattaagctgacaggaaatggccaaggctcatgtgctactgcttgcagttgggcaaaagaggataaattaattgctttgtagaaattcctttctgcattctttagggaaaatttttccatgtgagctaaatgagtcaaagggggtggttttgggctcaacagctttgacattgtcccttcaaggaatgaaacaattaaagaaactgatctcctctgagaaaaagaccatttacaataacctatctactctacataaaatattcccagtagactcatcaaaacaagaccctctgataccacaccatactgggtttttccttattgggattcccccatgttttttctttaatgcttccccatgttttagaaacagatttgcttacccggaaccttccacactcaattccaaatttatcatagtactatcatttgggagtaaacaacatgtaaggggcctacacgggtggaaagcccattcaagaaactgaggatgatcaaatagtagagttgatagtatgtgtataatcccagggaggagtttcatgacggattagaaggtcaacactgcctgatgcagccgaaagatcacattaaaacaggacaggaaggaagtcctggctgtccagcaaaaggtctttagtggctatatcaagagaagcttttacagaagggtgagggtggtagcctgcgaacattggattaggagtgagagggactgaaggaagtagaaactcgagctcaggggaaggggagagaatgagcttgaggaaggccctctgatgaagggaaggctcttttctgatgccagtgagttgagcagacttataggaagcaaagaggagtctagggacagacagggattgtccaggtaatgtaggaaacatttgacaaggacagatctcgaataaaaacatgaatgcaatttctgtttcagatgtctcctttgcctgccccatcccacattctagaaaaatatttggtgcattaacagattttggacttcacagggcttcacttttattgtgcttaatatttgttccttggtgaaacacaaagagacaaactacacaaaaagagaatcatacttgatgaaaaaaatcaatgtttagaagttgctcttaaatcttttacccattgctaacatgggtatttggatgccatttggaacgtattccaggactacttatccatgaaaggattaatgatattggagccaggttcaaagtctcagcaacaagctaaaacctgctctttttagtagtcaggggcaaagcttagtatcctttcttctgaaagctttcgcatgctaagctttccattgccaagcccccgggaaggaaaataccagaagtttcactccgatagcagctttttctgagatgcgcctggtgataacattttccagtagggctatcttctgtctccttccttctctgtgtgtaccagtaaagccttgtacaagtctcttaacctttcttggcttcagtttccaaatttgtaaagtgaagataataatacctccctcatagagttgttgtgaggactacatgggctaacgatcagacagaaagcactcattaagtgtgactagcattgttaattgcagtaatagtagttctagtagcaggcttttccaggttataaggattaaagatacgctcatgttacctaagttaatggtgcattattttaagggtacaccaaaaagtaagaagaatgggaaactacttaaccagcacatggggtgcagaagcgagagcaattgtgttttctttttttttttttttttttgagatggagtcttgctctgttgcccaggatggagtgcagtggtgagatctcggctcactgcaacctctgccacctgggttcaagtgattctcctgcctcagcctcctgagtagctggggctacaggcatatgccaccatgcccggctaatttttgtacttttaacatagacgggggtctcaccatgttggtcaggttggtctcgaactcctgacctcatgattcactggcctcggcctcccaaagtgctgggattacaagcgtgagccaccgtgcccagccccaagggaattcttacagcctgacaggtttggaactctgagtctctctgtgtgtctgtgtctctgtcactccaccatatgtttagcagggttaattaatttgcccaagatcacacaattagtagatgattatgcaagatttgaaccagttgttattcattggaatatgattactgtgtaagttagcatgagaatattgaaaataaatgtcttgttagattcatttattttttaaaaaattcctatgtaggtcgggcacagtggctcacccctgtaatcccagcactttgggaggccgaggcgggcagatcacctgaggtcaggagttcaagagcagcctggccaacatggtgaaaccccatctctactaaaaatacaaaaaattagccgggcctggtgatgcatgcctgtagccccagctacttggtaggctgaggcaggagaattgcttgaacccgggaggtcgcagtgagccgagatcacaccactgcactccagcctgggcaacagagcaagactccatctcaaaaaaaaaaaaagtcctatgtatacttcttcacatcaatttaggcaggctttatttgttaacttttgttggtagccaacatgcatttaaactacttattattgtcctaatctaagaaaaactgagaaatggatgaagttggtcctagggtatcccaaagcacagagtgttttattctgtccttgggacagaggtttgattcaaaatgttttttcggaaactagccttgaacacctaattttattaatattctttttacactccatccctcctggaaaaggactggaccccaattcccaccattgcttttttgggacccattatcttccttagcttcctatgcatctacagggtagtctgggcttcacttcctcagtgtccctgtatgaaattaggtggatatagattagtctgatgtaggaatatcacactgtactaaggtttagtttgtatgttattctctcaagtaactgatctttcaatcgaactaaacacttcctatgtgctttaaggtggtgggaattacaagcatagcaagttatgattggtcacggatttctttcctctttaaatggtgacctactgcccattgtacctactcaaagcaactttctttaggaaaaaagaccacagtctactttcctaagcataaactcagttctcattccacctctaccacctgcaagatttgttaggcttaagcagtcccttaacttctttgagtgtttgttgccttgcctacttcattggaagtaaggctctggaacagggaaggtttgcctccataagactaaaagttatgctaatataagagactagcaaaatgggagacatattcagctctcttcttgtggggaataccttgcccttgaccaaaagccttgtcccagaaagagccgtgtgggtgttggctttgtgcccaacatgtggctcctctgccatgattgatggcttcatttaagaaacaggttttaggattttttcccctaaaatcttattcctgttaattatcatggatcaactttaccttagctcgtttaatacacagtcacctggtataaaagcatgtgaaaacccccagggatcgtaaccacatttatgcattgagaaaagagagtgaggccaagattttgagatgtgttcaaatgcaagaagcttttaaaatgcaaagtattctaaaactgttgaaagttgaagctaactgttgttcccttgttgaaggtaaaaagtaaagcatttttaggaaagcacttttccttatgtgtctaatatttgggaactgcataggagaacagtttaataggaaccctgatattgacagtaagatatattcttaatgtagtaaccagacccagggcagaatttgcaaacccatggtaggcatacaggtggctgaagaagaatcgggacagcaagatctcactgagatgcaattccattcctccatttgatacagattaagatttctgaaaaagaccatcctcctaaaccctcatggactctgcagataatatgaggccagaaaatgaataattcccaactcttgctatctcgttactggccagtgtgtctggcttcgctgagtgtgtgccttctgaagcgtaccctataattattcagcaggtatagtccagttcgtcctacttactttagcaagattacctttcttttatttttcctgtgaaaatccttctcttccttctttcctcctttgtctttcctctttgttaactttttaaatctaaagtgccttgaaaaacttgtttacatagtagtaagaaggaaaatgttgacttgtgctatcctgggaaccttgaccttcctgcattatggataaatcatttccctgcaggtggaagtggaaaattgcagatagaaccacattgactcacattctccttctacttccatttgagtgagcaccaagtatgcatcacgacttgagattataaagttggcttaatgatgagacaggtttctcagtcgggttttccattggctcgaagttcacaaggcagttgttgcttgtctcagagtgtccttaggtggactacatctgaacccttggcgttattataatgcagattctagctgtgctcaaaccaatgaatcagaatctcaggagggtggcgctcagaaatctgcatggttgatcagttctttagcagattcttatttttgtatgctaaagtttgagggtcaccactggagagattccagaacagggcctgcaagggaattgttcaaagtttgctcaagttaactttgttgttacagcattagcttgaatatcaggaggttttgtatttaagttctctaaaaaaagaaaaagaaaaaaagagaacagtctcaatatataaaaggaaaggttttcatatatgtgcccaattataagtatcttgagtattctaggagtctaaacagaatgtctttagatcatccttataacgatcctgagactcttttgactgttttgagttgaagacaggtaataagaaagaaatcaccaattaatgcagaaggaaataaatttctgtatataataatattcacatttgccatgtctcttttaaaaagtccaaataacaggcagagcgcggtggctcatgcctgtaatcccagcactttgggaggccaaggcgggcagatcacctgaggtcaggagtttgagatcagcctggccaacatggtgaaaccccatctctactaaaaatacaaaaattagccaggcgtggtggcacttgcctgttgtcccagctactcgagaggctaaggcagtattatcacttgaacccaggaggtggaggttgcagtgagccgagatcgcgccactgcactccagcctgggggatagagcaagactccatctccaaaaaaaaaaaaaaaaaaaaaaaaacagctcaaataactttaccgtacataactttaccatacatgtcctctagtctcttatcatttcttcatatgaagaataatttatactcattgatgtaaattttgctatattttatacaacaaacatagtattattttaatattgcacatagagaaaaatacctcttcccctcaaaattagaagggttggtatttttattcaggcttattgatttaaaatacctgcttgatccgtaattcaggccatacgatttcaccaaaacaaatatcctaatagttgtcatcttgaataactgtttagtgcacagaatgtagtctcatttattaagaagtgatttaagagattattacttctgcatctatcacactaacatgaccaactctttagtaagggaagagtaagggaacttattttatatctagatagaaattttattaaggatacagtattaggattcataggggaaatagtggatagatcacaagaacgaggctctttctgagccctgcaggaaagaatatttgcagaacaataaaggacatggtggcttcctggagaatgttggccgaagactgagccttacttctggaaaaggctcagtgctagagccaagtgagcatcgatatgccaatacaggcaagaaaatcctgcaagaggcagacttggttcttaggtcggaacaggctctgcttcagaacttgatccggtacccaattcgtttctgcttcagcttctttttctataaaatgagggtagtacttatcccatgagggagctgttatgaggataaatttggctttattgaatgtgcatgattcctggaacccataaagatgtcaaatttagaagcctcagagagatttcctttgctctgtgaataactaaatttggttagctggggtggggtctgggtacttttccttgtgaagaatttttccctcattctggtcatctcctcccctcctatagaggcaccatatatttttcttgtctcaggtacctatagtgataaaacaccctgagctgaaaggatcgctggatagggcagtctcaatacaaaagaatgtggcagaagctcaggcttcagtgcacatcagaatagaagcttcatgagggcagaggcttttgtctgctttcctcattgcagtatccccagaactttgagcaagtgcacactcgatgaatacttgaaagaataaatcaatgtcagacatctgggcttatgtctcatctttctactgttctcaactaagagattctcgtcattctacaactttcctgagcctgctctccttctccaaatattcacccttccaggcactgactccacctcccacatcagagctttttcttaaagtaaataacagtcaacaattaatagcttcataactttggaacagtgcagtgtctttggtttaagaagcattgtttccatcctccaaactaaaataaattttgagaaaagatggagatggtttgggactggggaagaagggaatggaagaagtgattatttgagggcacattaactatttgtacaaagtagaatatcttagttaaatttggctacatagcaagcaggtatcattaaatggatgtctgttagaatcttgattttcaaattaactagatagtcagcgttagttagactgagggagggtgattacagtcctatgtcactgagggagaatggtgaaagggcaagagaaggctggcaggtagagctggaatttttctgccagcaatagaccagtggttcccaaatgtaagcctgcaacagaatcatctggagggcttgttttttgtttgttgttgttgtttgtttgtttttggttttgtttttttgagacagagtctcactctgtcgacaggctggagtgcagtggcgcgatctcggctcactgcaccctcagccttccaggttcaagcgattctcctgcctcagcctcctgagtagctgggattacaggcatgtgccaccagcccagctaatttttgtatttttcgtagagacggggtttcaccatgttggccaggatggtcttgatcccttgacctcatgatctgcccacctcggcctcctaaagttctgggattacaggcgtgagccaccgcgcccagccaggagggcttgtgaaaacacagatagctgggcccatccctagagtttaggattcagtaggtctggcggaggcctgatagtctgcatttctagcttggccaggggatgttgatgttgctggtcccaggaccacattttgagaaccactgcaatagagagtgtgcatgaaaatacaacaacaattacctgatggtccttagcttagttcagttgtcccccacaggttgaagcagtgttcaagggcaaacaaaaactttctctctcagccacctccataagttccatagtttatttaacaaagcaaactcacaaagaaggaggaagttaggactgctccatttccccttatagcaaaggcatgtgtatttcacaactgcaatcagcttgaatagcagaggctggaaggctctccatgtctttactgaagtcacgtcactaagtcacacagacatgctgctaattcactgccttggccagcacatctgaaaataaatagcaccattataggccctttcatgaatatacagcatgtggcctctaaattggccaaggagctggctatgctgggacaaataacttagataaatcacaaatcagagtggagaaatgaggtgtttttaatcaacagcatccaacaatgtgtgttgagtttaactgaatccaggtagaggagggagtgggtgcaagagctcaaagtatgctgagaatagttttatttcaaaattccaggagacttagaaacaacatggtaatgatgaaaggagcctgaagagactctttttttttttttttttttttttgagatggagtcttgctctgttgcccaggctggggtacagtgtcacgatctcggcatactgcaacctctgcctcccgggttcaagcaattctcctgcctcagcctcccgagtatctgggattacagacatgtgccaccatgcccggataatttttgtatttttagtagagatggggtttcaccacgttggccaggctggtctcgaactcctgacctcaggtgatctgcccgccttggcctcccaaagtgttgggattacgggcgtgagccaccatatctggccctgaagagactcttaagatactttcataatagtttaaaaagctgtatgtgtgtttacaatttctgtcataaatctatggtaaccacagcacaaacattttagaaaaagaaaaaaaaaaacaactctcggttgagtgtggtggttcatgcctataatcccagcaatttgggaggctgaggcaggaggatcacctgcatccaggaatttgagaccagcttgggcaacatagcatgacccatctcgacataaaattaaaaattaggtatggtggtacatgcctgtagtcctggctactctcaggggactgaggtaggaggatctcgtaagtcctggagtttgaggctgcagtgagctgtgatctcgccactgcactcagcctgggtgacagagcaagaccctgtctcaaaaaagaaaaaaaattctattttcccacctctctaacataactgtgaatagtagtatttccttctagtttttaagtacactatttaaaaacatggaaggttttcaaataatgtacttagatttaaatgcatttttaagcttatacccatataataagcatagtaactaacagaatgttctttggagtcagatagtcttgggttcaaatcctccagacatttccagccctgagttttgcatttgttaaatagggatgataaacctggttcatagcattgctgtgtggattcactgaggtgctcatcaagtgctcagcacagagccctgtgtcatgtaagcactcagtaaatagtggcatcattttctgttttcacacacaaaaaatgagtcgaccttctgcaatcctaataatcagtaagttcttcttaatggccagaagtatacctatttttagtctatgcatttggcaaaatttcattccacaaattgtttggtggtcccaggagctgctttcaagatcttctctgaccagcttgtcgagagcttttgttatctgtgttttcctcaaagattagactcatgaaagatgtgtgaaagccaaaacaaaggaatgaccactggtgctcagagtgagagagattggtttagttgtttagccaggctatgtggctttgttcccagaccacagattataaccacaccattgtgggcaccacatatagccattttggtaaactagatatgggttgctagggacatgggcaagaaaccatgggtggggaggtgtggacctctcagccctgccctctcaagcctggccaacttcacatctgcaactgggactttgtttctgttccagacctgtttatccaactgccaacttgacagccacttggagtcctcatgagaacctcaaacttagtatgcccaaatgaaattttcagctcaccagaaggtaaccatactgtcttgagtcttacagttaccctgtaaacaaagggattaactttactagatagcaacttcctgcccataaagttaagaaaagagcccctcaatgcaaatgttggttttgcttatcaaataaatggattcttggttcttcaggatagttacagataacaatgggcagaatagccagtaaattcagtaactccttaaaattgttgaaagtattttgtgcactttctttatatcgctgcttagagtgttaattggtaaaatactctgaaggactaatacacaaacactttcacccagcaattccaattctaggactttattccacagatatatttatacatgtatgagttcacatgtacagttttctgaatttttttgtgctggcagaaaactagaaacaacagaaatgaatgaaagagactagttaagaaattattgcccagttttatagtagaatacatatgcagctgtaaaaaaagaatgagggaattattatgtatttatctattaagtgaataaagcaaaatgaagatcaccagcaaacagataaagaaattgtggtattcatacagtggaatactcctccataataaaaaggaatgaacaatgggtgaacactacaacatagacgactctcaagtactgtattcccatttgtgtaaataaaaatgtgggaaagaatgtatacatgtatttgcttataaactctatatgcacagaaggaaacacaagaaattattaccccgggaggcagagcttgtagtgagcggagatcgtgccactgcactccagcctgggcgacagagcaagactccgtctcaaaaaaaaaaaaaaaaagaaattattacctagattgtctatgcagagggaactgggtacctggcagacaggagtaggagggagacattgtacaatatgcttttttatactttttatatttaaaattgcaaaatatcttacatgctcaaaataaaaatagaatagcttatataactatgtctaaatattacatgtagttttcttctctggctattttctttttggtttttatataattttttaaaatccacttacttagcccaggcacataaatggaaagaaagatatgcttaaaattatgttatttgcaaaaacaaatatttagatgttttagagctagtatgtttttgttggtttctagtttagttctacatggcatcagactagctactctatatgatttctggacctttgcaatttgttaagatttgttttatggtcggggatatggtcaatatgtaaatgtttaatgtgtgcaagaagaatgtgtactctgaagttaggcatagtgttttctgtatatgtcaattagcacaagtctgtttatcatgttcaagctctgtgtatctctgggtttttttaatctgcatgatagaacagaagtatgtttgaaacttttattgtagttgtggatgtaatatttttcctctacttttgcagttcttgctttatatattttgagcctatattacttggtacatacatatttagaattgttgtgtcttcctggtggattgccctttgattatttaggaaatgtctctctcttcggtaatgcttcttaaagtccattttgtctgatagtactatagctacctcagctttcttttggctaggtttcataactttttaaattctttcactgtcagtctttttatgtccttatatttaaaatgtgtcaaaagaaagaaggagaaagaaagaaagaaagaaagaaagaaagaaagaaagacaccgcgatttacctatgttacaaacatgtatatgtaaccctaaacctaaaataaaagttaaatataaataaataaagtgtctcttcatgaaaactttcttagcatcattagtcattagggaaatgcaaattaaaaacacaatgagataccaccacatacaacatgtctagtataatggctaaaatgaaaaatactaacaacaccaagtattgttgaacatatggaaaaactggaacactgattatgggagtatacaaccatgttgtaaaacactttaactggtcatttacccaagaggaatgaaagaatgtatccatataaagatttgaacacaaatgtttacagcaactttatttgtaataggtaaaaactgaaaacaactcaaatgtccatagacagatgaatggatttaaaaaaaaccatgttatatccatacaaaggaatactcctctataataaaagggagtaaactactaatacacagtgcaatatagatggattgcaaaatgattctgttgaatggaagaagccagaccaaaaaaagagatatattgtatgattctatttatgtaaaattctcgaaaatgcaaaggatctacagtgacagaaagcaaattagtagttaccaggagacggagggtaaaaattaagaaggggcatgaagaaacttttttattgtagtaatggtctcatgggtctatacgtatgtcaaagcttatctaattgtatactttaaatatgtgcagttcattgccagctaattatactcaatctgtttttaaaagtaaaatgtgcttcttataagtaacaattttttaaaatgtagtctgatgacctttgtcttttaattagagaatttaatctgtttacatttaataactgatataggcagggcacggtggctcccgcctgtaatcccagcactttgggaggccgaggcgggtggatcacctgaggtcaggagttgaagaccagcctagccaacgtggtgaaaccccgtctttactaagaatacaaaaatgagccgggcgtggtggcaggtgcctgtagtctcagctactcaggaggctgaggctggagaatcgcttaaactggggaggcagaggttgcagtgagctgggattgcaccactgcacttcaacctgggtgacagagggagattccatctcaaaaggaaaaaaaaaaaacctgatatatttgggtataaatgttcaatcctactgtaggtttttttttccattttgcccacttgtttcttgttgctatagtcattacaacaatacatgtttgacttattagaatcctagtattaattagtacttttaccatttcccagatgatataatatgggctttaaaacacatgaaatccgtttacccctcaaaccttttgtgtatcattgatgttttaattctatgtatattttaaacttcacattattatcattattatatttatattgcacagtcactatcatttagatttacttatgtttacccttttggtgtatttcaatgctttcagcacttctgtgtttccctttgggattgcttttcttctgcctcaaaaactctccttactatttattttagtatggctctgctggtgataaattctctccatttttgtttatctggtaaaatatttttccttcattacttatgaagaatattttcactaggtagaaaattctagattgttagttattttatttcagcactttgaagatgtcattgcattggtttgtggatttcactttttcaattgagaagttaattttgttggttgcattattacactttgaagataatgtgtcttttccctggatgttttaaagatttttctctttgactttcagtagttctactatgatgtgtctaggtttgatttcctctgtattgattctgatgggcatttatagaactttatgaagctgcgtctggtatttttgccagccagtatttctttaaatattacttctgctccagtttcatctctcctcctcctttgggatccagcttacacaggttacatctgttactttatgactcaacacacttttctggaaagactctcttttctttaaacacaagacactaaatggttacaggtgttcttttaggtgattatgctgcttcatcagcagatggtgattatatcaagaaggaaacttatatgatgacatataaaagctggggagaggagatgtctctgaagacagtgagaaatccttctctagtcttgctgctggaaccctcaaacacttaagtcatctaataaacattctactgtcttcagaggaattttctcagtgaaagggatttgggacacccctgtgaggaagaaacataagttccatgccttccaaataaggggcaaacttttctttgtagtcatgtttccacctgttgaatccgttttatggaagttgtacagttatggcttgtctgtttatgagaagagatagagaatatgagaaacgataaaacctgaaataatccattgtgaggccacaggctgaagaacttacaaggaatttattctagactttatggctgaaaatatgtatgcatatatgtatatgagtgtatggagatacagttatggatagagatctatagatatatgtgtagatatatagatacataaagtttgctacagaaattcattttgtacacttttaaaagtgcactttactaaaagcatccaagaatgcatctcagaaaaagccttagatttcttttatgtggtcaactccaggaactactcactcttgagatagatgtgtgttttcagagcttatccatgccatgcacaatgatctaaccctttgatagctgcatcattcaaagtcagtttttctacatgcaacaaatttttaaaccttgatttttatttatttatttattttgagacaaagtctcgctcttgtcccccaggctggagtgcaatggcgtgatctcagctcactgcaacctccacctcccaggttcaagcgattctcctgcctcaacctcccgagtagctgggattacatgcacctgccaccaagccaggctaatttttgtatttttagtagagacggggtctcaccatgttggccaggctggtcttgaactcctgaccgcaggtgatccacccgccttggcctcccaaagtgctgggattacaggcttgagccaccgtgcccggcctaaaccttgatttttaaaaaaatactaccctgccctaaccttgtaacttaggaagtttggggagaggggtgtgtaacaacctttcactgcttatttgatgtaaatcatttctagtcctgaaacaatggctattttgcaaggtttaattatactgtgtgttgtggttgcatgcataggtacacccacaaatgtctgtcattaatacgtatcactagctttgtactttacactgtatttttggagtgttttacagtcgttcgttaccaagagtaaattatatatttgcttttctttaccccacccctttcactattgtttaaaacatgtcagattcaggaaaacctcaagagacccaaacctctttcaatacttatagacaaagtttttttttccttaaatcagttttaaaatccatccagccattttggctgccggccataccagcagataatgaaagaattttccttgagggtcaaaagccagggagaagccttccagggctgtttggtttcctagcacagctgctggagtagctcgtggtgctgattgatctgcttggagattcttgtgcatcttcacctgttagagctggaaagatgctcaggactatacagcccagcccttctggtttacatataatgaaactaaggcccaccttagtcaactaatgtgcttaaactcaagcaaatggcaaatggcaaaactcaggactctgtcaatgagttttcattctttttctttattcttctagacacatattttataaagaaatgaggcagcatgatgtttaaaatacttaaagtgagaatgagaaaaactgatgtctacatatcatgaaatggttaaaaagtttaacgtgcattgtcttctccattagaacttcttttacgaatttttttctcaaaatctggctcagaaatcttgttttaaaagctccctaaacattcctaggcagaattagtaacgccttcctctttgctaacaaggaactgtgcatattcctgtaatagaatacttaccatattatattgtaagtattaaattattcatctgccctcctcccacctacccactggatcaggcttcccaggaacagcaacagagagcccagcaatttgtgtgttctcagtgtggaatgaatgaatgaatgaatgaatgaatgaaccaaccattccttcacagtcttgcactatcagtgaatcttatgctttattgaacataaaaatcacctggaattgctgacttaaaatacagttttccaggctataccacaagagatgctaatacaggactggggtaggtccaggaattcgaatttttatctaagtagctgatgacttaatgcaaatgatccagcagccacactttgcaagctctacgctatgattagttgtggtttgtagtcccaattgtatatcataattatctgctgatctgaaaaaaacatagagcttctctacccactccttaccaccagtccatcaccaccattctgactccttagtcacaatgggtattgacattttaaataaatcccaaggctcccttccgggagaataaagaggataatatttataaactattttgagttccttagaagaagggtatcttagctcattaaggaaatattatcatgatataaatctaacatcatgaaacttatcttggacatgtcaaatttggtctaagaatcaaatgtagaggaaaataaaacccacacacagtacctgcatggaaacggaacctgtgcaaacacctgctttggctatgttcctttttgtggagacagatgtcccccttcactaggaccagggtagagatgaagaaggttgatttggacattggggtgctatatgttcttttgggactgaagttccatattaggaaacttaatagctgacatttacataacttttaaacatcccaagtagtacgctctgtctgcacactattttatatgtatgcaatttgtttgtttttgtttttgttttgagacagggtctcactttgtcacccaagctggagtgcagcaggcatgaacacagttcactgtagcctcaacctcccaggctcaagcaatcctcccacctcagccccctgagtagctgggactacaggcacacaccaccatacctggctaatttttgtattttttgtagagactgggtttcaccatgttgcccaggctggtctcaaactcccgagctcaagtgatccacctgctttggcctcccaaagtgctgggattacaggcatgagccactgtgcccagccatatggatttttttaaaattatgaacttacataacttcacaggagacagacctgaatgaggtagttattaaactactttctgactatggaaaggatttctgatccttgtagtatatttccacgtatattgttatactgttgtgtgtttgtatttagttgctcatactattttttactgtagcttactttatatgcaggtttccatgggtcaacctaatttatatttttgtcattttaaatggaaaaatgatatcccatatattttgtagtattatttgttcagtgttctttccaatgtgggatgctttggttatttctaattatttgctatcatgctatcatatacagaattcttatgttcatttctgctcaaaattatatttttgtttgtatgaattccacggtgtatatttcccaaagcgagatagttagataaaagagtaacagcagtttcatagttctggttgcatattacagtattactttccagacacacagagccaatatacaaccccaccaggggtgtgaggcatgctggttttcccacagcttgaccaacatgaaattttatcattccagcctatttctgctagcttaatatgtgtgtagggcctcactagagatattttattttgaagttcttcaaatgatatgaagcaattcttttccacgtggaatgattcactattttcattttaaggacaaaccattcgtttgtatttgacagttttgaagtgacaggtttaattgccttctgtataattgattctgtagggagagaaaataggagtgctattaggtattgggttaggctcaaagagtcaagaaagaagattagttgtgtagttctgaatttggaaacttgtatgtggacgactggaacagaaataccagttgaccctgtttaagaagggctagagagcaggaacattctgatttcatgatgacaaaaatactagagttttgacataggacaacagatcttgcttcaaaatgaaagcaagaccctatccttcctgcctctttgatcctctcacagtgccactttctttcctgaacattttcagatattcttatttcagatagaccactctggtgtataataggaccagttttagagtggccatgaagctaagacatgttatttgagagctcttaggggaagacctggacacagcagtcgcaggagaagtcagtcttatctgtaaaaaggtcagcttgatcacagaaaaaggctttggcttggttgtgttggccctccatggcttatgatcctctttcaagtaagcaaataaatgattgcagtgttggtttgagtcctgtggtgccaaacacaagacacattgttgctcatgcaatatagacctttgttttggacagtggtctaatctgctggtttttaaaacattggtgactgtccaacttataattaaaatcagtctatcaagcacttggagacaaaatctgaggttattctttcattcctagttgtcacactaattttttgccttcacttttgtctctgtagaatatttacacgtacacctatctatatctatttagatataatttatatactacaaaattcacccatgtgtacagttcagtgatttttaatgtattcacagtcatcactacaatcaatttcagaacattttcattactccaaacagaaaccccaaactcattagcagccactctccatttctctacaatatccccaaccttaggtgaccacaaatctactttctgtctgtatagattttgcaattctgggcatttcatataaagaatcatagaacatgtggtcttttggtttagcttatttcacttaggataatgtttccaaggttcatttatgttgtggtgtatataggtactcttttcctttttattgctgagtaattttccattgtgtggatatacaactttttgttaagtcattcatcagttgatggacgtttggattttttccattttttggcctttatgaataaggctgctacgaacattcatgtgtaagtttttgtggggaagtgtggttgtctttttttttttttttttttttgcaacagagtcttgctccgtcacccaggctggagtgcagtggagcaatctcagctcactgtgacctccgcctctcgggttcaagcaattgtcatgcctcagcctcccaagtagctgggattacaggcacacgccaccacacctggctaatttttttgtatttttagtagagatggggtttcaccatgttggccaggctggtcatgaactcctgacctcaagtgatctgcccacttcagccccccaaaatgctgggattacaggtgtgagccaccacacactgccagaagtatgttttcatttctcctgggtaaatacctttgagtggaattgctgggatacatgggagctctgcttaaatttttcaggaactgccagatggctttccaaaatggctgcaccattttatactcctaccaacagcatatgcgtgctccagtttctccacatccttgcaaacacttgttattgcccctctttcttgttatagccagcctagtggttgtgaaatggcaactcattgtgatttgatctgcatttcccatttccctcacggctagtagaatacttacttcctatcctagtttttccttatacttttaaaaaattaaataaagaaaacgctgtagaaaattaaggagcaaaatgtatgcttgcagctacagcttcctctggggtttcacacttccttgcctcatcatgtaacgggccaccactaggatgaaggtgctccagtcttattcttccaatcttctctccatttgtcattcagaatcctgggaaagagagacacttgtcctgccgtgagttatgtgcccactcttttgatttgtgtttctgcctagacagtgcacagcatgagtgttggcatcttgaaaggaaactggggtgctcctgagggagaatagatgccaaagttgggacaagagcccagtttcctgcctttctaggtgtaactcattgccaaggtcgggagcaaagcaaaccatgtaggaaacctcatcatgctgggtagttaataagtatgccctagcacacgttttcacagagaaaacataatacgcttcatttgtaatatttaagtattacatctaaagttacaatgtttaaaaatttatatatacccttgttggatacaaagcatgtttaaaatatgtgacctcatttgatcctcagtaatctctgttagtttctaattatattcagtagtggtattggtattgtatgttttggcctcattgtggtttaaatacacttttgtgaactagcctgagaatccaaccaccaacacaatgatgtaatgagaaaacgtgctctgagttccaaacaaatggctaacagataagtgctcagaagtcaacctttttgtaagctggggtatcactggccagcagtcacatgccagcaggtgtgagtagacagtggggaacaatttcctctcatgtgtatggctccctaaagtgttggctgagcattgtccacatgggtgatgcaaaggatcactgaactaggagcagttgggaaaaaatacaatcattgggaattcctgtagcatcgaaggtgcctacagggaggtagaagtattcatacaacagttctctggtgttctctgttgtagcaaccagtcagccaaaagggttcagctgcttgaaatgagaatggctggatcaaaatggcagctcaggatttaaaggattctagtcagataccagacatcctcacatagagaaaactctgaatggctgggggagaaggagtcaaatgccctggatctttttcttgggcctcaaagtcctccttctgtcatcatccttccagtattgggcaggacctgactgcaggcatcatggcctctgtgaacttctcaagggtatgtattatctgacaaaaactacgatgtccactaacaggccactgaaaaggtatcttagtcagttctgctcattgcccagccaaggcctacgttttataacatgatatcaaagattgcatctaaaattgtgatgatttcctaaaataatcatttcatttagatttttctattttaatccaag

SEQ ID NO: 457 - DNA, 420 bp, Homo sapiens
cttcttctcctccttctcggccgggaggaggcagggctggatccctcagccgccgccgctcctcctcctggcaggccggccgcggagtcagctgacgccggcgctccagcctcgcctccccgcgccgcgctctgcgctccccgaaagtggctgcaagccggccgcccactgtcagggttggggggacagagaaagtgatgtgcgccttctaaagcctcgcccagcgccgccgaagcagcttcacctctccaactttctcccaccgactgcttgtcttgaccctgccctccaccctccccagagccacttcgggtgcgcgctcttgggtaaagggggggtcaccggctgtctgggatggcttccaattttaatgacatagtgaagcaagggtacgtgaggatccggagcagacgcctcggg

SEQ ID NO: 458 - DNA, 593 bp, Homo sapiens
cttcttctcctccttctcggccgggaggaggcagggctggatccctcagccgccgccgctcctcctcctggcaggccggccgcggagtcagctgacgccggcgctccagcctcgcctccccgcgccgcgctctgcgctccccgaaagtggctgcaagccggccgcccactgtcagggttggggggacagagaaagtgatgtgcgccttctaaagcctcgcccagcgccgccgaagcagcttcacctctccaactttctcccaccgactgcttgtcttgaccctgccctccaccctccccagagccacttcgggtgcgcgctcttgggtaaagggggggtcaccggctgtctgggatggcttccaattttaatgacatagtgaagcaagggtacgtgaggatccggagcagacgcctcggggtgagtatcgatcctctccgtgttgctgttcgccggttcgattgtctctctcttgagccagcatccctggagggtggacggagagtccccggccgcgcgccggagaattgcgcggtggctttctcagccgaaacccgcgtctccggggctgtcactgtaaggccagcgtctag

SEQ ID NO: 459 - DNA, 78920 bp, Homo sapiens
gtgagtatcgatcctctccgtgttgctgttcgccggttcgattgtctctctcttgagccagcatccctggagggtggacggagagtccccggccgcgcgccggagaattgcgcggtggctttctcagccgaaacccgcgtctccggggctgtcactgtaaggccagcgtctaggtatgtaatggatctatctttatctcttggatgacttggctttctgatggtggccgcgtgttgggcttcagtagcccctggagcccatctactcgaaataaatatttctcggtagccatggaagttggagctgagaagcccgggcgggggtgcctgccggatgcccccggttcccctcttttcccactcgccgccaacttaacttttccgggggatggatcggctggttgagaaagaggacacgcatactcggtgtgaacgaggtcacgaaccctctgaccccagggagagatttctgccaagcgtaaggtgtctttggatccccccacctctgtcccaggtgtcgtgtcaaaggcggtgcgggctggcctctggtcggggccaacttgggtagatacttgaatctggattttccgtggttcgaagccggggtggtggatttctgttgctggaatacaccctggaggtccacggaagggttatttacgtggaacctgatacctggcatagcgcaagtgctccctacatatgtcctgaaaggaagaatgaatgaatcttagggcacttgggacagatgttgacacaggctagctccttccttaaaactccctctctttcgcccctttctctcttggctcttcgctggaggaggcttcaaaagagaacctacccttcctctccttgggactgaatgatggtggaagaattcttgagggagagggaagatactggaacgatttttttatttcctaaaaatttcaaactaggtccctcatttctctttgcctcctatcaagtgttgtcgctgttttagttgatcctgtgcgtttggacataaggggtgaaaagtgggggtggagaggtggcgggggcggggggagaaaatatcctttggtgtaatgcctgaaataagtataatgtcagtaatcgtgtggaatgccgccattgataatgagtggtaaattgaatagctttctttagaaatatgtgtcatttggcatctttctcttacttggtctttggactgttttaatgtgccagatacttttactgaaaactgaaaagaaatttcacagtagtaaactcagctagggagggaagccctgtggggaggaacatccgcaattattataaaactcttgcctaattcgttttggtctttttcttttctttttctcccctgctggtgaccatgttttagcgattatgtcctgtgttattgtgaatatatacatatgtaattagggagaaatgtaacagaattcaccatttccatcagctctgccaaagtttccttggttttcttttctgctatgcaaatattctcatcttcaagagcacccattgttgggggtactttactgagtgactcccatgtaaggggcaaacaataatgggaactttctatttttggtatgcttataggctggccaagtgttacaattttaaggggagttaagttaaaaaaaaaaaaaacccagcattctaatttagctttactccatcatgtcaatggaaggaattggtatgagacatccattctgtgttagggagcattccaatgggaagaggacatgcattattaatgcacaaaatatgaattattcataaggatcagagtttatgccaaattgtgacacatggtaatttatttgaaaaactggttaccatcactttcttgtttgtggtaactgagattattttttctagattattacaattgacacaacatagccctatgtgtgtgccaacatttatggacagatatttgaagcagaaggaacagaaatatttagtttgtatttgttttatgttttacagcattttggatgctaatgagcagtatactttctcaagatttattctttttgtctgtgttcacgttcagacttcagaatatctattgaattatggttattgctcatggagagaaaaggtcaaaaatatgatcaagtaaatctggtcttatttgttagcattggttttctcaccagttaatttttaaaatattcttatggtatgatttacaaaagaggctgattacatagttgccagaacacagtgcaaaccaaagttttaatggaggctgcaaatattggtgaaggatgctgtacggaattggcatggggaccctatgtccacagtaaggaatgttagcggtattaatctaggctacatatagtctagaacagcatgcgacatgtatcttctaggaatatgtgccagtctcaaagagaggtagggcatttattttgtctagcacagagtagacacttggtaagttcatgttgaaatatgtgctgaactatatagtgcatggatggtcttgccatttataacctttaggaactaatacaacagcatttattaatggaatccagaccatgtttgggacggtttataattaaatacaaaaacatttcatggtaagcagctgttcctggtgccaaggaataaatgcttcttcagatttggagaaagaggagaagggaacgcattctgcttctattgcttgttgacctttgacctttcttggcctcagtttcctagtctgtacaatgaacactatttaatgttcttgggagcattaaagaagatatttgtgaaaatgcaatgaaagtctagaacattgattctgcttgtatcattttctttaatcaaagatgagttaggattggtagacggatataggaattatctatttccttctctttctatgtagaagtgtacaaaggcataaatgtttatgcagctccagattttttcaatggatgaaacttttacaaattatatacatatatgtgtatgtgtgtgtatttttatacataggaataaatatatacatacaacctatgtacatattgtataatatataatatacgtatatttatatatgtgattttttaacaggacaggaaacattctaaaaacattcccattcaaatgggtcacagataagtggtcaccttcatttgaaatcctaaagagtttaaatgattaagcaatcaaatatgtatagatttattctcttctttagacatcaaaaagcttaatgaaatataattcatttaactcaaaagtttcagtatcttcacatctgtattccccagcttaatccccattgtttcctggaggtctccagctgtgccctgggtactgaatttgttcaggaatgtcgacgttactatttgaggggctgggggaaggaggggagcagctgtccataattatttgagtaatcgattaaatgcactaaaaatttctttttaggggagaggcaaatcaggcaatttgtacaacattaacctgctgaatgtgtgacttagatagcatcatataacaattctcacttcgtttctttccttgcaatggagatgattttccaatcaatcattgtcatggcttgcccacagtgcaagtttcagaacggaaactcgggtttatttatctacgcacaatccctcagttacttgcctttaagtgacatttctgtgctcttgtctaccaaggacttagcagcttggacctcttttctgacctccactcatgtaaattctcctgtctatcccacatctccacttggatgactcacagacctgctgctcctagagtcctctccatcttagccactagaggtcccagcattttggttgcgaaggtaaaaatcacaagcgaaccttggtgtcatttcactcttctcccctcatctcccacccctacaggcaatccatcaggagatcttgtgggctgtatctttgaaatatatctagaatccggctgtcacctcacgctatccactgctacgaccctggtccgaaccctcctcatctcctccctgtaacattgcaacagtcttctcatttgacttcctgcctacactcttgctcccgctagtgccttctcaatacagtaaagtgttcctttggaaatgtaagaaaggtcatgtcacctggctgctgaagctgtcagaggcgtgtgaaccagagcaactccatcttgaataggagctgggtaaaacaagactgaaacctactgggctacattcccagacagttaaggcattctaagtcacaggatgagataggaggtcggcacaagatacaggtcataaagaccttgctgataaaacagtttacagtaaagaagccagccaaaacccaccaaaaccaagatggccatgagagtgacctctggttttcctcactgctacgtggcgctacccccaccagtgctatgacagtttacagatgccatggcaacgtcaggaagttacccttggtctgaaaaggggaggcatgaataatccatcccttgtttagcatatcatcaagaaataaccataaaaatgggcaaccagcagccctcggggctgctccgtctatggagtagccattctttatgcctttactttcctaataaacttgctttcactttacagacttgccctgaattctttgctgtgagagatccaagaaccctctcttggggtctggatgagaacccctgtctggtaacaaaaccattggtgactttccatatactgcagagaagtcttacaatgggccatgaggccctatgctgccccagaaccctctcgttcactgttttctctgcttggaatatgctgtttccccagttacctcctcctggcttgctctctcacctccttcagccttttctcagctcctaccctctcaatgaggcctttaaggcctccatctatctatctatctatctatcaatcatctatcatctatctatctatcatctatctatcatctatcatctatctatctatcatctatcatctatctatcatctatcatctatctatctatcatctatctatcatctatctatcatctgtctatcatctatctatcatctatctatctatcatctaccatctatctatctatcatctatctatctatcatgtatctatcatctatctatctatctatctatctatctatctatctatctatctatctatatttttttggcggagtcttgctcttttttccaggctggagtgtagtggcgtgatctcagctcactgcagcctctgcctcctgggttcaagcaattctcctgtctcagcctcctaagtagctgggattacaggcatgcaccaccatacccagctaatttttatatttttaatagagacagggtttcaccatgttggccaggctggtgtcgaactcctgaccttgagatccacaagcctcggcctcctaaaagtgctgggattacaggcgtgagccaccgtgcccggcctcagaccactctattttatttcttctccctctcctttccttctttccctgcccctttttctccctagacttattaccctctccttcatttatctttgtattgcctatgtactgccaaggacatgtgaagctacatgagggctgggacttgtttctctcttctttaatcatagctgtcccccagtgcctagtgcagggcccagcacagagtgggcatttgatgaagatttgtggaataaattaatgaccccatcactgtgttgtggcttaagagcataggctctgacatgtgactgcgttaaaatcccaactcactggctggttatgtgacttctggtgagttatttaatatttataagcctccatcttctgtaaaaatatggagactcttactactcacctaatagatgatgatcataaagagcttaacacagtgcttgacacagtaaaaacccaattaatgtttattagggctctcactcctacttccagtgtggttagagacaatgacacttaactggttattatttcactgtttctactgcaattgttcatatcctcaaagaacttgttttttagttaggaaaacaaacttagtacaagtaccaaatgttgcttggcattgatggttgatacagaaggaatttataagatttcgcctttataagattttttatgattctacacaaatggtagagatataaaataaggagaaatgcctcttcatgtaactccaattcgagtgaattcactggactaggaggtatttttgttaacttggggactgttttcttttgtggtagagaagaaattttaaaaattggtcagctcacggccaggttttaaaaataaacattttctaattctttcattttatagtttcacctgacctggtatgccacaaacgctttcatgtttcatttgaggattttagatttagatgttcaggaatccatgcattttttatggtaccatgacaaagtcataatcgtagtatgaaaattatacagatagaataaactcatatactccttttttttccttttgagatggagtctcgctctgctgcctaggctggagtgtcctggtgtgatctcggctcacttgcagcctccatctcctgggttcaatcaattctcctgcctcagcctcttgagtagctgggactacaggcacatgtcaccacagttggctaattttggtatttttagtagagacagggtttcaccatgttggccaggctggccttgtatgcctgacttctggtgatccacccgtttcagcctcccaaagtgctgggattacaggcgtgagccaccgtgcccggcctcatcatatgctattgttatttaagtatatgtatgcacatgcacatatatgcacatatgaactcatgcaactattcagtaagatatgtgaagtttagttactctttaagaacaagaggctttgggataactttaccagtagggaaatttatggccagatagactgcatatatatacatgcatcagctgggacgactcagttattttggcttcatttgaatcagcttcattgacatggtttccatgtcagaagggctttccagctggtatttcagtcgtcttcatctgattgtccatgtggatgagacgattaattgtgcataaagtcagcctttacatcatcatccccaaaactgatttaagcagagtggccaatttagtgactttgtatatagacataaaccaaattagtgatatgattgtccccacatctgccaatgtatttttgaaatcatatttattagaagactagaaatatttatttttaaagcagctttgtaatttttgtggggaatcgtttggtattttaagaacttagttttcattggaatatattttcttccatttgttttatcattcctcaaatatttcttgagtacctattagtgttaaccaccttaaataaggcagatacaatcaccatcctcaaggagttgacaatttaatttttgatttgtattattaacaagagattaatgtattcactatagttaaagaggaattaatctgagtaacaggtcaaatattgaagtgaaaagatgcctgaggatatttttctattctatttttgtgaaatgaggaagggcaaatttgatttttctcttactctaggaatttgatcctagtagggtggaaattaaacctttggagattctaagccttgaagagattatggtgcgacccccccgttcctgtgaaattcaaaataaaattgtgagtttagaaatgccacatgatatatgtgaatgtttaaattaaaatagcttctttctagaatgcagatggctacattttggataagtatttggaagctgatttttgcagagcagttgtgggggctgcctttatttcactagtgttctcaccctctgtttatgccctggatcccagagaacaaaattgttaactggttgtcttgtgttcttaagccgagttgttaactaggctccagtgagaggatgcaggtgacttttctgagacaatgctttgcagcttgtatgagattcttagagaagtctggtcctccctgccccagcctctcccactttccacctgctatgccttcttaaagattaagatcaggttgggtgtggtggctcacgtctgtaatcccagcactttgggaggccgaggcgggtggatcacccgaggtcaggagttctagaccagcctggccaacatggtgaaaccctgtctctactaaaaatacaaaaattagctgggcatggtggcaggtgcctgtaatcccagctactcagggggccgaggcaggagaatcccttgaacccaggaggtggaggttgcattgagccgagattgcgccactgcactccagcctggggaaaaagagcaagacttcatctcaaaaaaaaaaaagttaagatcaatatttcattattttaattgaagttttatttttagataattgttatgttcatatgtagttgtaagaaataatatggagagatattccatgccctttaaccactttccccccaatggtaacatctttcaaatttgtaggacaatataacaaccaatatattgacaatgatacaattaagatatagaacatttcatcccctggaggatccttcacagtcttcttatatagctgcccctcctgcccctgtcctccatatccctaatcccctgacaaccactaatctgttttccttttgtcattttgtcatttcaagaatattatgtaaatggagtccaggcttggtggcttgttcctgtcatcccaggactttgggaggccaaggcagaagggccacttgagcccagaagtttgagactagtctcaggcaacatagtgagactgtctctacaaaaaataaaaatagaaaattagccaggtgtggtggtacacgcctgtagtgctggttatttgagaggttgaagtgggatgatcacttgaccctgggaggttgaggctgcagtgaactctgatcatactactatacttcagcctgaacgacagagcaagatgagactctgtctcagaattttttaaaaagaatattatgtaggctgggcatgatggctcacgcctgtaatcccagcactttgggaggccgaggcgggcagatcacaaggtcgggagttggtgaccagcctgatcaacatggtgaaacactgtctctactaaaaatacaaaaattagtcgggcatggtggagagctactcaggaggctgaggcaggagaatcacttgaacccggatggcggaggttgcagtgagcggcggaggttgcagtgagcggcggaggttgcagtgagctgagatcgtgccattgcactccagcctgggtgacaagagtaagactccgtctcaaaaaaaaaaaaaaaaagaatgtaatgtaaaagaaccatacagtatgtaatgtttggggattggcttttttaaaactcaatataatcccctgagattcgttcaggttgttgtgtgtataagtttgttcttttttcttgctgagtagtgtaccatggtgtgtatgtacaataggtaccgtagtttgtttagacactcacctgtcgaaggacatgggttgtttctggtttttggctatcatgaatgaagctgatatactcatataagcatttgtgtagaggttttcacgtgaacatacgttttcgtgcctctaggcaaatgtccaggagtgcaattgctgggttgtagagtagttgtgtctagtttttaaagaaactgctgaaccgttttctcacagttgtaccattttacattcacattagcaatgtgtgagtgaatcggtttttctgcatctttgccagcatttggtgtcatcactgtgttttatcttagccattcttctagatgtgtcgtggtatcttattgtggttttaatttgcatttttgtaaagggtagcaatgttgagcatcttttcatgttcctgtttgccgtccatgtcagtaaaatgcctggattgcttattttttaacggttgagttttgaaagttcttcatatattctagatatcaatcccttttagataagtggtttgcaagtatcttctttcagtcttgtcttgtcagcctaatatcctgaagatgtttcaattttttttgtaagttttatagttttatcttttatatttaagtccatcacccattttgagtaatttttgtataaggtgtgcatttcaggtcaaggttatgcctatggatgtacagttactccagcacttttttgaaaaggttgtcttttcttcattgagcattttcatgtcttcgcctgggtcctctattctgttccattgttctatatgccttatatatgtacagtgatatgtctatatatgtctatatatgtctgtatttgtatatatagacatatatgtctatatatgtctgtatttgtaactatacaataagtcttgaaatagggcacactgatccctctcagtttattctttttcaaaattgttttagctattctagttcctttaccttttaatataaattttaaaataatgtctataactactagaaatctttctgggatactttctcattttacacacacacacatgcacacacacacacacacgatttaattggtgcattagtttatttttgtggtggaaatagcagaagtttgagactcacactttagtttgggtctcagcttggccgcttattggctctgtagccttagggaaaattgcttactctttctgatctttaccttacttatatatgaaaaatgaggataatatacgaaagatgaatataccaggctcttaatcctgtgcctgactcatagtagaaactcagtgagtcatactattgatttttattttttattggtaagaggttgaaatgatatttttagtttattgtctgtgagaaccatggccttggtggaaattaattcactcatattccagcggaagagtcatgtttttgataataaaaaaaaaggttgcattctatcttcctcttgctgttgtcttctatgatatatttttgtaatattgggtttatttaggagcctccagtgaaatcctatcttagaacataaagacttgaatatattagccaaaatggcagaactttgattataagactggccacagtatttttgcctattaactctaacagctttgtccaaatgtgagatttatatatctggagagataattttagggtagtaaacagcattcaatcataaaatgagaaaaagtattatttattgtccaacataactcaaagagttggtgactactaggtcttttcctagagaggaccatcctgacttaggtgcagagtgttcagctcacagcgtcatgtttcattgcactgattaactttatattatgttaaatttgacattttctctcaagtgatactggtttccaatttcagataagaatgtgtgcttcctctttaaataaagcttatttatttaaaaaagcaaagtaacttaattaatgttaacttacagtgcaggtattatatgaccatgcagtgacaaaaattttggaggtaggtggtggtacacagacgcagtgcaaatccaaagggtgcaggactgaagtgtgggaaactgcagaccagtgtacttattttttaaaataggttttctaaaatttctttacttatagccgccaaatgtcatcattttatataaataacttaaaaattaggtgcttagggaaaaaactcccatgtacccaataccatcctcttacaagactttcctctgatatcaccatgtatatgtcacttctcaccccccaaaaactgtacaaccttattttggttttgcccaagcccttattttttcttcccttcattcggatgtacaatggatactgctgtgattaacagaaagagaaactagcaagtctcgtcaatggactaactcttttatttaatacaagtttccatgtttagaagagcaattcaactcttagaattcattttattatcttaacaccatacattcattcaataaaagaaatttattttccaaacttttaagaaatcatacttctttgaatcccctagcaaaattgactctttatactaatttctcagtttccaggtttctgtctaccaaagtgcagatatgttggctaatctgtgtaagagccactttttgagtctgggttccattccaccaacagtggcctcaaatctggaagttatcacgaacgtagtctagtcttcagcatccattaattcagtgtggtgtaaagtgagattggatagcaacccttcccagagagtttgtcctcttggagaagtcttcactggtttgaatccatcttctccattaactggttgctcttaacgtctgattttctcctggctggctgtctcttggcatccatattccttcctcagaatgacttgccttgactacaacatttaagttgactcctcacatccttctagaacatcacgtaatttaaatccatgtatagaacttaacaatttttctttattttgtgccatttatttctcttctctttctgtttctctgtttctatatacatttttttcttgtttgtttttcttctgtaagagagggaatgaacaagatagccaagtccctggcctcatagaacttactctaagagacataagttttatcttacatatattatttgcttatgtatttttccttccctccttccttctttccttccttccctccctcccttccatatattatttgcttatgtgcttttcctccctccctccctctttccctacccctcccctccctcccctcgtccctccctcccttcctaccttccttccttccttccttttattattaaatatgtgcatgaagtaggtgttattttatgcccattttacaaattatttacatctgacagtaagttctctgaggccagggactttggctatcttgttcactgctgtatccccaggtcgtagtccttagtaaattctcaatatttgttgattgaatggatgaatggttttacttcctgtcagaagaatggaatggtgtattcagatgtaagaagacaaatagaaaactgtgcctatatcccatctcattttgcagtagattctcttctgaacagtagaacattttagaatttctcatagttgtttatatataatctgcaaattcatcatcaggaaatacagcagttaatatcaaaggtttggatttactccattaaaattaaattttatttgaattcttttggagtaggtaatatgtacccttggtacaaaattcgaggatacaaagtttatacaccaaagagtagagtttcctttcatctccatttcctagaatcatctcgttccctttttcagaagcaaccactgtgaatagtctcttccagaatagtctatatataagtagttttgtgtgtgtgtgggcttgtgtgcatgtgtgtgtctgtatgtgcgtttgcatgcaatttatacttatatagtcttctgagccatggatttcttatttagtgatatatcatagttttgaataattcgataggattcccctgtatggatatatcttatatattttatttgattatttatttattcttctttccttccttccttttttttgttaaatatgtgcataaagtaggtgttattttatgcccattttacaaattatgaaactgagatactaagaggttcagtttttggccagctcacacagccttatgtgtaagaacctgggttcgaatccaacgtctatctctttcatggaacattggggtaaatccattttttttcctctgttacaaacagtgctatagaccacccctcatcatacccattggagagcctgaaggtgaataaattcttagaagtgggacttattgttccaagggtattcacatgtagaatttcatgaaagttgctttggaggatgttctccagcagtggacaagaaagcccatttcctctcattttgtcacattaggcctgagagccttttcaacgttttgctagtctacgaggtgagaaatggactcatttgtgtatagatttccctaacttgtggctgagtttcaaggcattttataattagaatcttttcagttgtgcaggcttttttcttttaagagtaatatttactcaactcaaaaagtagttatttagtgagcatttacaaacatataaatcataatttactgtcttaaaacacaccttcctgggaaatggctcaatggaaatcttttacctaaaagataggataaattatatgttaactgttactgtattttttctctaaaaattaaattatgaatttgcacttttgataaatattatgttgaatgaaatgatacatatatacatatacatacgtatatacatacatatattttaaatttaatcagataaatacatattcattaatacagctcagtctatattcttggtcaatcttataaaatgcttcaagtgtgtctagccatgtggcaggagtgggagggtaggggatgatgtgaatctttgtactgagtgctagatataatttctgaatgttgcatttatgttgttcctgggtatctggtatcttgagcctcttttttcctttctctcttatttttattttttgagacggagtcttgctgtgtcaccaggctggagtgcagtggcacgatattggctcatggcaacctccgcctcccgtgttcaagcaattctcctgcctcagcctcccgagtaagtagctgggactacaggcgcatgccaccacgcccagctaatttttgtatttttagtagagatggggtttcaccatgttggccaagatggtctcgatctcttgaccttgtgatccgcccaccacggcctcccaaagtgctgggattacaggcgtgagccaccgcgcccagcctcttttcctttctctctaagctctggctatagcatctacttttcactcttcaaatggtgaactcttttccgtccatgtctttgccatctcacgcttccctttgtcagtaacgttcttccatggcaggctctgacttcattgtcaggtcaaaagtcccctgcccagggaactgtttgaccatccaatcttaggtggtctccttcaggtattctctgtctcactcctttttaattgcatgcagaatcatgcctcacaactgtaatgatttcttaaattattcatttctttgttgcttgtttcttctagtaaccacaagcactgagcgggtctttttctgttttgttcatggctgaattcttagtggctagaatagtatctgagcacacagtaggtgctcaataaatatttaagtgaataattgaaaacctgaaataacatcttgcatgttaaattatgaaagaggcaagtcaccctagcatagaatacatactcatattcatatatgtcaagaaattccaaaaggtttgtggaattctattgtgtgattcttgattcttgtagcctttttgcagtatcgcagctgcagtccccaggacaggccaaactggtagaagagaaacctggccagggtgagaagggcccaattttcacccctgtcctactgccggccatctgctatgagcagaccatgtcactgaactgcttacacctcggcttccgctgcggaagatggagacggaaatgcctgccctccttcccccaccagctgttcacctctgcacaggaagggtgactgtggttgtgaagagcatctcaagtacccgaaacattctattcagtcccaagtgggtctccgcagcatcccaccattggcttcctgagtggaaaatagctgagaaaacttgggatttttctccaaaattaccatgacttgtatcagatcccaaacaactgaatgtattctttactttggattccaagagtgatctcatattagaaaaagcagagtttaatttctggcaaagaatggcaaaaaatgaaagaaagagagaaaaagagagagaaagtgaaagaaagagaaaaagaaagaaagacaaagggagggaaagaaagaaaatggacccactctatctacaacaaaggatatcatatgtatatatgacatatatatcatatatataaattcatatgtcatatatataaattcttttaatttaaccagtattttatattacatatacatggtagagaaagaaaacaatgcaaaaaaggatagaatgaagagaaaaattttctccaaccccagactggtctcacttcctggggttagtcattcttagcagattcttgtatattagtacagagacgtttattagaggcaagcataaaagtgcgtgtacttgtgtgtatatatataatttgttttacacacatgggttcatattatacaatcctattatatactttgtcccttttaacgtatgttgaaacacttttcaaaaatttttatgaatggtcaatattcatttttttctatgtcacaatttctttaatgtagtccactaacaatggacatttttaggtagtttccaggttttgctatataaacaatgaggtagtgacatccttgggtatacactcacgcatacatgatactgtatttctaagataagtcctaaaaaaaagagttactcttacacagttgtgtacatttacacttttgaggaataaaacaaattttcttcaaagaggttgtaccaggtacactctggtaaagagtgcttgtaagagtgtggctttgtgtgtgtgtgtgtgtgtgtgtgtgtgtgtgtgtgttttaggatcagaggtaacagagagaacaactttttaaaggatgttcttggccaggtgcggtggctcacgcctgtaatcccaacactttgggaggccaaggggggtggatcacttgaggtcaggagttcaagatcagcctggctaacatagtgaaaccctgtctctactaaaaataaaaaaagttagccaggagtggtggcgggcgcctgtaatcccagttactcgaaaggctgaggcaggagaattgcttggccccaggaggcggaggttgcagtgagctgagactgagccactgcactccagcctgggcaacagagtgagactctgtccccctccaaaaaaaaaaaaaaaaaaaaaagggatgtgtttgtccctctgctccttggctcaatcccccactccccaaatctgttccctttatggcaaattgattacctaaaaattgaatctaattctatcctacctttcttacaactttcctgtgccttccccttgcacatgaatatctctgaaatgtactcaggacactgtgtgacccagagcctgctgcgttcactcgctgtgtcacaccatactacccaaaatcagtgcatgagcccaacacaccacctttagttcctccagtaggcacgcgctttcctttgtcaccatccttatatgtgctcttcctattgactagcaagttcttccccttactcttagtttctctaattactgctcatcttgaaaatccaggaaatctttttctgacatatcccagtctaaatggtaggggtagccacatgctacatgtggacatgtaaatttaattaaaattaaatataaacttaaaaacccaatccttagtcacactagccacattttaagtgataaatagccacgtacatagtcatcagtggctaccatattggacaacacagatatttttctaggctgaatgcggtggctcagtcctgtaatcccagcactttgggaggctgaggtgggaggattgcttgaggccaggagattgagacaaacctgggcaacataacgagaccctcgtctctacaaaaattaaaaaaactttgttgggtgtggtggctggcacctgtactcctaactactcaggaggctgaggtgggaggatcatttaggcccaggagttggaggctgcagtgagccatgatcatgccactgcactccagcctgggtgacagactgagaccaagtctcaaaataaaaattaaaaattaaatatttctataattgtagagaattctattggacagtgcttccctatattacttcttcataatactcatggctatttaaaaatacttgttttgagagtgttgttttgatgattttagcctcactagcctgtgagcttcacaagggcacagcttgtctcacttcttgctttttcccttatattaaatgttcaataactatctgttgaatgaatgatgagtgaatgaattaaagaattcctctcagctcttcgctttattgttgtactcttaatgttcagtggaccttctgggaaggagctggatgttctacacttttaccgatttccttcaaaactgcagttggataccttagcaagactcattcatctggggatatttagcctttcctattgggtttgacatttcagaatccattgcttaactgtgggaagattgactatgattgagctagacctgtgtggtgagcatggttttaatagtttgcttcccagatctccatccctgtcttaatgactgaagcattccttctaccagctgcttggagtgtgactcagtgacagcttgcagctgagctggtacttagttgggtgtggtggctggcacctttaggcaaggtagcttggcccatggttctcccttgattttacccaatgttctcaaaactaaaatagctcgttagtttaattttcataaaatggaaatttgatagatcatattttatttattatgttgttaaaatgccccactctcctcagtagattcatacactgaaaaaactctttgaagcccttgctgagagtacatcacagctgacctgtgcccgcccttgactccctccaaggtgctgatcctgagagccctccgcagtgaacaccctgcatgcagatctccttcttggaacctgttcctggaaaacccagtctccagcaacctgatatgtaactgcaaatctgcaactctagaccaaccttctaaagagggatttaagacctttttcaagaatctggcttgattttttggcccatggttctccctttattttactcaatgttctcaaaactaaaatggctctttaatttgattttcgtaaaatggaaatttggtagatcatattttatttactatgttgttaaaatgccccaatctcctcagtagattcatacactgaaaaaaaaataaaaaagaaaataccttaactggttcattacattgaatttgcactgggtaaagggttagtaccaactgtgtttttctctgggaggaagaagctccaaacagtaggcaagatttctgtgccttaaagaaatgttactttagcttttcttgcttcaatggcctaatagcagctcttcctgagtacctgtttatatcaccataaaaagggaatgctggttatagctcgttgtagccagagggaagagagatgcttttgtctgtgggattgattccactttaatcctgaacagggtatttggccatcaagtagcctactgactgaggggagaaaattttattttaattttttctcataactgtcaatttcattgggcagctatacatttctggggaatatttgtataatagatggaattatagaagttacgctcacaagcagatattttgagattgattaaagatttagaaagaagtggctgggcgcagtggctcacgcctgtaatcccagcactttgggaggccaaggtgggctgatcacctgaggtcaggagttcaagaccagcctggccaacgtagtgaaaccccatctctacaataattagccgggtatgatggtgggtgcctgtaattccagctacttgggaggctgaggtggaagaatggcttgaacccgggagtcggaggttgcagtgagccgagatcatgccattgcatttcagcctgggcaacagagtgagacgccatctcaaagaaaaaaaaaattagaaagaagtacatttcccaggcttctggggtacctctaagtgagactgacaattttacacataggactgcaaaagttctttatcatacagaagtaaatttctgaagttaaattcattttagagagacaggcacaggatcaagcgtgtgtgaaggagattggacgttttattggcattaaattttgaagcttagttttcagacacagatgaagttgaatattataaagatgaagaaaagaccttttgttagactaattgctctaatattaactcaagaatgggtcaactttctgcaagttaaggtcatgcattctagggaattcgatcttgattttaaataggtgtcatgaatacaaagttagaaataccagtttctccttttatcttacaaaggtgtaggctgagaaaggcactggcatattagctggagaaagactaacaggaagaatataagggttattaaaaatgtttcctactattctctgatctagagaggcatgcaagtgaagatcatattaaatttaagggagagcatattggatgaataacatcagttcaagttttgaaatccttgagaagaaaaaaagagctgagcacggtggctcatgcctgtaatcccagcactttgggaggccaaggcgggtggatcaggaggtcaggagatcgagaccatcctggccaacacggtgaaaccccgtctctactaaaaatacaaaaattagctgggcgtggtggcaggcgcctgtagtcccagctacttgggaggctgaggcaggagaatggcatgaacacgggaggtggagcttgcagtgagccgagatcgcaccactgcactccaggctgggcgacagagcaagactccgtctcaaaaaaaaaaaaaaaaaaaaagaaaaaaatgaaccagcataaatcgacatttagagtacagagagattcgatattaacttctccaattctgtactttacagatggggaaactgagggcaagtgagatttcatgatttctctaagattctggcctcttagtaaccacatttttaagctgtaaaacatataacctggtggctcagagcataaacctctgtgggaggcggtggacagacagatctttctataccatggctacattgtgattctggacacgttacttaacctctcctaatttctgtttcctcagttaaacaatatcaataattatggctcctgaatcacagggatgtcttgaacattaaataaaatagttgctgtagagccttttcataacccattagctactttgaaaagcagattctgaagttgcggaccatggctggttgttcacctggattcctgagccctggaacataatgggtccttaatgaatcaatgaatgaatattacaaacccgaatgtagagacactgcttcatgcattatgcaggctaaaattgtcatccatttaaaatgccaatttaaacagtcttacatttgaacaacatgcagctactttacttttggaatatctagttctgaactcttgtaattgaagtgtaaacttgtgtaacataagcataggtaacatcttctaaatggaggagtggaaggttaaaaggtggcataatctattataagattaaaaacatcatccactaatgagtttgaggttttcatgttttgctctattctatgttactccatttgctatatcttgtagaaaattgtcctgacatattgtggagtaggaggaaaaaagtgagtgtcagaaaaaaaggaattctggcacaaatgtgtccacatatatatttctgcatgcttgtaggaaaatgaagaaaggaaagacttctaatagtaactatgataaaggaactgtgttttccttgaagtgggtggaagtgagttgagtggtcatttgcttttgtatttttgtgcttttgtatttatttatctgcttatctagtaatctatattatttattcatttatacagtgtacattcttaccttttgtaatacaatgaaaacaatattatgaccctaattgaccagagacaaggaacagtggttggaaggtgatttcttttagtgaatctatttaagttaaaatattttgaaaatcccttctctatgtcgtaagggtacatactcagatattgtattgtgttgtcttaaaagacatcatccagtaacatcactaaatttttctcttatgtatcttttgggaccttggagagcaacagatcatgttcatccatatgtaaattaatccatttgtcactttcactgtatattttgtgttgcaggagaattagtgaggcggtgttactttctgcaccttagcataattattgtgtcattgtcagagacagtgtaaatcttgacatttacaatggaatatattttcctttagtgaccattactaatgttgttttaattaaaagcactgatagctcagggttttcagcaacatctctcccattgtcataaattagaggattaaattgtcttatttcatatcctactatgtttaccaagggaacaatagcaattctagtttgtcaaaggagagaaagatgggatttggattaatctgctcatatatttaagaattgcagcttgggtcagtgagagactgtggtcagattgagcaattgggaagaggaagttgggtcatgttttcagagtaaatcaagctgatttggaaataaaatgtaccttgataatttgtttacttttaatttttgtcacactgcaagtgttggtgtttgctgttacgtagcaaaattacattcaatatttaagggccacgatcctggtgaactgtataaagagtatgttttgtttaggacaataatagaaagtggggaaggagaaaatcatgttctattgagcttattttattcacaagctagtatttttgcagattttcactctttagccaaaaaagactttttttctcccctgtggaagaataaagccatctaactgtcatttaagggcagtcacttgtaatgcaaatatagaaatatggaaatattgacagatatgagctatatgcatcagcattctgagtttgaaattaataataatgggacactgactaatagctggttctgtacagcactatatgcttgtacagggtaaacagttactaccggtgaccccaatttcatggatgaagaagttggggatcagagcactgtcaaagcttgtcctaggccacatggtcaagagagatgaacctagaatttgaacttgggaatgtttaattaattcttaatttaactcttgggataaggtttaaacattgctgttactcccttgggagagagaggaggattcttacatgccatgctagattttctgtattcatcctttttaattctcttttcactaatcctttaaggcatgtgttattaacttcatttaagttttcaggaaactcaggctccaagaatttggaagttgtccagagttacagacagggtaaaggattggatagagtttgaatttgtatttgtggtaccggtgtccatgctagttctgttacctatacctaccctgatacagacagacctagaagtctcatcagaatgctggatggatgaggaagtgtgggtgaatcaggcatcacccacaaagactgcgtctgtgaatgttctgctaatatggcagttattgtactgctatgcagccaataatagtggaattattactgagtgggaggctctgtgtttcacttatgttgtctctatggccaatttaaaaacatctctgtgtacattagtaaggttaagacacagattaatcaatcacatttacacaaacaagatgctcacatccaccgtttatggttaatcacattacttgaccaagtagcaatacagcataatggttaaatctgggattcaatggaatctcagtctattctgacgtgttgtcactgaactcattttacaggtaaagaagtttgggcttggagggatgcacaattcactgaagattgctcacctcggaacaggaggagcgaggggctcagatccatgccttctctgcttaatctctgctatattgatgcatagtcctgtagccaatccttgtaattttaatattagtaacagggctaggtgaataccccaggttaccacttgaagattgtctcttttagatatgttctcaaactgctttatttacctgatcctctgcaaatgaggagaaacttcaagaagttgctaaatgaaaaagttaaaaagtggattttaaggaaactaaagtgaatgccatacaactgacttgaaaaaacaaaggaagaagatgcagcaggggtttgagcactctttgtgggtttatttctttaggaaaaaagactaaagctaaattccatagttagaatctttagaagaatcttaataaccaagatcatcaccaatataataaactaaatttgaacactggacacgaaaaaaatagggaaggccacatagatgtcaataaacatttttcttctttttattgtcattgttttgctgaattttataatattttccttttaataacctaatatgaacctactgccccaatacaaaattatcattttggtatatttcttcctatttttttctcctaaacattgaaagtttcacatggttacaaggatcacatatttacaatgtcatacccagtgtatttttttttttttttttttttgagatggagtttcactcttgttgcccgggctggagtatagtggcacgatctcggctcaccacaacctctacctcccggattcaagcgattctcctgcctcagcctcctgagtagctgggattacgggcatgtgccaccatgcccggctaattttgtatttttagtagtaatggggtttctccatgttggtcaggctggtctcgaactcccaacctcaggtgattcgcctgtctcagcctcccaaagtgctgggattacaggcgtgagccaaccgcacccggccgtgtatatttttaaatgtattttgttatgttgtaaatacttccccaaatcatcattttaactttaaaactgtgagtttgaagtctatgatgactaggtacgtagtttacttgatagtaaaaacatttaagttgtttttaactaaaagtgacactcaggcttgtaactttgaccatgttttagattgtttccttggaatggatgtgataatgaagttagagagtttgaatatttttatggctcttaatacatattacaaattaacttccctatgggctacgatttacattacagccagtttttaaggctagaaatctggcagtggggctgggcgcggtggctcacgcctgtaatcccagcactttgggaggccaaggcgggtggatcaggaggtcaggagatcgagactatcctggctaacacgatgaaaccccatctctactaaaaatacaaaaaattagctgggcgtggtggtgggcgcctgtagacccagctactcaggaggttgaggcaggagaatggcatgaacccgggaggcggagcttgcagtgagccgagattgcggcactgcactctagcctgggtgacagagcgagactcactctcaaaaaaaaaaaaaaaaaaaaaaaaaagaagaaaaggaaaaagaaaaaataaatctggcagtgggccacagaggtagctgatgttctatttgttttgcagtcatccatgcactggttataggatgtggctcagaatcccaaactaagtaataaaacaaagtcatatgtagagtccaatgtgtatatttcgacccttagcatgaagatacatacagtgttttgtgacttccataatttagagtctctgtaaattctttaactcatttaggtatttcattgtaaccaaagaaaacttaaatatgacttagcaatggtgagctgtgctgtgttcagcacattaataaatgccaccaaatgatttcaatgaacatttttagttcatttgttctgaaactagaaagaagacacttaatattggtttctgacttttgagcaaattttatttcctcggttaatactctgaatgtaatttacttgctatgcttgctaacaatggaaagcattgaatttggttttgtggcttatgctctttatcaattatatgccattgataaagttgtctacctccactgcaatactgggaaggttaataaagagagagcgtgctcatttgagtcagttctgtactgacagaacgtgcatctctggctatttgtggtatgtatatggcctatcagaaactacaataataattgagaccaatttaataaccattataccagtgacctagtcattcttgtagtttggtatatttaatgcatttacattcatttgtggatccatgtagaccacacattcattcatctattcaacgacttttcattgagtatcttctatgtataaggtaattctttgtaccaggagataactggtgaatcagagtaaaccagaaaatagatgaatggttagtatcgttgctctgctatgcactcatttaatgagtcattttaggattactatagcaacactattaaaaattttacagtcattcacatggctcgaaattcaagaattaaaagttcaaaagggtatacaggaaagattctctcacccgtctacccagagccaccaattctcctcaagagggcaatcaattttatagtttcttctctttcagccatatttcaagcatatatcagcatatacatatataggtatatttgtatatatgtcatgtgtgtgtacaccgcattttttccccacaaaaatagtatatatgcgctatccattattctctaactaccttgtgtcacttaataaatttcaaaaagctcttttaattattacttaaagattggccacatttcttttttattcctgtcagcatggtatttcattgtgttagatattctattaattttgaattcttgttgattatattttatcattattataaatagtactacaatgcatatctttacataagttgctttcacttagatttttttccttaataactagaattgcaaattaaagtggagcaagtttctatggctattgaaaaatattcttcaagttataatctggaaatattgatctacagtatgcacagaatactatgttttgtgtaagaagtgggggtaagactgtatatttgtatttgtatatatgtgcttgtgtttgcacaaggaaataatgcatttagttgtaagtcagtgactgggtctggtgcaggggtaggaaatagaggtggaaagcaggctaattaatatatacctctgaaataattttgaattttgatccatgtgaatgtattactttttcaaaaaattaatattaactataaaattaaaaatcaaagtatatttctttattattctgccattttcaatatatgagtacacatggatttttttaaaaaataattttatagactggggtattggaaaagtagtataatcaggtggaatgcaggaagtcacaaagtggacctggccttggaacgtgttcattggttggatctaattcatagttttgttgcttttattcttgattttttttaaaaaaatggaaaagtaatgaagtgtttcccaaatgtcatttattcatcctcttcacagtctttgtcatatgtgtgaatagttttcactgttattcacttactacttcactaaaataatttatttttcttttttttggatttttatagcagtgccattaacaaaaagccaatattattttccatgagtagaagctgcataaattggagctccttcagagaagaagaaccacaggaagatatttaattagaggtttggtttggggattttggggattatttcttttgcacttgtaggaacctggtttgcagggtctaggtgctcctagtgctgaaacctgacatcagaagtgaagatggacataaaatgaggtgattgaagacaaactgcagcctatgaagatgggctagaagcatctgattttcaaagcccccaatccaccaacttcaaagatggggtcatcttgtaaggagaagagctaagcaggtgcttggccgaggtttctgaggagctgaaggaggatctggaagcagttaaagtagttgcagcccagctgttgtccatgccaccctggtgaaccagcacatcagagacagtgcgcatgagtgagagtagtgtgcactgccctgagcttccagcggggaagctcaccttcaccttcccacatcctacaatatggctaactttgtccaccttccagatctggctaccctcaatatggctaccctaaccttcccacatcctacaataaggctacctttgtccaccttctagatctcgcggtccaccctaattctgacctgtgcaaggaaagcaattctttgaaaaatagttctagtttaactgagctgatataatacaaatccactgcaaaagataactaaaaataaatacaatgaaaatgaagcaatattagacacattgttcaatgaaggcactgagcctgaggctttctcttgttgaaaagcaagatctggaagttttagggggggtttaaaattattgttacccactgaatggaacttctccttgactcactcagaaggactgacatgaaaaatgagtatctttctcaacgtgaggttctgtgccatttgttgcctctcccaatacagtttcttcttctctctcagttgaaggaggatacaggggtgattggagatggtgtcatgctatccttggccttatctgcatttctgcttcttaaacgaatgaaatgatgaactagatgatcatatggtagacagaagggaaaagagtgattttatttatctgtagacagagctctttgaagacctgtcatgggcacacatcaaagacaaatgttgtgtgcatcaaaggcttgttggcttttgaggtggtaggtgagaaaaaagcatagtttggctcatatctgtgaaaggtgttttggccatctcagtacccattggagaattttgtgtagctaaagagacctcatgactttgagtttctggcagacctactaactgtggatggaagcaccaggggctggcttctcactgagatgcttctattcatatctgtcccggtggcattccccaagtggtgtctcctggatcccctccatccttgaatctgtgcctcatcccacaccccactgctcaggtttgaattggttctgcagtttaccagtggtttgaccttggggaagtcacttcaagtccctgcaatgtagggatattataggctccaaatcactgggtagttgtgaggattaaatcaggggttggtaaattatgatccaaaggccaaaatgcccctctctcctgcttgtttttgcaaataaactttcacgggaacacagccatacccattagtttacatgtaatctgtggctgtttgcacacctcgcagcagcaagttgagcagttgtggcagagaccctgtggctcacaaagcctaaggtatttactgaaaaagttagctgacccctggattaaacaagtgaatacctataaattcaattcccaaatgtttatgggctgctatattgaggtattgagcctataagagtgaagaaacacagacaaaagtccctgccctcatggagcttacagttcaaggagggaaacagataataaagcaaaaagaaaacccccaaaatgtaaaatatatgtaaagtgatttagtggtatggagggggaaatgcaggaaataaagagaaagagagagaaagagagagtatagggggtgggagatgcaattttaattagggtcattagggaaccttcactgaaagagtaacatgacatcagagccatgtggacacatgaagaagagggttccaggcagaaggaacagccagcataaaaggacaagagccttgaggtgagagtgtgtgtctgagtgttcagagaccaacagggaggccagtgtactcaaagcccgctgggtggtggagaggagagacctgaagatgctttcagtgagctgggacttccttggccacagacaggatgttgcattttgttcttcatgggaaggaaggcactactggcttgtgagctggggatagtgtgctttggattgcattttaaaaacatcactctggctgcagatggcggccatgagtggcagcttgaactggggttagagctgtagaggtggtgagaagcagcccagctctgcctatattataaaaacagagagttgagaattccctgacagatttggagtgcatcaggaaagaaagagagaagtcaggaagactttgatactttgacttggtcaactgcaggaatgggattaccattaactgcaatgtggaagaaacagagatagggcaagttttggggtcaaggttaagagtcagaatcaaagatgttaattttgagctgccccttagacatcggggtgggattgtttagaacaatgtctgccatgtagtaaattttcaatacatgttggctgtaccatgattggcattattactgaaggcttactcaatacatgccattttatttctttaaattttattttaatgtattttattgagacagggtctttctctgtcacccaggctggagttcagtggcactatcatggctcaccgcagcctccacctcctgggttctagcgatctcccacgtcagcctcccaggtagctgggactacaggtaggtgccaccacgcctggctaatttttacaaacttcttgtagaggcggagtctctccggttgcccaggctggtcttgaactcctgggctcaagtgatcctccctccttggcctctcaaagtgctgggattagaggtatcagccactgctcctggcttgataaatatttttgaatacctgctatgtggcagcactgtagaaacaatgactgagttctggtttctgtcttcatggggagatagagaaacacctggcgatcatacgcgaggtcactgctctgaagcagtgcagctttcggggaatcacagactctgcctgggtcctaaacatgatttctttgaagttagccatttacagtttatttaatctatctatatccttgtcctcatctataaaataggaacatcaactttatttggataatgcatctaagtgctcagtaaacaccagctgttagtataacataaaggattctataaaatcagtcatttgtttcacaaatattttttgagtacttattaccacgttacaggagtttggaaagtacttgggatacagtatgaacaagaacaccctgcctttaaggagatcaagggggactgagtggggataaataaatgaaaatgataggtcgaggtaataactacatagaaaataaaaatatatatgttctacagcagcactgtccaatggagacataattagaggccacatgtgagccacatgtacaatttaacatttcctagaagccacattaaaaaataaagtgaaataggtgaaattaactttaatgctatattttatttaatcaaatatatccaagacattatcatcttaacccataaaaatataaaaattattaatcaaacattctacattatcttttctactaaggcatcaaaaatccggtattttacgccctgtggcacaattcttttcagcctagccacatttcaagtgcttgaaagctacatgttgctgatggtggttgtcacattgcacagtgcaggtgttgaatgatgaggtgtctgctttagactgaatggtcaggggaagatgagatcttatgacaggaaggacccagccatgagaaatttgaaggaagccctcatgggtacaagatagaactaggcaaagaacctagggcaggaatgggcttcttatgataattaaaagcagatcaacaaagccactggggccacaccctagagaagaaaaaggatagtcatatcacaatggagaattatttggggccagttctggtaggagtttaaagagttcatgatgaggagagtggatgcattctaagtgtattgagaacccgtggaggatttaagaagggaagtgatatgattaagctatcactgactgctatgcagagagtagaatgttaacagcaagcatgtaagcacaaagccatgagaaatacatccagtctagctttagaagctcgaagatggcttggaggaaatgtgtcctaaagaggacttacccatgccaaagttgggtttagacggggttttcagagtcagggggtgttttagacccatagacttcaaacttttctgattatacaatgcatgcaattaaaagtagaactcccagtatttgtataggtgtttatttcctatacatgtgcactgctatcaaaccatgtattgcagtgttattattttactacaatttttcttatttatcccacctccccaccacacataaataaaagtttcattatttttttcttttatcccactgcattttactttggaaatgactgttccaggcagacagaattgcacaggcaaagggctggggatataatgatgcttgtcacacatacgagatggcaggagcttatatctggagggtggaaataaggaagtgggtaaggtgatggtgagggagtgttgagaactgtgcaggggctacctcatgaggagcttgcaggctttgggaatgttttaatttttatatttatttatttatttattttgacacagagtttcgctctttgttgcccaggctggagtgcaatggcgcgatcttggctcactgcaaccagtgcctactgggttcaagtgattctcctgtctcagcctcccaagtagctgggattacaggcatgtgccatcacacctggctgattttgtatttttagtagagacggggtttctccatgttggccaggctggtcttgaactcctgacctcaggtgatctgcaccccttggcctcccagagtgttgggattacaggtgtgagccactgtgcccagctatttatttatttttttagacagagtctcgctgtctcacccaggcttaagtgcagtgacacgatctcggctcactgcaacctccgtctccctggttcatgcgattctcctgtttcagcctcccaagtagctgggattacaggcacacgccaccccacccagctagtttttgtattttggtagagacagggttttgccatgttggccaggccggtcttgaactcccgacctcaagtgatccacttgccttggcctcccaaagtgctgggattacaggtgtgagccaccgcacccggcctaatttttaattttaattttaatttttatgttttgagctggagtcttgtgctgtcacccagcaagggtacagtagtgcagtcatggctcactgtagccttaaactgctgggctccagcgattttcccatctcagcctccccagtagatgggactacagtcgtgcaccactgcacctggttaattttacaatttttttgtagagacaggggtcttgcttttttggcccaggttggtcttgaacaccttgcctcaagcaatcctctcacctccgcctcccaaaatgctgggattatagatctaagccactatgcccagttgggaaagattttaatatattttcatatatgatgggaggccattgctgggttttaagcaagagatggtgtctagtattttggtaagcattttacattcattttctcatcttatttatctttaacatctgcaaagcaggaacaaatgaaagggtttcaagcaagatagtgatgagagcatttattattgagtagaattttctcctttctctcctctccacttctctaattaaattctgtaagttaaaactcatgctggtaaagaccaagctttaatcacagagagaaatttcattctaggacagactgcttgcctgctcacactgacccctgcctccacctgtcccgaaaactaatgctgcctgggagctagtcgactaaaaaccacccagttacactgcgatctggaaatgtccattggaggctttcagacggcagtacatatgcttttaaaaatactggggtggggggatggggggagggagagcattagggaaaatagctcatacatgctgggcttactacctaggtgatgggttgatgggtgtagcaaaccaccatggcacacgcttacctatgtaacaaacctgcacatcctgcacatgtaccgcagaactaaaaataagaattaaaaaaataccgacttacatttttttgtttgcattctttattcatatgggaaatctgctgctataataaacaaagctattcatttttcttactgtaggttctcctttctcccttccttggttaagcaaactcaccctagaaggggctgtttatccacaaatcctcagtaattaagagtcacacttgacacttaattttaaaatatatgtacactaaatagcataacattttaaaaacagctgattttaatctttgtacttgtacagtttttagctttttattagatttaaagagagaagaaaaccattttatgttaaatttttagtcactgttaagagaggtgttttattgccaatctctttaaaccacagccaggcatgtatactcagaaaattactttacataataatgactaactggaaaaactgataatattattgaaacattgagagaaatgttgtggggggttttaaaataaattcaacataggatcccatggcctagttttggaaagaacaactctccttcccgctctactggaatgcagttggcccagcccccgctgccttgcttgagttcccttacattgccctgggttgtgttggcttggaaggctgcctggccttgtgtgcttgctgggctgaaattactctccctgctcggctattgggagcacaccccatctacaaatttgtccacttgatttcactcctgcgcctctggagttgaaagagtagctcattaaaatgggaatgagccagagggctccgcagggctggtttgatcaacactgtccgtggtgctcagcaggacaacacagagtagcatttgcatctgaggacagtcaaacccacatcaccaggcttcaaccacaactgcagtaatagctaccatttattattttctacgggctcaatgctgagctaaacactttcatgtgcttttattaagctttaccttgacttcatgagctaggtagcatcactttggagaatgagggtgctttaagtcacacacttccacttccagggtatcaatgctgcattgaccacttcctagctttgtgactttgggcaagtggactaactcctggatgctcacatttacccatctttaaaatggggatatactacatagagctgttgtatcaagcaggataccatagtgcctgatacatagtaggtgctcaataaaagttattgacattgctttgctaataggtacttaggtttaggaaggtgaagtcacctgcttaacttcctcatgctcataaaacagatattttctctggccttaccaaaagatgaaccaaagaaagtaaagtagaaaaggtggtagatagctgataattttttaaaatgtgtttctagtatgctagtttgttatacatagtttcttggagaatttaaaagccgttggcttaatgttcattcactgtcaactaacactaggtaaacattcatagctgcaatttatattggtgatggtgcaaatggcagaaaattcgatccaaactaagcaaagaggaaggtattggcttatcagattcaaaggcccagggatgcacctgacttgaggaatggctcattgctggagtcagtgacattgatgggacctgattctctcttggcttttctttccttcattctcatacagtctcttcttggggttgcaagatgactgcagcagttttaaaactcatatcctttcagattctttcccaatgagggagagaatgtacttctttttcctaacttttgaagaagcatttttaagcctggccttcattggccaaaattaggtcccatgtccaccattgaatgaatcttgtggcttagatgatggggtaggaggattgggtcaggccattcagtttgctctctgttgaacctgtggctgtgtctaccttatacacaccaacagagcagaggtggcttcaccaaggaaatgtggagtgctgtttacctgtgtgaaagaacagatgccccatgacacaagcagtagaaatccactagactactgaatacataatgagtagactcacctatgaatgtggagacatctgcttcctttcttttcctatttcctgaaagttttctttctgcaaaatatacctattcagagaataaagaaaaaataaagaattatccttctcaagggaaaagagccatccataatgcagtcttttagattttctgctggtcccataaatattgcaatacattgtttatactcagaccatcatgtcatttatgatgattagcaggaactcaaaaggcattgactgacctggacagttacaatttgttaaaaatatgcattgtgatttttttctcatattgggggtcaacttaagaagttgactttgtcatttatacacagtttatttatccatggtaacagcagcctacagtgggcctaattataggcccactaattatttgcctttgggacagtgagggtgataaaacatgggttttgataagaaagtttggcatttttagtagtattcttttatgttaaaatgttgtactttgctttactcttatgaaaacactttttgttaaaaaaagaaatttgctatgaaggataaactccatttcaatggtgtatattagtcttcggcctcagtcactacatagctgctgtaatgtggttctggggaagcccatcaccagagcacgtggcagctgggagtggaagaagggtgcaaagagtaaaggaagcagagaggagcaagagcaaacatttgtgggggcctaagcatgtttcagaaatgttgcgtcaactcttatttcctcataacaaactcatgatgtaggtttgttttgtagacactgctgggcatctcactgatggctttttcccccttatacaccagcagatcctcgggttgtttggggtcatgtgatacccagctaaaataactacatttcccagctcctcagctcatgctcagtcatctgatagggcttctggtgaagccctttaataaggggcagaatatgttggcaacttgtcttttgcctcttcctagagtgtacccagggatgctcctggagattgagcagtcatcttggaactatgggctaataagacatagtaattagttttctgttacattcagctgaatgcaattcctaattagaaaaacattgttcatagtagttaattgagctttttagtgagaattaagcagtcactttttatattcagcctgggacccagcttcaccagtttttccaatttttaaaaacaaaattggaaatcagcttttacgtaaaattttgtcttaaaatattggtttgttttgtttgcttgtttgctttaaatactctgagcaaaaaaaaaaaaaaaaaaaaaaaaaacccaacatccatttgtaggccaccattttgccaccactggtcatttattgctttcatttattcacttaacaaaccatggagatgttgaaagtaattcagaagtgtgtcactaaaggactagagaataagactgtcaaaggaagatttttaaaacgtgagattattaaagttgaagaagagtgggctgtgcattggctaattaatagttttcaaatatatgaagggattttagacagctgatgttgactatcctttgtcttctgcagaatagggtaaaaaagaaaacacaattatttttcaggagaagaattttgaataaatgaataaatacgagaacagttttctaggtgctgagaattattaaattttagcagaggaaggggctgtgggcctttattttgtaaagtttttttgaattaggacagattatcagagagaaatttgtgtggttttggtgaccttggaattacctcccatctggaattttgagattcagattacttattctgaagggattcaatagctgcaccctactttttgtactcattgtgcactgcaggatgcaattcaagggaatagctgggaagtccgaagtggttttggattctgatttcttgacaaagtcgttggtacctcctaagccatcactgctccagttaagggacatgtggctctgaatacagggctccttttggagtctcccctgggatgtcacatcttctggtttgacagatgccaacttgacatttttctcctctttcattattctgaataattctgcaaagccctcatcctcccagcactatatgtactaagcgtgagaatttgccttttccacttgtcaaaatatgttaagagtttgtaggagtccaaggtcatgcttcagttttcagacagaagaggaattccaagaattccagaaatggcaggagatctcttttcttgctaactttggttcaggtgtgctttaaaaattcaacatttaatgggctgttaaatattccttcctcttgctgaggaacttcaagttattttaatatatattgagggttgcctagtaactacagctttactagcttactgagagaagttttactctttttttttttttttttttttggctacagaaaggcaatcaggggagagcaattggagatggcttcatggagaaaaggaggaggaatatggtgtctctttgggacttgaggtcatgtaaaactgatgttagaagaaacatgtaggtccctgtctgaggcaattagaagcaagttcaaggaaatcatcttccacttaatctttgcttatgctgaatagtttgagtgaatgatgtcacagggagttgaattaccaaaatgctcacctgccttcccccatttctccctcccttcctccttccatccttctttccgtccctcccttcttctcttcttccttccttcatttctttctttttctttttttaaagaaaataaataatcttactgttctaaggacctaacttcaggctctgagatatgtattagttataattttttttttaaggtgaaatttcactcttgttgcccaggctggagtgcaatggtgcgatcttgactcactgtaatctccgcctcccaggttcaagcaattctcctgccttagcctcccgagtagctgggattacaggcgcccgccaccacacccagctaaattttcctatttttagtagatacgggggtttcactatgttggccaggctggtcttgaattcctgacctcaggccatccaacccgcctcggcctcccaaagtgctggattacaggcatgagccaccgtgcccggccagttatgactgattttataactgaattatttctcttcttaattctgcttcttataacctagtgggaaacaaccaatgaacaagatgaaaatctaattgaaaccaccatttattttcctgagtcagtccaggtttgtaactaatttgtagattatctcaatgttgaactttgctgagttttgtgaggacatggagattttataagccaaggacgtagatatctctgggaggacattttcttgtctaccacagtacatcttgttgctattcattactaaatccttactttgagatcttaaaacagggaacatcctaccaatgtcagttcagatgcaaatttgtttgagcttgtgttctctcttgattaatacatttcagagagttaatttgtttaccaagaagaaaatcatttttttgtattggttaccaatgaaaagtggcatagtccaactaaagagagtacgcaaagatgggttttgtacctcctggggagatgctagctacccagaaacgtagactaataataaataagattactggccatcagccggttttgccaggtgatggcatgaatgttcaacgtatgcttttatgcaattctgtgatgctgcagtaattggggaaggcattagctgacagcagtccctgattcgatccatctctttctggctctggttacttctgactcataaagtggacagggaaagcaaaaggagaaatgtgtataatagtaaaatgttcacttgcagtgtgtcgtgtacccttaggctaaagatagacaagcatctcagaatctgggtcccatattctcatttccccgtatataattcctcaagtgggcagaagtgtatctggttatataatccagttatagtgggaagagaaactatgtttaaatatgcatagggagaaatcattgtcagctacagatacatatttaattacagtaagaaaaaaatatgaatttgaaaatgatgtgggggttgttttattcaaattggggttctaattcagtctaaaaaaaactgagcagtgttgttgaaatgattgcctcttagcagatagtatgtgtatatgtattctgtagctctgcctgacttaaagaggcttttacaacagatggaaaggcatagtgagagaagaaaataatttaaatttaaccctttgtaaatactctagctttaagggcattttgccttccttgggttgtgggtagagtatgctatcatatctgaactgtgtgttccccttataacatcctgtgctaagtgctcatgctccccaaaattcaggtccctctaaatgatggtgatgggaatccaactctgacagtttgaccccagatgtgtgctttacactgacccaagatatagcctagcaatatacgatgtaaaaattaacattaactcattgactcaactactaaataggtactaaaagtcaagctttttgctagacctgagaatatagaagttgaatttagctcttgccctcaaagaatttacagtctagggggtagacctgctcctaaactagcaattaagtctttaatatctatgcatttattctgcaacactgaatttaaaacaggtttttctcagaagcaattttgtttctacaaactgtctcctgggctcagagtccctcgtgttaccgagttccttgaaagccatgcttattgcttttaaatgcaacatatctcgggttgatgtttttgttctatagtaatcctttcattcccttttttatttgagagtttgaaaataatgttgtgtgcaaaatccctaaggaattagcagagctgatttgattcaaatataacttcccaccctgtgtgcagtgtcatgcccctgagtttcatatacatgagttctaaccccttcttgtctcttgccaagatttatcagcaattggttaacctatttgggttagcttagcttcattttcttcatctgaataatcggcataggtatggattctcacaagaatcagatgctattttacagaagttttataacaagcttaaattttgaaataaaactaaagcatcatgatgtaggcaacatgggataaaattgtagcctaaccactgtgtatgctggagtcacgcaatttgaattatacagtctttgaggtttcatatgttttagtttaaaggctgactttgccatttgtaagctgggtggctttgggtgatttgtttaatatttctctgttagtttccttattagtaaaataaaataataatgttttcttttataggctttataataacgatgaaggtgctggtggagatgataaagtgatgatgatagtgttggtggtgatgatagtgtctctgcagtggctggaatatttatgcaccccccgctccaaatttaaatgtggaaatcctaacccccaaggatttggtattaggagatggggcctttgggaggtgatgaagtcatgaatcacaaataggagtagtgcttttacaaaacagacccccaggtagtcatttatcttttcatcatgtgagaacacagctaaaagattgctgtctatggaccatgaaatgggccctcaccagatgctgaacttgccagtgccttgatcttggacttctcagcctccagagatgagcaataaatttctgttgtttataagccatccagtttatgatgttttgttatagaggcccaaatggactcagccttacagttattaagcccttccttcttgccagtactgtgctgagtactctacatgcatcacctcatagcattctcagttgccccctctggtagctactatcataatccctattttcttttttcttttttattatactttaagttttagggtacatgtgcacaacatgcaagtttgttacatatatatacatgtgccatgttggtgtgctgcacccattaactcgtcatttaacattaggtatatctcctaacgttatccctcccccttccccccaccccacaacaggacccagtgtgtgatgttccccttcctgtgtccatgtgttctcattgttcaattcccacctatgagtgagaacatgtggtgtttggttttttgtccttgtgatagtttgctgagaatgatggtttccagcttcatccatgtccctacaagggacatgaactcatccttttttatggctgcatagtattccatggtgtatatgtgccacattttcttaatccagtctatcattgttggacatttgggttggttccaagtctttgctattgtgaatagtgccgcaataaacatacatgtgcatgtgtctttatagcagcatgctttataatcctttgggtatatacccaataatgggatggctgagtcaaatggtatttctagttctagatccctgaggaatcgccacactgacttccacaatggttgaactagtttacagaaccaccaacaaactaccatcagagtgaagaggcaacctacaaaatgggagaaaatttttgcaatctactcatgtaatgaagggctaatatccagaatctacaatgaactcaaacaaatttacaagaaaaaacaaacaactccatcaacaagtgggcgaaggttatgaacagacacttctgaaaggaaggcatttatgcagccaaaagacacatgaaaaaatgctcatcatcactggccgtcagagagatgcaaatcaaaaccacaatgagataccatctcacaccagttagaatggcgatcattaaaaagtcaggaaacaacaggtgctggagaggatgtgaagaaataggagcacttttacataatccctattttcaatgagaagttgaggcttgtggagttgcttaacatgtccaggatcacctaatgctccaacataagtttgattaactttaatacttttaatatatattgtgtctcagttaatgttttattgtgctctagtagtttaaactgcgttatcttgtatcaagaattcaggtgtaataaagattaaaagggacatgatgtatgtttaatatttagcatctgttccatagtaaatgctaaataactattagatatttaattggtattagatctatttcttttttaacttataaattataatagttattgattctattattgcctttaaaatttaaaaccattctgaaatgatgaaatggtttattctcctctataaggatgcaaaagttactattgcccatatcactgaagatgagggaatgccaagatttttaaaatttctacagaatagcaaaaatagtttcatcatttaggtcaaagtttcaagtttgagtaaggcttatattcatttttttcaaataactagcttgtatttttaaacaaatatcactaaagtctataatatcattatcttatgattcagtaaagaaagagaaataagctgtttaaatatgatgccatacaaattcattcaaaagagaatgatgcattcaataactatgtttgtgaatttggctctatgctatgagatacccaatttgtcttattttatccttgaattcatacttctttaagcttcaaggagatgtgatgcattagaaattgtagattatctgtggcaaatttgactccaggcttttagtaacacctcatttcaaattctcaaaagagaatcctgttgtcttaatgttttggtcttcgacatccaagtgtgttttaacctctatggtgcacatacctgcccaccactgctccttgacctgcagcttcactgaacatttgaactcttgttgcaatgcttatgttattgggcccctccacatccttgccacagttgattgaaccaaaggcaactcagtagaacactcctaatcctgccccctaaaccctccccgtaagtccttgtcatctcagtaaacgacatctccaatcttccacttgcttaggttatcaaccttaagtcactcttgagttctctctttttctcacattttattagcaaattctaagccccttatcaaattccattagctctgtgttcaaaacacatctggatatagtgattgatacccctgttgtttccactctaggtcaagatttcatatataatcacctgggctattgcaatcaccttctaacttgtttccttttctacccctgcccatttttgattgaggtgatttttgagactgtaagatcataccactcctctgctcaaaattctgcaagtcttggccaggtaaggtggctcatacccataatcccagcactttgggaggtgaaggcaggaggattttttgagctcaggagtttaagaccactctgggcaacacagcaagatctcatctctactaaaaataataataaaaaattatctgggtgtggtggtgtgtgcttatagtcctagctacttggaaagactgaagcaggaggacttgcttgagcccaggaggttgagtcagcagtgagctatgatcatgccactgcactccagtctaagcaacaaagcaaaaccctgtctcaaaacaaaccaacaaaaaacaacaaaaaaacctacatgtcttatattttacgtataataaaatacagagtccttcatggcctctgaagtttcccatgattgtgtgtctgcatccttctgtgatgtggtcttctatcacccttccctttactctgtaagctgacttgctttttcttaattatggtagacacacttgccccagggtctttgcacttaccctctcctaagaatgatctttccctgcttgtggctcggcttgctcccttacatcacctggccttctggttgaatggtgcctgcttgagggacctgtgagcaaccttcgaggcagcacctctctccctcatggcacttaccatctgttatctggtatcatgtcacttttcaccagctgtggtatcctttttttaatgacatgacttctgacatcacatttgctgttctctttttccataccaattctccaataataattagtgctcagcaagttaattcaatgctggtactaactcctggagcttgtagagatcccgctggttaaaggctcaatcccacaagactgtccctacttcagacgccaaccacaagggggtcccagcctacccacacctgtttagcagactagaaatttataggttcccattctcaggtttcataattcactagaacaactcacagaactcaagaaaacactttacttatatttactggattattataaaggattcgactcaggaacaggcataaaagaaatgtatatggtatggggtgtgatgtgaggagcttctgtgtcctcttgagggatgccatcctcccaggatctcagtgtgttcaccagtctggaagctccccagatcttgtcatctaggtgcttttatgaagatttcattacttaggcatgattaattgaatcattggacattggtgattagctctatctttagctcctctccagctggggttgggactgaaagttccaactctccaatcacaacgttggttcttctgcccagttgagagtcacctcattatcataaactcaagactggttgaaaggggctagttttgaatcacaagagacactcctaaaattccagtcacttttgtcactcaggacattccaggggtttgggagtctctgtgctggaaccagggacaaagatgaaatacatgtttcttgttatatcacaccagccaaactgcttcatattgttcttgggtgttgtctgtccccacttgcaagaacttagctctacagaaacaagtcacttttgccagttttattactggtctcatttagcaccccaagcagtgcctaatacaccacagaccaggggtgtctgatcttttgtcttccctgggccacattggaagaattgtcttgggccacacctaaaacacaccaacactaacgatagctgatgagctttaaaaaaaagcacataaagatctcataatgttttaagaaagtttacgaatttgtgttgggcggcatttaaagccatcctgggctgcatgtagaccatgggtcgcaggttagacaagcttgccatagacactcaatcagtacttactgaatgaattacttacgtgaattaaattggacattaattaatgcaatacttcatggaggaagaccataggtagaggcagacatgagtgaaaacacgctccatgagggtcggagacagagaaggagagaaaacaaagttgttttctttttctttttctttctttctttttttttttttttgagacagagcctcgctctgttgtccaggctggagtgcagtggtgtgatcttggctcactgcaacctctgtctcccgggttcaagcaactctcctgcctcagcttcgtaagtagctgggattacaggcgtccactacctggcttatttttgtatttttagtagagacagggtttcaccatgtcggccaggctggtcttgaaatcctgacctcaagtgatccacttacctcggcctcccaaagtgctgggattacaggtgtgagccaccgcgcctggcccaaagttgttttctgaagagctttctggttggatttttactttttcatgatactttgttttacttctttttcttggaaaattctctgagctttgcctctgtcctgaaaacaaattctccttttcttaagtaaggttgagtgggttttccatttgttgtaagccaaaataccttggcaaatgtaatccttctaagcctattagagtaaaaaaagtatgtctggtacataataggtgctcaaaaatatttgctgaatgaatgaatgatagctacaaagagaaaggcttgtatttcctattggcttcagggagaaagttctaacacatttgattcctggccattgtagtgccaaagtcagaaatgcattaagctttctgaaaggaaccatcaaacttggcctctttgagggcacttaacttcaaagctccaatagaaatattacaactattaattaaataactttattttttgggctgggcatggtggctcaagcctgtaatcccagcactttgggaggccaaggtgggtagattgcctgaggtcaggagttcgagaccagcctgaccaacatggtgaaccccatctctactaaaaatacaaaaattagctgggcatggtggcccatgcctgttatcccagctactctggaggctgaggcaggagaattgcttcaacctgagaagcagaggttgcagtgagccaagatcatgccactgcactcaagcctgtgtgacagtgagactctgtctcaaaaaattcaatcaaccaaatcaaataaataaataactgcctttttttgttgttgctttgagatggagttttgttcttgtcgcccaggctggtctgcaatggcgcaatctcggctcactgcaacctccatctcctgggttcaagcaattctcctgcctcagcctcccaagtagctgggattacaggtgtgcaccaccacatttgtctaaatgtatttttagtagagttggggtttcaccatgttggtcaggctggtctcaaacttctgacctcaggtaatccacatgccttggcctcccgaagtgctgggattacagacatgagccaccgcgcccagccaaagaaatgtatttaaggtcagcatcagggactgaattttttctgcctgcagaattgaaaactgtggatgctgttctgtgaatctccttcatagcaggcttgaaaagttgttctgggactaaacgtttgttaaatgggggttaacaatggttcactctgttcacctctcaccctactccatgcatctcccagttctagcccaacgtttatgccctcccactgtgagatgatggaaggctgaggggagaaaagtagtgtggtggaggaggggagaaagattgtgctggggaagtctgggattggagaaacagaagggtgttaatgcgaaagaaggatgaagtgaggggcagcttagcttcaggtaaagatccaactcgggatgtttctcactttgcccctttgttctcagaatcagcgtggttcacttgacaacataaacagatatatgctgttaaatggcccattagaatgcaatgaacatgagcaggacttaccctttgaaactgaacagttcctggaaactcctaactctgcttttctgaccacaggctcctctcgaattatctgattttaggaaaatctattagctgtgactaacactgaaacagcctattgtatgcctcaggacctgccttctctcctggaaccatactgtggggtagctatgaagatgttggttgtatttccttcattattcaataggaaaaactgagaccaagaggagttagagaatgtgtttgcccaaagtcacacagtagaaggacagctggctttcaaactcagctttctctgactattaaagccaacttagaacatacagcatttcttgaagttttaatattcttcctctcctaatttgttttttctttcttggtaactaattttcactaagacagtttgcatgctcttgagcttatagctgaaactgatctatgccagtctttctttaattaaaaatcaggccttaaaagggggatggaaaaggttgagtttttgtcactttttgcagcttgtatgttatagtgcttggctgtgatttgttttcagccagaggacagccctttggagaagaacattatttgagggtgttcccaagcgggtgatggtcactgtccagtgggagagcaggcggaagttcttaccctgctcacatgttaaataatccaagtggcattgctctgagcacttgtgttatttatagtgggtctaattatgagtgtccttgccctgaaaggaagttgtcttccccaagggtgggtgacagactaacaaactattgagctctagcaggagaacgtggagtcctgtcctcttagttggttgaaaatcattaaattacccacctgattaactagcgggtacagaggaatattacaatattacagggacaaatgggaatatactaattgggtcaagatgaattcccttttggacttgaacattaaaattcttattttattttcaaatatgcatcctttgaacgtatttatgcagggaatatgcactgtcagagaaaacatccattgaagtaccctaaagagcaagtaacatatggtgcttttgttagtttttattactgcactttatttctgaatagctgataataattgtgagacacttaaggctacaggtaagaaagaatatggaaaaatctagatgcagatctggtcttgagatgttaaagcctgttactcaacctgttggaagtttcttcctctacaatggagacaagaataatattagctgggagagttaaataggctacattgatgcagaagtccagattttaggcttttactaaatattgatcattattctccatttgaaagtaaaccatgttttactgccaatttttacgatgaaaaaatttttgtggttttgcaaaggtaatttaggcaatcctttgatctccgctgaaatgatagagggatttgttagaagttgtattcaggccttctaatgcttcccatttgctgattcaatgtatttggaagatttgcctacagattcggggccaaacattgagacacaaatagactttttgttttaaatttgtgcacttgagtgtgatattttttcatgccagcttccagtgacaggctgcatagtttattttctgtggcaaccactttccctcactaagttttactctttaagtctagctgcctctcccattaaggttcacccttctctgatctctggcccagaagcctgcgtgaaagtaaaccaagatttttctttttttttttttttaactatttcctgcattcctctcttttaggtttgatgaggtcagatttcagaattgccaagctgtttcttccttcctctattcataatgttggataaagacaggctgtttaaagagcactttcagtctgaggggtgtcttttctgtgcattgtgaagggtgaggccccaaagctgggacgacgacggcatggcgccaggatccatggagttttagctagtgaatattcaggaaagaaatgtatttgtgtcctttgatccagagctggctacccagggtgctggctggcaagtgaaaggaaacatggaagctgacaagtctgatgttaaagaacattaggagttgtgattgtcttcttaggacccaaactgaactttcttgctgcagactcttggtttgcttatgaaccaagtgagtacttggcagaaaccaagtatatgggatttttaaaaaccccaaaatttaagaacacaaagaagatgtccaatttctagaagttccctagagccatgtaattaaactgtgtgtttttttcagaaatacctggaacacctccattttccaataataggtatctctttatatacatggctgtgtctgaactcccggagaaaagagtagggctgtctgttttcgaaaagcagtctttttttccctttctgaataccagagaaagaaaagtgcaatttcttattcagaggtggagatgctttaagatcaattgcttaactagaaggaggtaatatctatgaaacaatgaggttatagttattatagtccatgttacatattgaggtacaattttcctggtttattgttgttgtttaattttactgggaagtggttcaaaatagttgaggtttctgtagaggtctgataaggatactgagataattgtagttttagaggaaagaacaattcacgaaagttatttccttaatatttctgtctaaaattaaaagcttgagcaacttgcctgaaaacatggattttgaatgatatatggggtctgtttgacccatataattgcaattctaattccaatggcaaatttcaggatctttcgttcagaattcaccttctgtttgagaatggccattttaaaagttttttttaaattcaatttttttcctctacaattaatagctattttatggtttgactaatggagatacatttcaagcgtacattcatgtgcttaggattttatgaagcttccttacacttgcaattccctggctgttaccaggaaacagccctcagctcgctgctttcacagaaccatatattgttatggcatccacagctaaattcaaatcgaagagcaaacctctcaggtttgtgtgctattaggtgatacatgcttcagttcccactatgagggaggtcaaccccagagagctttttgttatttccccaaaatggaagctgggaaacaaagttgcttccttaagaataaagtaaaacttacttccctgggaaggtggaagtgagtagaaatggatttgagaaagaaagaacattttaaacaagaattcaacaaagtggcaaaggaatacagggaaccagtttgtgtccaccagtaagatttaaggttggtgtatccttgcagtggaaagctgtgtatgcattagaaaaaaatagttagggctatggatattaagtggaaagttgcctttgatttgctttctacaggaagagtaaaggagaacactgtggaacataatacatagttgatgcgatcctcttaatttttaaaaatacacacatatactgggcgtggtggctcatgcccgtaatcccagcattttgggaggctgagatgggtggatcacctgaggtcaggtatttgagaccagcctgaccaacatggtgaaaccctgtctctaccaaaaatacaaaaagttagttgggcgtgatggtaggcgcctgtaatcccagctactcaggaggctgaggcaggagaatcacttgaacctgtggggcgaggttgcagtgagctgagatcgtaccattgcatccagcctgggcaacaagaatgaaactccgtctcaaaacaaaacaaaccaaacaaaaactcatacatgtatagataaataggaagatagaattatatctctatgggaattagctttggctgcagataccctcaaactcagaataatagtagcttattaaggtcgtttagttttctttcatgggaaagaagttaaagttagtatcgtagttccatggtcaacaggaaacctggtatctttcatgtgtctgctccaccattcttgtatacggcttcccacctagaggttacctcatggtccaagatggctgttgaagctccacgcatcatgtatcttcatgaccagaaaaaggagggatggaagaagagtaaactaattttgtcccttctcattttaaaaaagccttcttggaaagctcacacaaaacttcttatatctccttggccaatatttggtcacttggctttacctggaagaatagaaaatacagtccctcagctggcacattgccgagggttttgtactgccaaataaaaagagaatgactgctgggaggcagctttttggaactgctgcaagtggcttcctttggtcactagaagtggagatgaagagcgggaacccttccattttcttctttatatacttttgtactgttgtattttaaaataatgagttaaaaaaaaagcagagggatgcatattttaaagaagaaatgaaaacctaagtggagttgtggtaagtcatcagtccaagattagcgacatgatagaaaagatgattctctatcttgcttggacctactctttgatgttaaagcatctttgcatctttgaatggatcacctcctgcatgactgttctctgggtcctgagcagggagagacaaccaggtgcatacacaatttggatttcatggtctttttatctctactaaaactatttgcagagatacagttctaatgacaaatgctaattattggctgtcacttagccttctaatgattaaatgcaaaggcattagggtgttaaggaagatagacataattataataataagactaaaatatatggaatgctttcttgaagtagtatattccattgaacaataattgctcttcaattgcagttttaatattctaaacctcaacttctcaccttgaaatactactactaataatagttcctttataaatcatggaattgttataagagttaaagaagataatgctgattaggtgacaggctgtcccttaataaatgctcaataaatgcaagatgaggatgattttattgttggcatagcatgtgccaggcattctgtaattattttgaattttacccccaacaacaagtttataagggtgactttaaaaaaaaaaacagcattattgggatataattcatataccataagattcatccttttaaagtgtataattcagtatttttagcatatttacactgttgtgtaaccatcatcacaatgtaaatttagaacgttttcatcattccatagagaattcccgtacccattaacagtagtcacttctcattttcccttccatcaatttctgaaaaccacaaatccactttctgttttcatgcattggcttcttttggaaatgttgtataagtgaaatcctacaatacatggtcttttgtgtctggcttctttcacttagtacattgtttttgaagtttcatctatgttgtagcatgcattagtactgcattcctttttaaggctaaatgatattccattgtgtggatagaccacattttgtttatctattcatccatttatacatttgggtttgttaaattaagtttagcctacaactgtctctttttatatattttaagtttagcctaaaggttttttgtcaactgtagtttactcttgtgtcaattactgaattttggctaatcaaagatgaccaactgtttaaatcatgcacaagtgccatggtgtgaccaatttggctatttctgtatctcacttttgtttctttgtcctttatttggtgtgtgtctataaatccttttttactatgtggctatgctaaagtctctgtaagcctattctggcttgagagtctgccctattactcattatttatttgacatattttgagatggctgttcagggggccagcagacagaagcaacctgcaaagctgttttctatgggcgagatttgcatctgtagagagtctacattgaggcagccaaccctacccttgtcttgatctacggaagattaactgagagtctgacacctttaaagaagaaacatttactatctcttctctctgagggctgctacctgtttgatttcatttacacaagaccacctttgctaaccaagcctcctcttctctacttcccatgacctgtcttgccagtctaacctggtttatcagcctagcctaatttgggccatcctgagccctcattctttctgtaacctcaagatggtttataagcttctgcaccccatcgggtagttggggtattcactctgtggttctctcccatgtgcacgttaataaatttgtatgccttttcccctattaatctgtcttttttgagttgattttttaagacagcctttagagggtgaagggaagcttcctttcacccctgcaataccctgtacacccattatttcccaaatgtaagaatatatatgacccacataagaatataagaataaaggggtaagctaagttcctgtgagcggaattgcaggatcagaagatgtgtatattatgaggaacactcttgtcaagttgcccttccatggagactgtctgaaccacactcctatgtgttatgaagagcttgaggcaatatttctgtctggaccaattataaagaatagttgtgactttcctcagtaattggtttgtttttgtcttatggagaatgttattcacaacttaccaagcttggattatgttgcttgcttagagcctttgtggtccatcatgaatgtctgtgaaactatattctgaacgtttgttagtgtcactccactttcatatattatgtggtattggaaaagcctttcactggagcttaaaattctcactcaggtgaatcttgagtcaatttcaattttagtcatagaaccccagagctccaaaagactaaagcgtcaagaacctagtttatagccagggaagtctttcaattttgagtgagtttgggtaaaattcactatagatagaacacctaaggataaattgatattatagaggaaataaatcaccagcttctctcattttataacaaatcagagtaagaatgccattccagggctttgcaatattcagcaacctcctacaagcttctttttgtctttggatacaaggaagatagaagttgagtctcttgcctccacgtattactattggagacaaagtcttggggaagtcaggttccaattagtttctaggggaaaggctctcactttcttcatatcctttgaaaaagcaatccagtaaaactttacaaagtttccaagaaagcgcaaagaaagatttatgtgaatgccactggctctactgatgttatgtattctttaagttggggattcatttatttcttcattttacttggaaactgttttgttttgtgctcaccatgacccaattactataatttgagcagtgcataaagcaggctctgcccctcatagaatttacagtctaaagagagataattatacaaacaattactttaagtgtagtttgtttatgatggagaaaggtcatgtgttctgagtgtggatgagaggggcctctcatgtaattgatttatgcagcaagcatttgttgaatacctacagtatggtgatccctgtgctagagctggggatacagtaatgaaggctatagacaaataccctccacctctggaagttggagtctagtaagagcatctctcatttattaaacacttatattccaggccttgttctaaggtgatttaaatgtagtaactcatttgaccctctcgacaacccagtgtggtagataggattacaattatctcatgaaggacagagaggttaaacaacctgcccaaggccacactgcatgtacattttggaattaacctgctcgtgggcaggtgggctcctgaggttgtgttcttgactttaattgtatatgcttctccctattctgtgtttatagagaagaaggcattaggagaggtttcctagaacaagtaacatgatacataaaagataagtagccaagtggaagggtgtggaatgggaagattgttccacatagatgcattgcgcccaggtgcaagaaagaaggtggggaaggtggcaatagtttcaggaaagaaaggagcctggtgtgtgggaggctggaggtgggtatatcttcacagcttggcacaagtcttgtaggttgcctgcagactcaagactttatgtgccgggactgctgctgttctcagcctctgttttgtttcttttcatactgagtgatcttcaccgtgtcacttttgctcttgttttctatgtctgcctgctggcagtgactttgctagccaggatcaagtttgggcaagataccaggaggctcagagacctgcgatctgagtggcatttcctcaggccttgtcctgacctcctggcccagagctaattgtgctacctaagtttgaaaatgctttaaaatttcaagtatatcctcctgggacaactggtatgtcttggcttgataaacaagttgatatctatgtctacctgatcctaaggcatttgccactctaatttgtcatcttgttggtttccaacgtgacaagtactttggttgtacattgcctcatccagtagaccaaattctgattaattattccttttaaatctgggataatggctttaattttgagaatcctcttctttgcctaatgccttccttttctcaacttcaacaccattgacatttttgttgcagaaaattctttggtgggggctgttttgtgcgttgtaggatatttgcctgcatccctggtccctacccatgagatgccattagaaacccctctcagttgtgatgaccaaaagcttctccagacattgtcaaatgtccactgggggacaccatcactcctagttgagagctattgctgtaagcataaaggaatagtattcttcacctatagtcctgtgtcattgctatatggattgtgtttatgaactggatgatgtattataagaggccatttcacagcatttcaataatttgaaatttaaacatttttttctaacctattgtagttaaattaatacaaataataaaataataaaacatccaattaacaaaagaatgcataataataaaataatagctaaccttattaagcactaagtattgggtaccttatacacatagctgtaagttctgcactaccattatcatcattaacagatggaaaaactgaagctcaaaagggtaagttatttactcaaagcagaatgacagtattttttttactttaattctatctcaagcttctcatatttagagcttaagctgaacctctcttaatattaaatttgtgatataataaacaatatttttatttctgattttgtttattatttgcttgatgccagaagataaattactgctttttctaggaggacaattatatttttgattaatattgtaattttagagaaagtggattcccaaaatgctgatcatttttttcagctagcagtatttatagacagcaaccatactataacttatttgataattatctaatttttgactatttttctagtggattattaaagtattactttattgtcaggagtaaattcctgaagaatgaattcaaaaagaaaatagccagtatggctggactacccattataaaacatggatggtggtaaagattcgtttttgatcaaaccttgggaatttgagctcagggtgcaaagcagggcttaggagagagatgaaattgatttcaaatcttttttgcttctttttttgagacagggtctcactctattgcccaggcgggagtgcagtggtgcaatcatggctcactgcagccttgatccctctgggctcaggtgatcctcccacttcagcctccagagtagctgagactacaggcgcacgccaccatgcccagataatttttgtgttttattgtagagatggggttttgccctgttgtccaggctggtcttgaattcctgggcccaagtgatctgcctgcctcagcctcccaagtcctgagattactggcatgtgccactgccacatttcaaatgtgactccataatgtattagctgtgttaccttgatcacattgcttaagtgtctgagtcctagttgtttaatttgtataaactggacattaacaggtcttagctcacacagtttgggtgacatttaagtgaaagcatacacgtgaaatacttagttgaatacctgtcaactaagcagtgaagatctgtgaggaggaggatgatgatatattacaaatagtgtgctgacagtgcttaatatctctcatccttaaaacaaacaacaaaaacaccttgcagatgctgtccctttcatatctcttcacaacaagaattgattttgaaagcatgtttctttctttctttctttctttctttctttttttgagatggagtctcactctgtcgcacaggctggagtgcagtggcacgatctcggctcactccaacctccaccttccaggttcaagcaattctgcctcagcctcccgagtagctgggattacaggcatgtgccaccacgcctggctagtttttgtatttttagtagagacagggtttcaccatcttggccaggctggtcttgaactcctgacctcatgatccacccgcctcaggcttgcaaagtgctgggattaaggtgtgagccaccacacccagccgaaaacatgtttctttcctggaagttatctgtgaaaatctgcaactgtctcctctatggccacccaggtttccttcccttaaattcttggcttaaatttttttaccacatgacaattattcttccccttctgcccttttctggcaacatctgttccttgtgggttttttttttaaagagtgctttctcaaccatggaattcatttctcttcccttctttgagactgacattctaattttctatactgagccttctcacaaaatgtcttttactgaatgttgcttcaataatgtggaggttgagagactgaaccttgctgaaatgtttccttgtgaaattattacagtgattcaatttcagaacagacattttttaatgcaaaatccctaatttgggatttttttttttgccacagtagagtgatatatctccagttttgctacagcttgtttttaacaaatatattctatatttgttttatctatatggaaatttattcatcttgaggttctgtggttttagaacaaaactcactgatgtttgaaaacattgatgtgacaaatggccagcagagcccttctccatggtataaaaagtagcacttggtacaatgaactttttaaggaaaaatgtgtggagcaattgtttaaaagaatgtttctcttaaaacaatgtctctcagtatgatttgaatatttgtactctacatattctggactttttaaaaaaaataataaacctcttatataaatatgttaaggcatgtttggaaatgtcaggcctattctgaggcttttgatccaagggcctcatttatgaaattctgggaatttcatgagttctcagtatgacttttgcccactcatttttttgctcatttgtttattcactcagccattcaaaaataaagaaatgagaacataatactcttccaggccttgaggattcaaagtgattcagataaaatatagtgtgtttttatattctaaagaccaaggcaaaaactaaaaatgcagacaaatcagtaagcaaaataatttaaggtattgacttgaggtcaatttgtggaggcctagggggtgctttagatttgggagatgggaatgtgtctctgagatggtgacatcatggtagactgtgagtgcatcagtggccttagtcactgccataatctttgctttgtgactttattgtctccatcaactctgactctgggtttaaccatgtgagataaaatattagcaaacttgacacagcaatggcttataaaagtatttacaggcttccacttttgggaacagtgagtaggtgtgccttttcttactcctctcgctgagactataaagctgggacattgcatgtaaatcaaacctaagaagactctgaaaggtggagagaagaagttagccagactaacttttgcctcatagatcccacacatggaggtaaagaagccaacaacccagaaaccccaataggcacacacaaaaaaaagtcccagcaaaagcctgctctccctggccagaggaccaggaagtgtggcagcctagcaaggcaagaaacttttagataagagctgctctataccattcaaacactaaagaagagactgtggccccaccctctccaatgaaggccaagtgggggacctagtcttccaccctcatgagactgtaatgagttatcccaatacttcaccaagatgatgtctgtgaaggccgagtcaggagctcagactctcatccacacccatcagtaacaagtcctccacaccatggtgtctgcggagaccacatgggaagcctggacttctaattctgctcagtaggaatgaggtgctccttccttccccactagggtggtgtcagaggagacctaatggaatcagcattgcccagtggtaatgaggccactcctactgcagaaccagtggaggccgcatgagcagacagaatccctaccaccccaacccagcaataatgcgggggcctgtcaagtatcattatcaataatgaggggccccgtcaagtatcaagtatgattttctggggattctggatttctaccagcagcaacaagaaggcatactttcctaccccttctcctgttgtagcaacattagaggcatcctgttgaaagagatttatttaagatctagaacctcataacataatgtgctaaatacttaggtttcaataaaaagtacttattataccaaatcaggaagctctcaaacaatgaatgccaacacagaggtgatagaattatctgacaaagatatgaaaagagctgtgataaaaatgccccaaggagcaattacaaacttgcttgaagcatgaggaaaaaaattgaaaatgttctcaagagaaatgagatagaaagaaggcccaaatggaaattttagaactgaaaaatacaataattgaaattggatgggctcaacatcagaatagagagaacacaggcaaaatagaccgatagtaatcatccagttggaataacagagaaaaaatagactggaaaaataatcacaagagtttcagggaccttgtggcattgtaactaaagatctaacattcatgtcaacagggcccagaaggagaggagagagacatgggactgaaaagtgtggaagtcctcatctaccattgctgacagaatcttggaaactgtgactttaagtgaaatgatgtacaagttctttttttttttttttttttttttttgagacagagtctcactctgtcacccaggctggagtgcagtggcacaatctcagcttactgcaacctctgcatcctgggttcaagcaattctcctgcctcagcctcctgaatagctgggattacaggcacacaccaccaaacccagctaatttttgtatttttagtagagacggggtttcaccatgttggtcaggctggtcttgaactcctgacctcatcctcctcccgactcggcctcccaaagtgttgggattacaggagtgagccactgcacttggccacaacaagaagttcttgagtaatgtcgtttcattattatggtgagaaaaaaattggttttattatgcactttttttttttttgctttaagtcacagtttccaagaacctattgatattaagggaggacctaataaactcaatgaaataatggctgaaaagatttggcagaaggaagtttactcatccagtgctaagagaaaagaactgtcaacccagaatcttatacctagcaaaaatgtccttcaggaatgaaggggaaatcaagacactgtcagatgaaagaaaataaagagaatttgtcaccagcagatctaccttaaaaaatagttgattaagatttctaaacagaaaggaaacaatacaagaaggaaccttgggacatcaggaggaaagaaggaactcagtgagcaaaaatatgggtaaacacaatacgttttccttcccctctcaagttttctaaattaggtttgatgtttgaagcaaaattataacattgtcttctatgtttctaactggatatagaaaaaatatttaggacaatgataaataggagaagtaaaattatgtgaagggtggtaaagtttatcccagagaaataatgacttatggtcacacaaaaatctgtgtacgaatgtttttagcagctttattcataacagtcagaagctgaagaacctagatgtccttcagtgaccaaatgggtaaacaaactgtgttacattagtacaatggaatatcatcacctgggtgaatctgtagagaattatgctaaatgaaaaaagccaaatcgaaaaggttacatactgtatgattacacacatataacatcgttgaaatgccaaaattatatcaaaggagaacagggccgggcaccgtggcttacacctgcaatcccagcactttgggaggccaaggcgggcagatcacaaggtcaggagttcaagaccagcctaccagcctggctaatagggtgaaacgctgtctctactaaaaaatacaaaaattagccaggtgtggcagcctgcgcctgtagtcccagctacttgggaggctgaggcagaagaattgcttaaacccgggaggcagaggtgagatcgcacccctgcactccagcctgggcaacagagcgaggctccatctccaaaaaaaaaaaaaaaaaaaaaaaaaaaaaagtggagaacagattagtggttccagggcttaaggcaggcaaggaagtagttgtggtaatgaaagggcaagtgagggatcctcatgatggaaatttttctgaatcctgcctgtatcaatgtctgtatcctgactgtattatactatagttttggggcatgtttcccttagaagaaactgagaaagagtagctacaatctctctgtagtatttgctgcaactgcctgtgactcaactattatctccaaataaaaagattagttgaaaaatgaaaagcattttcaatgtctgtttgctgtcatgggctcccgcttgctccagaagaataagccccagataggctattggagaatcagacgccatgagccacagagctaagtcattccaggcaaccttaagacaacccaggacttgactgctcatgtgtgaatgaacccagccatgattaatgaagccgggtcagatcagccaaactgcccaatcaacagttatattcatgggaagcgataaattgttgtttaagcagctaagctttggaatgattggttatgcaacaataactaactgatagagaaattccacctaagacgtgaaggaggaaaaggagtcaaccacgtgaagtgcagcggaggaaatattctcttatctcttgtcagagaagaatataacactttggaggctggcctattatgagtgaagtaggaagtggtgggatatgaggcctaatgagtaagcaggggtcagttatatagggtaggctaagcaactggaacttagtcttggtgactactcagaacacctctctaagtccctttggaagccccagggagatcattgcttttttttttcaactctacaaaaatacctattgggtgcataccacaaaatgagtgctctgcatagatagtctatcaccattatgaccacagacctggtgttgtgcgagggcctggagtgccttgttatttgtccctacgtaatagaaagtaaagtttctggactttgctttctgtactgctctttcctcattgcttgggacagtgtctgtcttgtaattggtgctcagtagatatctgcagaataaatgagtaaatgaaggaaacaaaatgtgttgcccttgtttgcatgcaaatcaccacctagctggatggtatgaactgctaaccactatggagtgtttgctatataccaagcaatatgctaagtatgttatttatttatttgtttattgagacagggtttctgttgcccaggctggagtgcagtgcatgagcatgactcactgcagcctcaacctcctgggatcaattgatccttccccacctcagcctcccaagtagctgggaccacaggggtgcaccaccacacctggataatttttttatttttctattttcttggagatgagttatcaccatgttacccagtctggtcttgaactcctggcctcctgcaattcttccacagtggcctcccaaaatgctggaattacagatgtgagccaccgtgcctggccctaagtactttacatgcactgacatattcaatctcacacagccctatagggaagataatattattgtgtttatagagtgcaataaaatcttgtatatatagtctcatatacacaatgtatacagaactacttcttcattatgctattaaatataatttttatacaggcttagatatttaataggtgtgacaagctcaatatccccatccccaaacttcacacctccctactgaacttcgtccttttccaggctttctcagctaatgaaaactccattctcccacttgcgtgagctaaacattttggaatcatcctagacttttgtcttaaccttacccttacattcaatcccatcagtaaatcatgttgattataatttcacaatatgtccagattcttagcactttccacttctcctccactttcatcgtggtccaagtcagtatcaccccctgcaatgtttgttgtgaccccctctaactggttccccgacctgcgcctttcctgccctacggtacctgaagttggattatatcacttccattcaatgcttcgtctcacttcccatctcagtcagagaaaaaaccaacatctttactcaattatttatttttattttttactttttttgaggcagagtctagttctgttgcccaggctggagtgcagtggtgcaatctccgttcactgcaacctctgcctcccaggttcaagtgattctcctgcctcagcctcccgagtagctgggattacaggcttgcaccaccatgcccggctaatttttgcatttttagtagagatgggggattcaccacattggccaggctggtctagaactcctgacctcaagtgatccacctgcctgggcctcctaaagtgctaggattacaggtgtgaaccaccgtgcccggccaagccaacaactttagtgaaacccataaggtctgaccgtgctgacccacgctcaccaccactgccagccctgaactcttctcctatcttcaagcttctttattctccctttaacatgctggacatgtgtctgactcaaggccatttatttcttccacctagagcccacctccctcacatatccactctgttgattgccttgtctctttcaagtcgttgctcagatgataccttcttcatgagaacttccctgatcatccctcaccctatttaaaatcacaatacccaccactagcaattcctatcactgtccttggtttatttcccttcgtggtgcatcacaccatgagacatattataagatacacacacacacacacacacacacacacacacacacacacgcatgtaagcatatatatcttattgattgtatgaaagcacaacaaagacagcagattttctcccttttgttcatagccatagcccctgtacctaaataatgcctggcacatggtaggcacctgataaatatttgttgaatgaattaaagaatgatatcagctctcaaatttttgtttaaatagaatgctcacccagtattttagattttctggcatttctttagtgtctttacttttttctataaaactagttagaaatcgaagctagacaaataaatataacaaattatggcttctttctgcagtgcttctgctttggagaagagaaaggcattggagacagagaaggaaaagcatatataactttctgttttagcgcttgcttggttgacactggtcaactttgtactgacaaaggaagggttccctgtgtgtggcaagaatgctctgagctgttcatggcagatattgattccatcagaatgttttcaaaataatatattcatttttattatacgaaaaacacatactacaggacatatatttatgaaagaagaatgtaaaatgaagaaaactgcaaaataggttacaacatagggaggtgccagttcttgagggttctggaatgtcttattaagacgttgatttttattgatttttgccctaaaggcatcaggcagccacagaaacactttaggtaaaggagcaatgtgttcagattactgttgccaaaatcaccccagatgctaggtagaaaatggattgcaatgtagcaagaataaaacagggagccctctgaaactcagaagatggtagcttagagtagagtagcatagagttggtagcttagagtagagtagcatagagtaagtagcttagagtagagtagagtcccttgcagagaaatataaatattcctggtttaactagagggtaaaaatacacagaatttggtgactgatgaattgtgttaaaagataattttcaaaacaggtaaaattatgactcttatacaaatgtagaatgaagatgtgttgaagtttctacttaactcattaattaaatgaaggaacaacgttgaatattataactagttcaaagggtaattcaaagaactcatacatttatatatcccgaatgatgaaatgaatattcaaaaggaggcaaatctagcttcgtggacagtggggggtggggtgggtgggattcagttgaacctctactagacaggacataatttgcatctttatagactagaataattttgcattgttttcacttacctacaacttacagagaagtagaatagctcccacagaatcaaaagcaggtaattctcaaaaggtacttgctacagaaagcccaattttccattgaagtgcagattattccctagaattgctgtgtgtgtgtgtgtgtgtgtgtgtgtgtatgtgtgtgtgtgtgagagagagaaagaaagagagagaggagagagaggaggggaagggagaggattacgtatagctcaaatcttgtatgagcaactgcaacctccgcctaatttacagaatgagtgtatatgtatataaactagaagagaaacagattaaaaagcaggggcaacctcctttatgtacttaataactgacaaatagcattttctatggtatacatattattttacaatatcatttctaatgatggaaacctctagtttacacatttgccatgattaattaaaccagtcctctgaaacatttagagtatttccagtttttctccagagagccctattcccatacctgtgcatatttccttaattatttcctcaaagggaagttcctggaagcagtatttctgggtcaaagtgtagatataattctgcctctagaaaggccgtgctaatttacttcaccaccaggaaagggttggcttagctaatttattccctgtggatgctttttaaggatttttaatcttctttatacatattttacttcatgattaactaacccatttttgctggtatttttctttacagtaaatttaaaatatatcttgatatccactgttcaattttctccaaattggcttttctttccttacaaatgaagggtatatatgaatcttaggcatagaatcatgttgtttactcattaaaaagattttttttccttcataaaatacatgattctgacccagctcattattttggtaagtggaattggtagcagcctgtatattatgactgggggaggccctagaaatcactttttgtagtcttcaagcaccaactgtgaaatcctgtcatgacacagtcattcataggatggaaaattctgactttcttggcctcagagatcatccaggccaatgcccttgtgactgctcaatgggttcattttaatcactccccaggtacagccaatttgtcaagacagaggaattgcagtagggaaatagtttaattcacccagagctggctgaacaggagaccggagcctctgtggacatttggaagctagggtttttcaaggatagtttgatgggcaagggaatgggtgctgctgattggttgtggatgcagtcacaggagtgtggaaaacagtcctgtgtactgagtccactcctgggtgggggccacaggatcagttgagtcaagagtcataggtctgggtggggctattggtggtcaacaatgcaaaagcctgagaagacaactcaaaaggccaatcttaggttctacagtactggtgttatctgcaggagtaattgaagaagcagcaaatcttgtgacttccagaatcatggctggtaattctttatgcctacatcttagcagaatagctcctctcatcctcctaacctggtggtctttcataagttttacaaaggccatttagttctgaagaaaagtgattatcatttaacctataaactaaatttctcccaacgttagcttggcccaagcccaagaatgactaagggcagttttgagattaaaggcaagatgagggctgattagatcaaatccctttcattgtcttaattttctcactgtcataatttttgcaaagatggtttcactcttatattgcagaaggagaaatttgcagacaatggcagataggatggaggggcattacctgtggggcaaactcctatctcctggttctccttggttaacatctccacccttgacttccagattatatcaacccacaccattttctgtggctattgaaaagcctgaaagtgacagaggagactgagactctaaggggatagtgtcagccaaattggagggttgggcactcatggagaagtgactggtcagccccagatagtggactgtccaggccagcagggagtcatttagcctgaacactagtttaccaccaccatggcagaggaagagcaaaaggctgagagttagagaagcaatgaaatccaagaagagttgagaagttgtatgagataacatctaattctaatgtagttagaaaaatacttagcttggcttcctgcacttctgtcaaagacactgactatgctatcactgaaggagagataatatggagttcttttcaaagcaaatacttcttgcagattgctaggatacatggagtcctggattagtgtcttaagaacccagtttcagaaaaactcccttcaaaactatcactgtgggtgaacacttagtgccagtgagtgaacttaaaatcacaaacgcaaatgtcacactgaaatagattatctataaagtagtcgtccagatgaaacagcatatggctacaactaagtgtctctttttagattatgataagcatgaaaataaacttcttacagatggatcgaccatcagcctgagtttatgcatccctaagagtccaactttgctgaaaaaattcctggagtagtggttaagagcttattttccagattcaggcaaacaaaagttagaatcctggcatatttctcctagcttttgaccttgagtaagatgctcaacctcactaaaaacaaaatttgctcatctgtgaaataggaataataatagaatctgccaaacaggaatgttgggatgactaattgaaataatgcatataaaaggctcagcattccacagtgcgcagaaaaagagttcagccaatgctaggcattaatattaacatcctgcttgagaaaaatatttgatttgctttggaaagtaagtgccaataggagtagcacatgagaactgaggctaattcagtcagcactgtgaggatatatatctttttttttattattatactttaagtactagggtacatgtgcacaacgtgcagatttgttacatatgtatacatgtgccatgttggtgtgctgcacccattaactcgtcatttacattaggtatatctcctaatgctatccctcccccctcccctgaccccacagcaggccccagtgtgtgatgttccccaccttgtgtccaagtgttctcattgatatatatctttagagtttggagagaatgctctgagaagagaaagtcaatgtgattacagaaagggaatgctggcaaaatggaaaacaattttcacctacttagttaaattgtaccttaacttcatagaataactatagaaacctaactgcagcccagtgcaagagatggggatgctaatggatctgcatgagaaagtgctcttcaggatggcatccaccttaattgtagaacagtgattccccaatggtggacagggagaccagacatttggtggagggggttgaaaaagcctcaagtcaacattttaatagagttttattggagtagaatcttggcttatggggagatgtggaatgtatagggattccacagaaggcataattacttccatttctccctggagagacttgtcaaacagatttctatgagatctgagcttaaagagttgagaaatactaccgtagaccagaggttggcaaactatggtccacaggccaaatctggcccactgcttggctttgtaaataaagttttattggaaggtatccacactcattcatttacatatattctgtggctgctttcatgctatatttgctgagttgagtagttgcaatagcgacctgggggctctcaaagattaaaacatttactctttggctcattacagaaagtttgccaactcctgtggtagattataaaggcctaaacagccccaggcagtgtactatttcctttcaacaggaattttgtgaccaaaatttgctattttcttcataacagtccttgaatcctttagaagtataattgttactctttaagacattgtgaaggcttactattatagtaaaattaggaattctaagcaaattcttaattgtttcagctgcttcttagaactggaaattttggtgaacttaccagaatattctttgctaggaaaagaagccaataaaaaatgttagagattttaaaccagggctaagcaattattaagggtatcaaattttaaaggaagaaaagacaaaggaaaaacagaagaaattattcatggattggtgacaatttaaggctgaaaattaggtataataaaatcaccaccaccaacaacaaagtacatgctgaatgagattttcatgtaactactaaatctgctgtctttccacccagcttattagaactgtgtgatgtgcttatctgcttaagctttgacagtggcctgtggggattgacttgttcaaatcaggggctttgaagatattcacaaagacacatatttttcaaatatacaatttcagatcagcatgcattcagctgtggcagtggtcctcattttgccccccagaggatgtttgacaatgtctagagacaattttggttttcagtggaggtgggagaatctgctactggcatttagcaggtggaggccagaggtgctactaaacatcctaccatgcacaggataaccccccactagaaagaattttctggcccaaaatgtcaactgtggtaaaattgagaaacatgatgtataggaggtgagctatttcaacatggaagttatactatcattgaattctcatacagtgtatttacattaggattacctatcttttatttatttatttatttatttatttatttattgacactctgtcatgaggctggagtacagtggcacaatcttgactcactgcagcctccacttccctgggctcagatgattgtcctacctccgcttcccaagcagctgggactacaggcatgcactaccacacctaatttttgtatttttttttttatagagataggatttcaccatgttgcccaggctggtcttgaactcctggactcaagcaactcacccacctgggcctcccaatgtgctggaattacaggcatgagccactgcacccagccaggattaactactatttatagccagtgaaactattatagttcgaataaaagatttctcttttaaataaaaatgttagtttaaaaagtcaatttaaagaaaaatgttaactaaacaatactatagatgacaagtagatttgttacataaaatataaagacagttgaatgaattaatttttaaaaactgccctaaactcttaagcgaatgggattattttcaaactgtcattctttgaaacaatgccagtgttaacccaagtagttcccacatgctatcatatttagtaagtcttcctgttttatttttgctaaacaatactgagatatttaggataagcttttagtcctctggatattggtggctcttctcgtgttcttaggacagtgtgctggcagttgaaattgggagtttagtttaacggattacatttctccttcactttctctctcaaactcaagatggcagctcatgccgctctgtttcaaaggccaccatgtgccaccttttgcaagccacccatctcagatgcccgcatcgggaagcacttttagaagtctttgtcggcagccccaagagggagacacagcgtcgtctgaaagtactttataaatatttatgggattgacttgcaaattacagataaaatacctgaaaacatggtaaagagcaaatttgtctggtcccaactgaagaggttttgactcagtagacctcggctagtctctaggaatctgcatatttaacaattatcctgagtgatgctggaccaaacagtgagaatcactgaggtatgatatatgacaataaaggaaagatcttgattgcacacattgctctcaactttggtactgtctgcttttgtaccatgtgtttgtatgttatagtttgacatcacagactgcctgttcataaaccaaatttgagttttccttatcttctaatgaaccaatgtattttcatttgtccttactacttaataaatcaaaagaaaaataagaaatgagaaaaaagtcccctagacttaataccgatgggtcaaaaatggaaatcattaggcatgctgaaattgaagaacctttaacttgcattcagcagcttttggacataagccaggcaaaaactgtgaagaaaatgaacacattttaaaaaatgttagaaatgctgtcattgaagtttgggtctgaaaactgagggatagttaggaaatgtaaaatatctttcttggtgaagatattttttcttgcagtgggcatgatttttgcatacctttagcatgttcagtttctgaacacattcttggggcatgtacaaaagcaagaggttgccaatagtagaatgacagcaagaaacttatttttcacatcctttatttgaagaagcagagtgacgttcattcccactgtaattacagttctcaggtggtggaaatatttcaagggagccaatcgtctcatctgttattcagacataagcaagatgttgataggactctccttgacaaccatagtactgagaatgttcattttcatggctgaatctccacctgaaaaggattttgtgcttgaactcttaccaatggctcttgtaacttgccttcttaaagttactcactctggtcgttaattagactgtgattggatggcaaaaaaaaaaaaaaaaaggactggagaagaatgtagatgacatatgttagattaggctgtaattttaagatcttgctttaatatctgtacatcttactgtctttttaaaaatttaattaaacattctatttcaagataattgtaaattcacattcaattgtaagaaatattacaaaaagatcctataccctctactcagtttctctggtagtaaagtcttccaaaactacagtatgatatcgtaacaaagatattgacattgatattgatgtagtcaagctacagaacagttccattgccacaaggatccctgatgttaacctgttacagccaaatccacatccctgggctccctctctcctccaccaccacattcctaacttcagaccatcgttaatctgttttccgtttctataattttgtgacatcaagaatgctatacaaatgcaatcatgtagtatgtaacattttagatttggctgtttttttcactcagtataattcttacagagatttatccaagttgttgcagatattaatagtcaatttctttttattgctagtagtattccattgtatggaggatgtaccacagttcgtttaatcattcacccacagaaggatttccacattatgaggcttccaggtttcggctattttgaataaagctataaatattcatatacagattttttttttatgtggggataaaagttttcatttctgtgtcataaattcctaagaatgaaacttctggttgtatgatgctggtttcattttttaagaaactaccactgtttttcagagtggctgtaccatgttgcattcccaccaactatgtatgagtcatccaatttttccacatccttgtctgcatttggtggtggtggtattattattatttcagccaatctgataggtgtgtattggtagccattgtggttttaatttgcccttccctcagaggcagtgatattgaacatgttttcatgtgcttcttgaacatctgcgcaccctctccggtgagatgtctgttcatgacttttgcccattttgtcattagattatttgtttgttttactgttgtgatttgagggttctttgcctattctagataccagttctttgtcagatatgtggtttacacatcttttcttccagtctctcacttgtcttttcatcctcttcacagagtttttcacataacggaagttttcattttgatgaggtccagtttttcaaattttccctctgtggattatgcctttgataacaggtctaagaactctctccagactgtgatctcatgcattttctttttatcgttttatttgatatttaagttttatcattttatttaatatttaggtctattttaagctatttttatataaggtgagtgttttaatgtttaagtcgacgatttttccacccccctccatggatgtccaattgcctcagtactgtacactgaaaagtttgcttttcttccactgaattgcttttccacctttgtatctgtgtttttatattgcttgatggatttaataactgtgcaggatgaaaaccaatagaattgactaattatactaatacctctgggtatttaaaaaataacagaatcctctttcatttaatttacaggttttttgttttgttttgtttttttggtagtctctctctgctgcccaggctggagttcagtgacatgttctcggcttactgcagcctctacctcctgggttgaagcaattcatgtgcctcagcctccagagtagctgggactacaggcatgtgccaccactcccagctaatttttatatttttagtagagatggggttttgtcatattggccagactggtctcaaactcctggcctcaaatgattcatccatcttggcctcccaaagtgctgggattacaggcatgagccaccttgcccagccatacagtattaacttttattaaacaaaacaaaaactaacaaacaaaacccaaaatctattctcacgatccagagaaaacgttgttaacatttttttttgtctttttccaatgcatttttagtatagtggagatcatgacctaaatgaaaatttatattctgcttcacccctccccacaataacatattatgaacacttttctatgtccttggaaattccttctgaaacttgtttcaaatgaaccaactatgttatcctgcagacagataatatatgtattatagatgtagtataatttactatataaatattatgtacactatctatattactattttttataaaataattacctatgttatcttacagatgtataacatttattatagatatattctatatgtatcgtaatatgtactacatgtttactatatgtgtaccatttactttatatagctactaatgttgctctatagataagtagatatattacattatatattgtagaagtattataatttactttgtcactccttattgttgaaatttgagtaatccctgacttttttattgtaaataatgctgctaacattttattgtacattcggtgggatcagacacatatcttagcttctttatttagaactaaacttcggagtagagtggatttcgttttttcaccctgaacaaagcagttaatttatgttcaagtttctgagacagaagagaaaaatggaatatataaacattgcagacaagtagtagttaacttgaattcctcacccatctgccaggtactgatagaattataagaggtttttaaattgactatgttttgaaggaccaaatattttatgtagactttgttttgtttcttcttattagctcagaggttcttaaactttgtagtacataaaatttatttataggtcaaatatacaaaaccacatatatatggtaattggaggtaatttaaggatcgaggataatcatgactgaagagcagccacccgtctgcacttgaatatggaattcattttgttttgggttttttcctaaggatagatttctattctttttctttttgagacggagtctcgctctgtcgcccaggctggagtgcagtggcgccatctcggctcactgcaagctccgcctcccgggttcacgccattctcctgcctcagcctcccaagtagctgggacggcaggtgcccgccaccatgcccggctaactttttgtatgtttagtacagacggggtttcaccatgttagccaggatggtctcgatctcctgaccttgtgatccgccggcctcggcctcccaaagtgctgggattacaggcgtgagccaccgcgcccggcctgatttctattctttttaggttatttattgtcaagcgacctttaaagatgaccagtcgagtataatagtgccactcagacatttgccatcagtaactattattattaaattatactcatttgctgggcgcggtggctcacgtctgtaagcccagcactttgggaggccgaggcgggtggatcatgaggtgaggagtttgagtccagcctgaccaacatggtgaaacccggtctctactaaaaaaatacaaaaattagctgggcctagttgtgcttgcctgtaattccagctactcaggagtctgaggcaggagaatcgcttgaacccaggaggcggaggttgcagtgagcggagatcgcaccacctcactccagcctgggtgacagagcaagactctgtctcaaaaaaaaaaaaaaaaaaaattatacttagtaatttttaggtttaaaaatgtctcattttattttgcttttggagaatattgtttttcatatgctcattagctctttgcattttctctctctggcattattaatattttaatgtgctagtgtaccttttactagttattttcttcaggatagttttggttgctagaatcagacccccattcaagctagcttaattaaaagttgcagtgatgttgatggtgatgggttcctggggatatagatgatttccaagaaacccagaggaaaggctagatctcagtattaggaattgaaagattgtgaagaactaaaatgtctcttttacctagagtagaaatgatctagttccctgtagcaggttccacagcttaactctcctgcaagtgattcaacatggccaacaacttctgtttaaacctaccagcattgacctttcaatttggtctgcacctctggtagtaatcttcaagtctctgggttgaatatcctaagcaagaatctggttggtgttaatcagccaattattagctagttagtttagtgtctggtccaactcttcaccatccattatgaggaatatcacgacaaccatgagctgccagattctaggatgggcaatgagatcttcagcatagaccaagcccatggttttcagatttaattgcacttgaaattctagcatgttccttgaatgcctattttatttgtacatttgggatttttatctctgggacttttttctgaaatatacctagtgatattgctatcaaagcatgaagaaatttatcttcaaatacttattttcttttgattccagtaattgtctgaatgacacataatatgcccgttgtggaaacaattttgatttttaaaactttattttcacaaagcaacatcacatttctggcttgcaaatatttcacaggtgaaaacatcaaaaagaaaacatttaaatgcaaatgtcagtcaggggagatgctgagctcagtctttgtatttccttccag

SEQ ID NO: 460 - DNA, 78747 bp, Homo sapiens
gtatgtaatggatctatctttatctcttggatgacttggctttctgatggtggccgcgtgttgggcttcagtagcccctggagcccatctactcgaaataaatatttctcggtagccatggaagttggagctgagaagcccgggcgggggtgcctgccggatgcccccggttcccctcttttcccactcgccgccaacttaacttttccgggggatggatcggctggttgagaaagaggacacgcatactcggtgtgaacgaggtcacgaaccctctgaccccagggagagatttctgccaagcgtaaggtgtctttggatccccccacctctgtcccaggtgtcgtgtcaaaggcggtgcgggctggcctctggtcggggccaacttgggtagatacttgaatctggattttccgtggttcgaagccggggtggtggatttctgttgctggaatacaccctggaggtccacggaagggttatttacgtggaacctgatacctggcatagcgcaagtgctccctacatatgtcctgaaaggaagaatgaatgaatcttagggcacttgggacagatgttgacacaggctagctccttccttaaaactccctctctttcgcccctttctctcttggctcttcgctggaggaggcttcaaaagagaacctacccttcctctccttgggactgaatgatggtggaagaattcttgagggagagggaagatactggaacgatttttttatttcctaaaaatttcaaactaggtccctcatttctctttgcctcctatcaagtgttgtcgctgttttagttgatcctgtgcgtttggacataaggggtgaaaagtgggggtggagaggtggcgggggcggggggagaaaatatcctttggtgtaatgcctgaaataagtataatgtcagtaatcgtgtggaatgccgccattgataatgagtggtaaattgaatagctttctttagaaatatgtgtcatttggcatctttctcttacttggtctttggactgttttaatgtgccagatacttttactgaaaactgaaaagaaatttcacagtagtaaactcagctagggagggaagccctgtggggaggaacatccgcaattattataaaactcttgcctaattcgttttggtctttttcttttctttttctcccctgctggtgaccatgttttagcgattatgtcctgtgttattgtgaatatatacatatgtaattagggagaaatgtaacagaattcaccatttccatcagctctgccaaagtttccttggttttcttttctgctatgcaaatattctcatcttcaagagcacccattgttgggggtactttactgagtgactcccatgtaaggggcaaacaataatgggaactttctatttttggtatgcttataggctggccaagtgttacaattttaaggggagttaagttaaaaaaaaaaaaaacccagcattctaatttagctttactccatcatgtcaatggaaggaattggtatgagacatccattctgtgttagggagcattccaatgggaagaggacatgcattattaatgcacaaaatatgaattattcataaggatcagagtttatgccaaattgtgacacatggtaatttatttgaaaaactggttaccatcactttcttgtttgtggtaactgagattattttttctagattattacaattgacacaacatagccctatgtgtgtgccaacatttatggacagatatttgaagcagaaggaacagaaatatttagtttgtatttgttttatgttttacagcattttggatgctaatgagcagtatactttctcaagatttattctttttgtctgtgttcacgttcagacttcagaatatctattgaattatggttattgctcatggagagaaaaggtcaaaaatatgatcaagtaaatctggtcttatttgttagcattggttttctcaccagttaatttttaaaatattcttatggtatgatttacaaaagaggctgattacatagttgccagaacacagtgcaaaccaaagttttaatggaggctgcaaatattggtgaaggatgctgtacggaattggcatggggaccctatgtccacagtaaggaatgttagcggtattaatctaggctacatatagtctagaacagcatgcgacatgtatcttctaggaatatgtgccagtctcaaagagaggtagggcatttattttgtctagcacagagtagacacttggtaagttcatgttgaaatatgtgctgaactatatagtgcatggatggtcttgccatttataacctttaggaactaatacaacagcatttattaatggaatccagaccatgtttgggacggtttataattaaatacaaaaacatttcatggtaagcagctgttcctggtgccaaggaataaatgcttcttcagatttggagaaagaggagaagggaacgcattctgcttctattgcttgttgacctttgacctttcttggcctcagtttcctagtctgtacaatgaacactatttaatgttcttgggagcattaaagaagatatttgtgaaaatgcaatgaaagtctagaacattgattctgcttgtatcattttctttaatcaaagatgagttaggattggtagacggatataggaattatctatttccttctctttctatgtagaagtgtacaaaggcataaatgtttatgcagctccagattttttcaatggatgaaacttttacaaattatatacatatatgtgtatgtgtgtgtatttttatacataggaataaatatatacatacaacctatgtacatattgtataatatataatatacgtatatttatatatgtgattttttaacaggacaggaaacattctaaaaacattcccattcaaatgggtcacagataagtggtcaccttcatttgaaatcctaaagagtttaaatgattaagcaatcaaatatgtatagatttattctcttctttagacatcaaaaagcttaatgaaatataattcatttaactcaaaagtttcagtatcttcacatctgtattccccagcttaatccccattgtttcctggaggtctccagctgtgccctgggtactgaatttgttcaggaatgtcgacgttactatttgaggggctgggggaaggaggggagcagctgtccataattatttgagtaatcgattaaatgcactaaaaatttctttttaggggagaggcaaatcaggcaatttgtacaacattaacctgctgaatgtgtgacttagatagcatcatataacaattctcacttcgtttctttccttgcaatggagatgattttccaatcaatcattgtcatggcttgcccacagtgcaagtttcagaacggaaactcgggtttatttatctacgcacaatccctcagttacttgcctttaagtgacatttctgtgctcttgtctaccaaggacttagcagcttggacctcttttctgacctccactcatgtaaattctcctgtctatcccacatctccacttggatgactcacagacctgctgctcctagagtcctctccatcttagccactagaggtcccagcattttggttgcgaaggtaaaaatcacaagcgaaccttggtgtcatttcactcttctcccctcatctcccacccctacaggcaatccatcaggagatcttgtgggctgtatctttgaaatatatctagaatccggctgtcacctcacgctatccactgctacgaccctggtccgaaccctcctcatctcctccctgtaacattgcaacagtcttctcatttgacttcctgcctacactcttgctcccgctagtgccttctcaatacagtaaagtgttcctttggaaatgtaagaaaggtcatgtcacctggctgctgaagctgtcagaggcgtgtgaaccagagcaactccatcttgaataggagctgggtaaaacaagactgaaacctactgggctacattcccagacagttaaggcattctaagtcacaggatgagataggaggtcggcacaagatacaggtcataaagaccttgctgataaaacagtttacagtaaagaagccagccaaaacccaccaaaaccaagatggccatgagagtgacctctggttttcctcactgctacgtggcgctacccccaccagtgctatgacagtttacagatgccatggcaacgtcaggaagttacccttggtctgaaaaggggaggcatgaataatccatcccttgtttagcatatcatcaagaaataaccataaaaatgggcaaccagcagccctcggggctgctccgtctatggagtagccattctttatgcctttactttcctaataaacttgctttcactttacagacttgccctgaattctttgctgtgagagatccaagaaccctctcttggggtctggatgagaacccctgtctggtaacaaaaccattggtgactttccatatactgcagagaagtcttacaatgggccatgaggccctatgctgccccagaaccctctcgttcactgttttctctgcttggaatatgctgtttccccagttacctcctcctggcttgctctctcacctccttcagccttttctcagctcctaccctctcaatgaggcctttaaggcctccatctatctatctatctatctatcaatcatctatcatctatctatctatcatctatctatcatctatcatctatctatctatcatctatcatctatctatcatctatcatctatctatctatcatctatctatcatctatctatcatctgtctatcatctatctatcatctatctatctatcatctaccatctatctatctatcatctatctatctatcatgtatctatcatctatctatctatctatctatctatctatctatctatctatctatctatatttttttggcggagtcttgctcttttttccaggctggagtgtagtggcgtgatctcagctcactgcagcctctgcctcctgggttcaagcaattctcctgtctcagcctcctaagtagctgggattacaggcatgcaccaccatacccagctaatttttatatttttaatagagacagggtttcaccatgttggccaggctggtgtcgaactcctgaccttgagatccacaagcctcggcctcctaaaagtgctgggattacaggcgtgagccaccgtgcccggcctcagaccactctattttatttcttctccctctcctttccttctttccctgcccctttttctccctagacttattaccctctccttcatttatctttgtattgcctatgtactgccaaggacatgtgaagctacatgagggctgggacttgtttctctcttctttaatcatagctgtcccccagtgcctagtgcagggcccagcacagagtgggcatttgatgaagatttgtggaataaattaatgaccccatcactgtgttgtggcttaagagcataggctctgacatgtgactgcgttaaaatcccaactcactggctggttatgtgacttctggtgagttatttaatatttataagcctccatcttctgtaaaaatatggagactcttactactcacctaatagatgatgatcataaagagcttaacacagtgcttgacacagtaaaaacccaattaatgtttattagggctctcactcctacttccagtgtggttagagacaatgacacttaactggttattatttcactgtttctactgcaattgttcatatcctcaaagaacttgttttttagttaggaaaacaaacttagtacaagtaccaaatgttgcttggcattgatggttgatacagaaggaatttataagatttcgcctttataagattttttatgattctacacaaatggtagagatataaaataaggagaaatgcctcttcatgtaactccaattcgagtgaattcactggactaggaggtatttttgttaacttggggactgttttcttttgtggtagagaagaaattttaaaaattggtcagctcacggccaggttttaaaaataaacattttctaattctttcattttatagtttcacctgacctggtatgccacaaacgctttcatgtttcatttgaggattttagatttagatgttcaggaatccatgcattttttatggtaccatgacaaagtcataatcgtagtatgaaaattatacagatagaataaactcatatactccttttttttccttttgagatggagtctcgctctgctgcctaggctggagtgtcctggtgtgatctcggctcacttgcagcctccatctcctgggttcaatcaattctcctgcctcagcctcttgagtagctgggactacaggcacatgtcaccacagttggctaattttggtatttttagtagagacagggtttcaccatgttggccaggctggccttgtatgcctgacttctggtgatccacccgtttcagcctcccaaagtgctgggattacaggcgtgagccaccgtgcccggcctcatcatatgctattgttatttaagtatatgtatgcacatgcacatatatgcacatatgaactcatgcaactattcagtaagatatgtgaagtttagttactctttaagaacaagaggctttgggataactttaccagtagggaaatttatggccagatagactgcatatatatacatgcatcagctgggacgactcagttattttggcttcatttgaatcagcttcattgacatggtttccatgtcagaagggctttccagctggtatttcagtcgtcttcatctgattgtccatgtggatgagacgattaattgtgcataaagtcagcctttacatcatcatccccaaaactgatttaagcagagtggccaatttagtgactttgtatatagacataaaccaaattagtgatatgattgtccccacatctgccaatgtatttttgaaatcatatttattagaagactagaaatatttatttttaaagcagctttgtaatttttgtggggaatcgtttggtattttaagaacttagttttcattggaatatattttcttccatttgttttatcattcctcaaatatttcttgagtacctattagtgttaaccaccttaaataaggcagatacaatcaccatcctcaaggagttgacaatttaatttttgatttgtattattaacaagagattaatgtattcactatagttaaagaggaattaatctgagtaacaggtcaaatattgaagtgaaaagatgcctgaggatatttttctattctatttttgtgaaatgaggaagggcaaatttgatttttctcttactctaggaatttgatcctagtagggtggaaattaaacctttggagattctaagccttgaagagattatggtgcgacccccccgttcctgtgaaattcaaaataaaattgtgagtttagaaatgccacatgatatatgtgaatgtttaaattaaaatagcttctttctagaatgcagatggctacattttggataagtatttggaagctgatttttgcagagcagttgtgggggctgcctttatttcactagtgttctcaccctctgtttatgccctggatcccagagaacaaaattgttaactggttgtcttgtgttcttaagccgagttgttaactaggctccagtgagaggatgcaggtgacttttctgagacaatgctttgcagcttgtatgagattcttagagaagtctggtcctccctgccccagcctctcccactttccacctgctatgccttcttaaagattaagatcaggttgggtgtggtggctcacgtctgtaatcccagcactttgggaggccgaggcgggtggatcacccgaggtcaggagttctagaccagcctggccaacatggtgaaaccctgtctctactaaaaatacaaaaattagctgggcatggtggcaggtgcctgtaatcccagctactcagggggccgaggcaggagaatcccttgaacccaggaggtggaggttgcattgagccgagattgcgccactgcactccagcctggggaaaaagagcaagacttcatctcaaaaaaaaaaaagttaagatcaatatttcattattttaattgaagttttatttttagataattgttatgttcatatgtagttgtaagaaataatatggagagatattccatgccctttaaccactttccccccaatggtaacatctttcaaatttgtaggacaatataacaaccaatatattgacaatgatacaattaagatatagaacatttcatcccctggaggatccttcacagtcttcttatatagctgcccctcctgcccctgtcctccatatccctaatcccctgacaaccactaatctgttttccttttgtcattttgtcatttcaagaatattatgtaaatggagtccaggcttggtggcttgttcctgtcatcccaggactttgggaggccaaggcagaagggccacttgagcccagaagtttgagactagtctcaggcaacatagtgagactgtctctacaaaaaataaaaatagaaaattagccaggtgtggtggtacacgcctgtagtgctggttatttgagaggttgaagtgggatgatcacttgaccctgggaggttgaggctgcagtgaactctgatcatactactatacttcagcctgaacgacagagcaagatgagactctgtctcagaattttttaaaaagaatattatgtaggctgggcatgatggctcacgcctgtaatcccagcactttgggaggccgaggcgggcagatcacaaggtcgggagttggtgaccagcctgatcaacatggtgaaacactgtctctactaaaaatacaaaaattagtcgggcatggtggagagctactcaggaggctgaggcaggagaatcacttgaacccggatggcggaggttgcagtgagcggcggaggttgcagtgagcggcggaggttgcagtgagctgagatcgtgccattgcactccagcctgggtgacaagagtaagactccgtctcaaaaaaaaaaaaaaaaagaatgtaatgtaaaagaaccatacagtatgtaatgtttggggattggcttttttaaaactcaatataatcccctgagattcgttcaggttgttgtgtgtataagtttgttcttttttcttgctgagtagtgtaccatggtgtgtatgtacaataggtaccgtagtttgtttagacactcacctgtcgaaggacatgggttgtttctggtttttggctatcatgaatgaagctgatatactcatataagcatttgtgtagaggttttcacgtgaacatacgttttcgtgcctctaggcaaatgtccaggagtgcaattgctgggttgtagagtagttgtgtctagtttttaaagaaactgctgaaccgttttctcacagttgtaccattttacattcacattagcaatgtgtgagtgaatcggtttttctgcatctttgccagcatttggtgtcatcactgtgttttatcttagccattcttctagatgtgtcgtggtatcttattgtggttttaatttgcatttttgtaaagggtagcaatgttgagcatcttttcatgttcctgtttgccgtccatgtcagtaaaatgcctggattgcttattttttaacggttgagttttgaaagttcttcatatattctagatatcaatcccttttagataagtggtttgcaagtatcttctttcagtcttgtcttgtcagcctaatatcctgaagatgtttcaattttttttgtaagttttatagttttatcttttatatttaagtccatcacccattttgagtaatttttgtataaggtgtgcatttcaggtcaaggttatgcctatggatgtacagttactccagcacttttttgaaaaggttgtcttttcttcattgagcattttcatgtcttcgcctgggtcctctattctgttccattgttctatatgccttatatatgtacagtgatatgtctatatatgtctatatatgtctgtatttgtatatatagacatatatgtctatatatgtctgtatttgtaactatacaataagtcttgaaatagggcacactgatccctctcagtttattctttttcaaaattgttttagctattctagttcctttaccttttaatataaattttaaaataatgtctataactactagaaatctttctgggatactttctcattttacacacacacacatgcacacacacacacacacgatttaattggtgcattagtttatttttgtggtggaaatagcagaagtttgagactcacactttagtttgggtctcagcttggccgcttattggctctgtagccttagggaaaattgcttactctttctgatctttaccttacttatatatgaaaaatgaggataatatacgaaagatgaatataccaggctcttaatcctgtgcctgactcatagtagaaactcagtgagtcatactattgatttttattttttattggtaagaggttgaaatgatatttttagtttattgtctgtgagaaccatggccttggtggaaattaattcactcatattccagcggaagagtcatgtttttgataataaaaaaaaaggttgcattctatcttcctcttgctgttgtcttctatgatatatttttgtaatattgggtttatttaggagcctccagtgaaatcctatcttagaacataaagacttgaatatattagccaaaatggcagaactttgattataagactggccacagtatttttgcctattaactctaacagctttgtccaaatgtgagatttatatatctggagagataattttagggtagtaaacagcattcaatcataaaatgagaaaaagtattatttattgtccaacataactcaaagagttggtgactactaggtcttttcctagagaggaccatcctgacttaggtgcagagtgttcagctcacagcgtcatgtttcattgcactgattaactttatattatgttaaatttgacattttctctcaagtgatactggtttccaatttcagataagaatgtgtgcttcctctttaaataaagcttatttatttaaaaaagcaaagtaacttaattaatgttaacttacagtgcaggtattatatgaccatgcagtgacaaaaattttggaggtaggtggtggtacacagacgcagtgcaaatccaaagggtgcaggactgaagtgtgggaaactgcagaccagtgtacttattttttaaaataggttttctaaaatttctttacttatagccgccaaatgtcatcattttatataaataacttaaaaattaggtgcttagggaaaaaactcccatgtacccaataccatcctcttacaagactttcctctgatatcaccatgtatatgtcacttctcaccccccaaaaactgtacaaccttattttggttttgcccaagcccttattttttcttcccttcattcggatgtacaatggatactgctgtgattaacagaaagagaaactagcaagtctcgtcaatggactaactcttttatttaatacaagtttccatgtttagaagagcaattcaactcttagaattcattttattatcttaacaccatacattcattcaataaaagaaatttattttccaaacttttaagaaatcatacttctttgaatcccctagcaaaattgactctttatactaatttctcagtttccaggtttctgtctaccaaagtgcagatatgttggctaatctgtgtaagagccactttttgagtctgggttccattccaccaacagtggcctcaaatctggaagttatcacgaacgtagtctagtcttcagcatccattaattcagtgtggtgtaaagtgagattggatagcaacccttcccagagagtttgtcctcttggagaagtcttcactggtttgaatccatcttctccattaactggttgctcttaacgtctgattttctcctggctggctgtctcttggcatccatattccttcctcagaatgacttgccttgactacaacatttaagttgactcctcacatccttctagaacatcacgtaatttaaatccatgtatagaacttaacaatttttctttattttgtgccatttatttctcttctctttctgtttctctgtttctatatacatttttttcttgtttgtttttcttctgtaagagagggaatgaacaagatagccaagtccctggcctcatagaacttactctaagagacataagttttatcttacatatattatttgcttatgtatttttccttccctccttccttctttccttccttccctccctcccttccatatattatttgcttatgtgcttttcctccctccctccctctttccctacccctcccctccctcccctcgtccctccctcccttcctaccttccttccttccttccttttattattaaatatgtgcatgaagtaggtgttattttatgcccattttacaaattatttacatctgacagtaagttctctgaggccagggactttggctatcttgttcactgctgtatccccaggtcgtagtccttagtaaattctcaatatttgttgattgaatggatgaatggttttacttcctgtcagaagaatggaatggtgtattcagatgtaagaagacaaatagaaaactgtgcctatatcccatctcattttgcagtagattctcttctgaacagtagaacattttagaatttctcatagttgtttatatataatctgcaaattcatcatcaggaaatacagcagttaatatcaaaggtttggatttactccattaaaattaaattttatttgaattcttttggagtaggtaatatgtacccttggtacaaaattcgaggatacaaagtttatacaccaaagagtagagtttcctttcatctccatttcctagaatcatctcgttccctttttcagaagcaaccactgtgaatagtctcttccagaatagtctatatataagtagttttgtgtgtgtgtgggcttgtgtgcatgtgtgtgtctgtatgtgcgtttgcatgcaatttatacttatatagtcttctgagccatggatttcttatttagtgatatatcatagttttgaataattcgataggattcccctgtatggatatatcttatatattttatttgattatttatttattcttctttccttccttccttttttttgttaaatatgtgcataaagtaggtgttattttatgcccattttacaaattatgaaactgagatactaagaggttcagtttttggccagctcacacagccttatgtgtaagaacctgggttcgaatccaacgtctatctctttcatggaacattggggtaaatccattttttttcctctgttacaaacagtgctatagaccacccctcatcatacccattggagagcctgaaggtgaataaattcttagaagtgggacttattgttccaagggtattcacatgtagaatttcatgaaagttgctttggaggatgttctccagcagtggacaagaaagcccatttcctctcattttgtcacattaggcctgagagccttttcaacgttttgctagtctacgaggtgagaaatggactcatttgtgtatagatttccctaacttgtggctgagtttcaaggcattttataattagaatcttttcagttgtgcaggcttttttcttttaagagtaatatttactcaactcaaaaagtagttatttagtgagcatttacaaacatataaatcataatttactgtcttaaaacacaccttcctgggaaatggctcaatggaaatcttttacctaaaagataggataaattatatgttaactgttactgtattttttctctaaaaattaaattatgaatttgcacttttgataaatattatgttgaatgaaatgatacatatatacatatacatacgtatatacatacatatattttaaatttaatcagataaatacatattcattaatacagctcagtctatattcttggtcaatcttataaaatgcttcaagtgtgtctagccatgtggcaggagtgggagggtaggggatgatgtgaatctttgtactgagtgctagatataatttctgaatgttgcatttatgttgttcctgggtatctggtatcttgagcctcttttttcctttctctcttatttttattttttgagacggagtcttgctgtgtcaccaggctggagtgcagtggcacgatattggctcatggcaacctccgcctcccgtgttcaagcaattctcctgcctcagcctcccgagtaagtagctgggactacaggcgcatgccaccacgcccagctaatttttgtatttttagtagagatggggtttcaccatgttggccaagatggtctcgatctcttgaccttgtgatccgcccaccacggcctcccaaagtgctgggattacaggcgtgagccaccgcgcccagcctcttttcctttctctctaagctctggctatagcatctacttttcactcttcaaatggtgaactcttttccgtccatgtctttgccatctcacgcttccctttgtcagtaacgttcttccatggcaggctctgacttcattgtcaggtcaaaagtcccctgcccagggaactgtttgaccatccaatcttaggtggtctccttcaggtattctctgtctcactcctttttaattgcatgcagaatcatgcctcacaactgtaatgatttcttaaattattcatttctttgttgcttgtttcttctagtaaccacaagcactgagcgggtctttttctgttttgttcatggctgaattcttagtggctagaatagtatctgagcacacagtaggtgctcaataaatatttaagtgaataattgaaaacctgaaataacatcttgcatgttaaattatgaaagaggcaagtcaccctagcatagaatacatactcatattcatatatgtcaagaaattccaaaaggtttgtggaattctattgtgtgattcttgattcttgtagcctttttgcagtatcgcagctgcagtccccaggacaggccaaactggtagaagagaaacctggccagggtgagaagggcccaattttcacccctgtcctactgccggccatctgctatgagcagaccatgtcactgaactgcttacacctcggcttccgctgcggaagatggagacggaaatgcctgccctccttcccccaccagctgttcacctctgcacaggaagggtgactgtggttgtgaagagcatctcaagtacccgaaacattctattcagtcccaagtgggtctccgcagcatcccaccattggcttcctgagtggaaaatagctgagaaaacttgggatttttctccaaaattaccatgacttgtatcagatcccaaacaactgaatgtattctttactttggattccaagagtgatctcatattagaaaaagcagagtttaatttctggcaaagaatggcaaaaaatgaaagaaagagagaaaaagagagagaaagtgaaagaaagagaaaaagaaagaaagacaaagggagggaaagaaagaaaatggacccactctatctacaacaaaggatatcatatgtatatatgacatatatatcatatatataaattcatatgtcatatatataaattcttttaatttaaccagtattttatattacatatacatggtagagaaagaaaacaatgcaaaaaaggatagaatgaagagaaaaattttctccaaccccagactggtctcacttcctggggttagtcattcttagcagattcttgtatattagtacagagacgtttattagaggcaagcataaaagtgcgtgtacttgtgtgtatatatataatttgttttacacacatgggttcatattatacaatcctattatatactttgtcccttttaacgtatgttgaaacacttttcaaaaatttttatgaatggtcaatattcatttttttctatgtcacaatttctttaatgtagtccactaacaatggacatttttaggtagtttccaggttttgctatataaacaatgaggtagtgacatccttgggtatacactcacgcatacatgatactgtatttctaagataagtcctaaaaaaaagagttactcttacacagttgtgtacatttacacttttgaggaataaaacaaattttcttcaaagaggttgtaccaggtacactctggtaaagagtgcttgtaagagtgtggctttgtgtgtgtgtgtgtgtgtgtgtgtgtgtgtgtgtgttttaggatcagaggtaacagagagaacaactttttaaaggatgttcttggccaggtgcggtggctcacgcctgtaatcccaacactttgggaggccaaggggggtggatcacttgaggtcaggagttcaagatcagcctggctaacatagtgaaaccctgtctctactaaaaataaaaaaagttagccaggagtggtggcgggcgcctgtaatcccagttactcgaaaggctgaggcaggagaattgcttggccccaggaggcggaggttgcagtgagctgagactgagccactgcactccagcctgggcaacagagtgagactctgtccccctccaaaaaaaaaaaaaaaaaaaaaagggatgtgtttgtccctctgctccttggctcaatcccccactccccaaatctgttccctttatggcaaattgattacctaaaaattgaatctaattctatcctacctttcttacaactttcctgtgccttccccttgcacatgaatatctctgaaatgtactcaggacactgtgtgacccagagcctgctgcgttcactcgctgtgtcacaccatactacccaaaatcagtgcatgagcccaacacaccacctttagttcctccagtaggcacgcgctttcctttgtcaccatccttatatgtgctcttcctattgactagcaagttcttccccttactcttagtttctctaattactgctcatcttgaaaatccaggaaatctttttctgacatatcccagtctaaatggtaggggtagccacatgctacatgtggacatgtaaatttaattaaaattaaatataaacttaaaaacccaatccttagtcacactagccacattttaagtgataaatagccacgtacatagtcatcagtggctaccatattggacaacacagatatttttctaggctgaatgcggtggctcagtcctgtaatcccagcactttgggaggctgaggtgggaggattgcttgaggccaggagattgagacaaacctgggcaacataacgagaccctcgtctctacaaaaattaaaaaaactttgttgggtgtggtggctggcacctgtactcctaactactcaggaggctgaggtgggaggatcatttaggcccaggagttggaggctgcagtgagccatgatcatgccactgcactccagcctgggtgacagactgagaccaagtctcaaaataaaaattaaaaattaaatatttctataattgtagagaattctattggacagtgcttccctatattacttcttcataatactcatggctatttaaaaatacttgttttgagagtgttgttttgatgattttagcctcactagcctgtgagcttcacaagggcacagcttgtctcacttcttgctttttcccttatattaaatgttcaataactatctgttgaatgaatgatgagtgaatgaattaaagaattcctctcagctcttcgctttattgttgtactcttaatgttcagtggaccttctgggaaggagctggatgttctacacttttaccgatttccttcaaaactgcagttggataccttagcaagactcattcatctggggatatttagcctttcctattgggtttgacatttcagaatccattgcttaactgtgggaagattgactatgattgagctagacctgtgtggtgagcatggttttaatagtttgcttcccagatctccatccctgtcttaatgactgaagcattccttctaccagctgcttggagtgtgactcagtgacagcttgcagctgagctggtacttagttgggtgtggtggctggcacctttaggcaaggtagcttggcccatggttctcccttgattttacccaatgttctcaaaactaaaatagctcgttagtttaattttcataaaatggaaatttgatagatcatattttatttattatgttgttaaaatgccccactctcctcagtagattcatacactgaaaaaactctttgaagcccttgctgagagtacatcacagctgacctgtgcccgcccttgactccctccaaggtgctgatcctgagagccctccgcagtgaacaccctgcatgcagatctccttcttggaacctgttcctggaaaacccagtctccagcaacctgatatgtaactgcaaatctgcaactctagaccaaccttctaaagagggatttaagacctttttcaagaatctggcttgattttttggcccatggttctccctttattttactcaatgttctcaaaactaaaatggctctttaatttgattttcgtaaaatggaaatttggtagatcatattttatttactatgttgttaaaatgccccaatctcctcagtagattcatacactgaaaaaaaaataaaaaagaaaataccttaactggttcattacattgaatttgcactgggtaaagggttagtaccaactgtgtttttctctgggaggaagaagctccaaacagtaggcaagatttctgtgccttaaagaaatgttactttagcttttcttgcttcaatggcctaatagcagctcttcctgagtacctgtttatatcaccataaaaagggaatgctggttatagctcgttgtagccagagggaagagagatgcttttgtctgtgggattgattccactttaatcctgaacagggtatttggccatcaagtagcctactgactgaggggagaaaattttattttaattttttctcataactgtcaatttcattgggcagctatacatttctggggaatatttgtataatagatggaattatagaagttacgctcacaagcagatattttgagattgattaaagatttagaaagaagtggctgggcgcagtggctcacgcctgtaatcccagcactttgggaggccaaggtgggctgatcacctgaggtcaggagttcaagaccagcctggccaacgtagtgaaaccccatctctacaataattagccgggtatgatggtgggtgcctgtaattccagctacttgggaggctgaggtggaagaatggcttgaacccgggagtcggaggttgcagtgagccgagatcatgccattgcatttcagcctgggcaacagagtgagacgccatctcaaagaaaaaaaaaattagaaagaagtacatttcccaggcttctggggtacctctaagtgagactgacaattttacacataggactgcaaaagttctttatcatacagaagtaaatttctgaagttaaattcattttagagagacaggcacaggatcaagcgtgtgtgaaggagattggacgttttattggcattaaattttgaagcttagttttcagacacagatgaagttgaatattataaagatgaagaaaagaccttttgttagactaattgctctaatattaactcaagaatgggtcaactttctgcaagttaaggtcatgcattctagggaattcgatcttgattttaaataggtgtcatgaatacaaagttagaaataccagtttctccttttatcttacaaaggtgtaggctgagaaaggcactggcatattagctggagaaagactaacaggaagaatataagggttattaaaaatgtttcctactattctctgatctagagaggcatgcaagtgaagatcatattaaatttaagggagagcatattggatgaataacatcagttcaagttttgaaatccttgagaagaaaaaaagagctgagcacggtggctcatgcctgtaatcccagcactttgggaggccaaggcgggtggatcaggaggtcaggagatcgagaccatcctggccaacacggtgaaaccccgtctctactaaaaatacaaaaattagctgggcgtggtggcaggcgcctgtagtcccagctacttgggaggctgaggcaggagaatggcatgaacacgggaggtggagcttgcagtgagccgagatcgcaccactgcactccaggctgggcgacagagcaagactccgtctcaaaaaaaaaaaaaaaaaaaaagaaaaaaatgaaccagcataaatcgacatttagagtacagagagattcgatattaacttctccaattctgtactttacagatggggaaactgagggcaagtgagatttcatgatttctctaagattctggcctcttagtaaccacatttttaagctgtaaaacatataacctggtggctcagagcataaacctctgtgggaggcggtggacagacagatctttctataccatggctacattgtgattctggacacgttacttaacctctcctaatttctgtttcctcagttaaacaatatcaataattatggctcctgaatcacagggatgtcttgaacattaaataaaatagttgctgtagagccttttcataacccattagctactttgaaaagcagattctgaagttgcggaccatggctggttgttcacctggattcctgagccctggaacataatgggtccttaatgaatcaatgaatgaatattacaaacccgaatgtagagacactgcttcatgcattatgcaggctaaaattgtcatccatttaaaatgccaatttaaacagtcttacatttgaacaacatgcagctactttacttttggaatatctagttctgaactcttgtaattgaagtgtaaacttgtgtaacataagcataggtaacatcttctaaatggaggagtggaaggttaaaaggtggcataatctattataagattaaaaacatcatccactaatgagtttgaggttttcatgttttgctctattctatgttactccatttgctatatcttgtagaaaattgtcctgacatattgtggagtaggaggaaaaaagtgagtgtcagaaaaaaaggaattctggcacaaatgtgtccacatatatatttctgcatgcttgtaggaaaatgaagaaaggaaagacttctaatagtaactatgataaaggaactgtgttttccttgaagtgggtggaagtgagttgagtggtcatttgcttttgtatttttgtgcttttgtatttatttatctgcttatctagtaatctatattatttattcatttatacagtgtacattcttaccttttgtaatacaatgaaaacaatattatgaccctaattgaccagagacaaggaacagtggttggaaggtgatttcttttagtgaatctatttaagttaaaatattttgaaaatcccttctctatgtcgtaagggtacatactcagatattgtattgtgttgtcttaaaagacatcatccagtaacatcactaaatttttctcttatgtatcttttgggaccttggagagcaacagatcatgttcatccatatgtaaattaatccatttgtcactttcactgtatattttgtgttgcaggagaattagtgaggcggtgttactttctgcaccttagcataattattgtgtcattgtcagagacagtgtaaatcttgacatttacaatggaatatattttcctttagtgaccattactaatgttgttttaattaaaagcactgatagctcagggttttcagcaacatctctcccattgtcataaattagaggattaaattgtcttatttcatatcctactatgtttaccaagggaacaatagcaattctagtttgtcaaaggagagaaagatgggatttggattaatctgctcatatatttaagaattgcagcttgggtcagtgagagactgtggtcagattgagcaattgggaagaggaagttgggtcatgttttcagagtaaatcaagctgatttggaaataaaatgtaccttgataatttgtttacttttaatttttgtcacactgcaagtgttggtgtttgctgttacgtagcaaaattacattcaatatttaagggccacgatcctggtgaactgtataaagagtatgttttgtttaggacaataatagaaagtggggaaggagaaaatcatgttctattgagcttattttattcacaagctagtatttttgcagattttcactctttagccaaaaaagactttttttctcccctgtggaagaataaagccatctaactgtcatttaagggcagtcacttgtaatgcaaatatagaaatatggaaatattgacagatatgagctatatgcatcagcattctgagtttgaaattaataataatgggacactgactaatagctggttctgtacagcactatatgcttgtacagggtaaacagttactaccggtgaccccaatttcatggatgaagaagttggggatcagagcactgtcaaagcttgtcctaggccacatggtcaagagagatgaacctagaatttgaacttgggaatgtttaattaattcttaatttaactcttgggataaggtttaaacattgctgttactcccttgggagagagaggaggattcttacatgccatgctagattttctgtattcatcctttttaattctcttttcactaatcctttaaggcatgtgttattaacttcatttaagttttcaggaaactcaggctccaagaatttggaagttgtccagagttacagacagggtaaaggattggatagagtttgaatttgtatttgtggtaccggtgtccatgctagttctgttacctatacctaccctgatacagacagacctagaagtctcatcagaatgctggatggatgaggaagtgtgggtgaatcaggcatcacccacaaagactgcgtctgtgaatgttctgctaatatggcagttattgtactgctatgcagccaataatagtggaattattactgagtgggaggctctgtgtttcacttatgttgtctctatggccaatttaaaaacatctctgtgtacattagtaaggttaagacacagattaatcaatcacatttacacaaacaagatgctcacatccaccgtttatggttaatcacattacttgaccaagtagcaatacagcataatggttaaatctgggattcaatggaatctcagtctattctgacgtgttgtcactgaactcattttacaggtaaagaagtttgggcttggagggatgcacaattcactgaagattgctcacctcggaacaggaggagcgaggggctcagatccatgccttctctgcttaatctctgctatattgatgcatagtcctgtagccaatccttgtaattttaatattagtaacagggctaggtgaataccccaggttaccacttgaagattgtctcttttagatatgttctcaaactgctttatttacctgatcctctgcaaatgaggagaaacttcaagaagttgctaaatgaaaaagttaaaaagtggattttaaggaaactaaagtgaatgccatacaactgacttgaaaaaacaaaggaagaagatgcagcaggggtttgagcactctttgtgggtttatttctttaggaaaaaagactaaagctaaattccatagttagaatctttagaagaatcttaataaccaagatcatcaccaatataataaactaaatttgaacactggacacgaaaaaaatagggaaggccacatagatgtcaataaacatttttcttctttttattgtcattgttttgctgaattttataatattttccttttaataacctaatatgaacctactgccccaatacaaaattatcattttggtatatttcttcctatttttttctcctaaacattgaaagtttcacatggttacaaggatcacatatttacaatgtcatacccagtgtatttttttttttttttttttttgagatggagtttcactcttgttgcccgggctggagtatagtggcacgatctcggctcaccacaacctctacctcccggattcaagcgattctcctgcctcagcctcctgagtagctgggattacgggcatgtgccaccatgcccggctaattttgtatttttagtagtaatggggtttctccatgttggtcaggctggtctcgaactcccaacctcaggtgattcgcctgtctcagcctcccaaagtgctgggattacaggcgtgagccaaccgcacccggccgtgtatatttttaaatgtattttgttatgttgtaaatacttccccaaatcatcattttaactttaaaactgtgagtttgaagtctatgatgactaggtacgtagtttacttgatagtaaaaacatttaagttgtttttaactaaaagtgacactcaggcttgtaactttgaccatgttttagattgtttccttggaatggatgtgataatgaagttagagagtttgaatatttttatggctcttaatacatattacaaattaacttccctatgggctacgatttacattacagccagtttttaaggctagaaatctggcagtggggctgggcgcggtggctcacgcctgtaatcccagcactttgggaggccaaggcgggtggatcaggaggtcaggagatcgagactatcctggctaacacgatgaaaccccatctctactaaaaatacaaaaaattagctgggcgtggtggtgggcgcctgtagacccagctactcaggaggttgaggcaggagaatggcatgaacccgggaggcggagcttgcagtgagccgagattgcggcactgcactctagcctgggtgacagagcgagactcactctcaaaaaaaaaaaaaaaaaaaaaaaaaagaagaaaaggaaaaagaaaaaataaatctggcagtgggccacagaggtagctgatgttctatttgttttgcagtcatccatgcactggttataggatgtggctcagaatcccaaactaagtaataaaacaaagtcatatgtagagtccaatgtgtatatttcgacccttagcatgaagatacatacagtgttttgtgacttccataatttagagtctctgtaaattctttaactcatttaggtatttcattgtaaccaaagaaaacttaaatatgacttagcaatggtgagctgtgctgtgttcagcacattaataaatgccaccaaatgatttcaatgaacatttttagttcatttgttctgaaactagaaagaagacacttaatattggtttctgacttttgagcaaattttatttcctcggttaatactctgaatgtaatttacttgctatgcttgctaacaatggaaagcattgaatttggttttgtggcttatgctctttatcaattatatgccattgataaagttgtctacctccactgcaatactgggaaggttaataaagagagagcgtgctcatttgagtcagttctgtactgacagaacgtgcatctctggctatttgtggtatgtatatggcctatcagaaactacaataataattgagaccaatttaataaccattataccagtgacctagtcattcttgtagtttggtatatttaatgcatttacattcatttgtggatccatgtagaccacacattcattcatctattcaacgacttttcattgagtatcttctatgtataaggtaattctttgtaccaggagataactggtgaatcagagtaaaccagaaaatagatgaatggttagtatcgttgctctgctatgcactcatttaatgagtcattttaggattactatagcaacactattaaaaattttacagtcattcacatggctcgaaattcaagaattaaaagttcaaaagggtatacaggaaagattctctcacccgtctacccagagccaccaattctcctcaagagggcaatcaattttatagtttcttctctttcagccatatttcaagcatatatcagcatatacatatataggtatatttgtatatatgtcatgtgtgtgtacaccgcattttttccccacaaaaatagtatatatgcgctatccattattctctaactaccttgtgtcacttaataaatttcaaaaagctcttttaattattacttaaagattggccacatttcttttttattcctgtcagcatggtatttcattgtgttagatattctattaattttgaattcttgttgattatattttatcattattataaatagtactacaatgcatatctttacataagttgctttcacttagatttttttccttaataactagaattgcaaattaaagtggagcaagtttctatggctattgaaaaatattcttcaagttataatctggaaatattgatctacagtatgcacagaatactatgttttgtgtaagaagtgggggtaagactgtatatttgtatttgtatatatgtgcttgtgtttgcacaaggaaataatgcatttagttgtaagtcagtgactgggtctggtgcaggggtaggaaatagaggtggaaagcaggctaattaatatatacctctgaaataattttgaattttgatccatgtgaatgtattactttttcaaaaaattaatattaactataaaattaaaaatcaaagtatatttctttattattctgccattttcaatatatgagtacacatggatttttttaaaaaataattttatagactggggtattggaaaagtagtataatcaggtggaatgcaggaagtcacaaagtggacctggccttggaacgtgttcattggttggatctaattcatagttttgttgcttttattcttgattttttttaaaaaaatggaaaagtaatgaagtgtttcccaaatgtcatttattcatcctcttcacagtctttgtcatatgtgtgaatagttttcactgttattcacttactacttcactaaaataatttatttttcttttttttggatttttatagcagtgccattaacaaaaagccaatattattttccatgagtagaagctgcataaattggagctccttcagagaagaagaaccacaggaagatatttaattagaggtttggtttggggattttggggattatttcttttgcacttgtaggaacctggtttgcagggtctaggtgctcctagtgctgaaacctgacatcagaagtgaagatggacataaaatgaggtgattgaagacaaactgcagcctatgaagatgggctagaagcatctgattttcaaagcccccaatccaccaacttcaaagatggggtcatcttgtaaggagaagagctaagcaggtgcttggccgaggtttctgaggagctgaaggaggatctggaagcagttaaagtagttgcagcccagctgttgtccatgccaccctggtgaaccagcacatcagagacagtgcgcatgagtgagagtagtgtgcactgccctgagcttccagcggggaagctcaccttcaccttcccacatcctacaatatggctaactttgtccaccttccagatctggctaccctcaatatggctaccctaaccttcccacatcctacaataaggctacctttgtccaccttctagatctcgcggtccaccctaattctgacctgtgcaaggaaagcaattctttgaaaaatagttctagtttaactgagctgatataatacaaatccactgcaaaagataactaaaaataaatacaatgaaaatgaagcaatattagacacattgttcaatgaaggcactgagcctgaggctttctcttgttgaaaagcaagatctggaagttttagggggggtttaaaattattgttacccactgaatggaacttctccttgactcactcagaaggactgacatgaaaaatgagtatctttctcaacgtgaggttctgtgccatttgttgcctctcccaatacagtttcttcttctctctcagttgaaggaggatacaggggtgattggagatggtgtcatgctatccttggccttatctgcatttctgcttcttaaacgaatgaaatgatgaactagatgatcatatggtagacagaagggaaaagagtgattttatttatctgtagacagagctctttgaagacctgtcatgggcacacatcaaagacaaatgttgtgtgcatcaaaggcttgttggcttttgaggtggtaggtgagaaaaaagcatagtttggctcatatctgtgaaaggtgttttggccatctcagtacccattggagaattttgtgtagctaaagagacctcatgactttgagtttctggcagacctactaactgtggatggaagcaccaggggctggcttctcactgagatgcttctattcatatctgtcccggtggcattccccaagtggtgtctcctggatcccctccatccttgaatctgtgcctcatcccacaccccactgctcaggtttgaattggttctgcagtttaccagtggtttgaccttggggaagtcacttcaagtccctgcaatgtagggatattataggctccaaatcactgggtagttgtgaggattaaatcaggggttggtaaattatgatccaaaggccaaaatgcccctctctcctgcttgtttttgcaaataaactttcacgggaacacagccatacccattagtttacatgtaatctgtggctgtttgcacacctcgcagcagcaagttgagcagttgtggcagagaccctgtggctcacaaagcctaaggtatttactgaaaaagttagctgacccctggattaaacaagtgaatacctataaattcaattcccaaatgtttatgggctgctatattgaggtattgagcctataagagtgaagaaacacagacaaaagtccctgccctcatggagcttacagttcaaggagggaaacagataataaagcaaaaagaaaacccccaaaatgtaaaatatatgtaaagtgatttagtggtatggagggggaaatgcaggaaataaagagaaagagagagaaagagagagtatagggggtgggagatgcaattttaattagggtcattagggaaccttcactgaaagagtaacatgacatcagagccatgtggacacatgaagaagagggttccaggcagaaggaacagccagcataaaaggacaagagccttgaggtgagagtgtgtgtctgagtgttcagagaccaacagggaggccagtgtactcaaagcccgctgggtggtggagaggagagacctgaagatgctttcagtgagctgggacttccttggccacagacaggatgttgcattttgttcttcatgggaaggaaggcactactggcttgtgagctggggatagtgtgctttggattgcattttaaaaacatcactctggctgcagatggcggccatgagtggcagcttgaactggggttagagctgtagaggtggtgagaagcagcccagctctgcctatattataaaaacagagagttgagaattccctgacagatttggagtgcatcaggaaagaaagagagaagtcaggaagactttgatactttgacttggtcaactgcaggaatgggattaccattaactgcaatgtggaagaaacagagatagggcaagttttggggtcaaggttaagagtcagaatcaaagatgttaattttgagctgccccttagacatcggggtgggattgtttagaacaatgtctgccatgtagtaaattttcaatacatgttggctgtaccatgattggcattattactgaaggcttactcaatacatgccattttatttctttaaattttattttaatgtattttattgagacagggtctttctctgtcacccaggctggagttcagtggcactatcatggctcaccgcagcctccacctcctgggttctagcgatctcccacgtcagcctcccaggtagctgggactacaggtaggtgccaccacgcctggctaatttttacaaacttcttgtagaggcggagtctctccggttgcccaggctggtcttgaactcctgggctcaagtgatcctccctccttggcctctcaaagtgctgggattagaggtatcagccactgctcctggcttgataaatatttttgaatacctgctatgtggcagcactgtagaaacaatgactgagttctggtttctgtcttcatggggagatagagaaacacctggcgatcatacgcgaggtcactgctctgaagcagtgcagctttcggggaatcacagactctgcctgggtcctaaacatgatttctttgaagttagccatttacagtttatttaatctatctatatccttgtcctcatctataaaataggaacatcaactttatttggataatgcatctaagtgctcagtaaacaccagctgttagtataacataaaggattctataaaatcagtcatttgtttcacaaatattttttgagtacttattaccacgttacaggagtttggaaagtacttgggatacagtatgaacaagaacaccctgcctttaaggagatcaagggggactgagtggggataaataaatgaaaatgataggtcgaggtaataactacatagaaaataaaaatatatatgttctacagcagcactgtccaatggagacataattagaggccacatgtgagccacatgtacaatttaacatttcctagaagccacattaaaaaataaagtgaaataggtgaaattaactttaatgctatattttatttaatcaaatatatccaagacattatcatcttaacccataaaaatataaaaattattaatcaaacattctacattatcttttctactaaggcatcaaaaatccggtattttacgccctgtggcacaattcttttcagcctagccacatttcaagtgcttgaaagctacatgttgctgatggtggttgtcacattgcacagtgcaggtgttgaatgatgaggtgtctgctttagactgaatggtcaggggaagatgagatcttatgacaggaaggacccagccatgagaaatttgaaggaagccctcatgggtacaagatagaactaggcaaagaacctagggcaggaatgggcttcttatgataattaaaagcagatcaacaaagccactggggccacaccctagagaagaaaaaggatagtcatatcacaatggagaattatttggggccagttctggtaggagtttaaagagttcatgatgaggagagtggatgcattctaagtgtattgagaacccgtggaggatttaagaagggaagtgatatgattaagctatcactgactgctatgcagagagtagaatgttaacagcaagcatgtaagcacaaagccatgagaaatacatccagtctagctttagaagctcgaagatggcttggaggaaatgtgtcctaaagaggacttacccatgccaaagttgggtttagacggggttttcagagtcagggggtgttttagacccatagacttcaaacttttctgattatacaatgcatgcaattaaaagtagaactcccagtatttgtataggtgtttatttcctatacatgtgcactgctatcaaaccatgtattgcagtgttattattttactacaatttttcttatttatcccacctccccaccacacataaataaaagtttcattatttttttcttttatcccactgcattttactttggaaatgactgttccaggcagacagaattgcacaggcaaagggctggggatataatgatgcttgtcacacatacgagatggcaggagcttatatctggagggtggaaataaggaagtgggtaaggtgatggtgagggagtgttgagaactgtgcaggggctacctcatgaggagcttgcaggctttgggaatgttttaatttttatatttatttatttatttattttgacacagagtttcgctctttgttgcccaggctggagtgcaatggcgcgatcttggctcactgcaaccagtgcctactgggttcaagtgattctcctgtctcagcctcccaagtagctgggattacaggcatgtgccatcacacctggctgattttgtatttttagtagagacggggtttctccatgttggccaggctggtcttgaactcctgacctcaggtgatctgcaccccttggcctcccagagtgttgggattacaggtgtgagccactgtgcccagctatttatttatttttttagacagagtctcgctgtctcacccaggcttaagtgcagtgacacgatctcggctcactgcaacctccgtctccctggttcatgcgattctcctgtttcagcctcccaagtagctgggattacaggcacacgccaccccacccagctagtttttgtattttggtagagacagggttttgccatgttggccaggccggtcttgaactcccgacctcaagtgatccacttgccttggcctcccaaagtgctgggattacaggtgtgagccaccgcacccggcctaatttttaattttaattttaatttttatgttttgagctggagtcttgtgctgtcacccagcaagggtacagtagtgcagtcatggctcactgtagccttaaactgctgggctccagcgattttcccatctcagcctccccagtagatgggactacagtcgtgcaccactgcacctggttaattttacaatttttttgtagagacaggggtcttgcttttttggcccaggttggtcttgaacaccttgcctcaagcaatcctctcacctccgcctcccaaaatgctgggattatagatctaagccactatgcccagttgggaaagattttaatatattttcatatatgatgggaggccattgctgggttttaagcaagagatggtgtctagtattttggtaagcattttacattcattttctcatcttatttatctttaacatctgcaaagcaggaacaaatgaaagggtttcaagcaagatagtgatgagagcatttattattgagtagaattttctcctttctctcctctccacttctctaattaaattctgtaagttaaaactcatgctggtaaagaccaagctttaatcacagagagaaatttcattctaggacagactgcttgcctgctcacactgacccctgcctccacctgtcccgaaaactaatgctgcctgggagctagtcgactaaaaaccacccagttacactgcgatctggaaatgtccattggaggctttcagacggcagtacatatgcttttaaaaatactggggtggggggatggggggagggagagcattagggaaaatagctcatacatgctgggcttactacctaggtgatgggttgatgggtgtagcaaaccaccatggcacacgcttacctatgtaacaaacctgcacatcctgcacatgtaccgcagaactaaaaataagaattaaaaaaataccgacttacatttttttgtttgcattctttattcatatgggaaatctgctgctataataaacaaagctattcatttttcttactgtaggttctcctttctcccttccttggttaagcaaactcaccctagaaggggctgtttatccacaaatcctcagtaattaagagtcacacttgacacttaattttaaaatatatgtacactaaatagcataacattttaaaaacagctgattttaatctttgtacttgtacagtttttagctttttattagatttaaagagagaagaaaaccattttatgttaaatttttagtcactgttaagagaggtgttttattgccaatctctttaaaccacagccaggcatgtatactcagaaaattactttacataataatgactaactggaaaaactgataatattattgaaacattgagagaaatgttgtggggggttttaaaataaattcaacataggatcccatggcctagttttggaaagaacaactctccttcccgctctactggaatgcagttggcccagcccccgctgccttgcttgagttcccttacattgccctgggttgtgttggcttggaaggctgcctggccttgtgtgcttgctgggctgaaattactctccctgctcggctattgggagcacaccccatctacaaatttgtccacttgatttcactcctgcgcctctggagttgaaagagtagctcattaaaatgggaatgagccagagggctccgcagggctggtttgatcaacactgtccgtggtgctcagcaggacaacacagagtagcatttgcatctgaggacagtcaaacccacatcaccaggcttcaaccacaactgcagtaatagctaccatttattattttctacgggctcaatgctgagctaaacactttcatgtgcttttattaagctttaccttgacttcatgagctaggtagcatcactttggagaatgagggtgctttaagtcacacacttccacttccagggtatcaatgctgcattgaccacttcctagctttgtgactttgggcaagtggactaactcctggatgctcacatttacccatctttaaaatggggatatactacatagagctgttgtatcaagcaggataccatagtgcctgatacatagtaggtgctcaataaaagttattgacattgctttgctaataggtacttaggtttaggaaggtgaagtcacctgcttaacttcctcatgctcataaaacagatattttctctggccttaccaaaagatgaaccaaagaaagtaaagtagaaaaggtggtagatagctgataattttttaaaatgtgtttctagtatgctagtttgttatacatagtttcttggagaatttaaaagccgttggcttaatgttcattcactgtcaactaacactaggtaaacattcatagctgcaatttatattggtgatggtgcaaatggcagaaaattcgatccaaactaagcaaagaggaaggtattggcttatcagattcaaaggcccagggatgcacctgacttgaggaatggctcattgctggagtcagtgacattgatgggacctgattctctcttggcttttctttccttcattctcatacagtctcttcttggggttgcaagatgactgcagcagttttaaaactcatatcctttcagattctttcccaatgagggagagaatgtacttctttttcctaacttttgaagaagcatttttaagcctggccttcattggccaaaattaggtcccatgtccaccattgaatgaatcttgtggcttagatgatggggtaggaggattgggtcaggccattcagtttgctctctgttgaacctgtggctgtgtctaccttatacacaccaacagagcagaggtggcttcaccaaggaaatgtggagtgctgtttacctgtgtgaaagaacagatgccccatgacacaagcagtagaaatccactagactactgaatacataatgagtagactcacctatgaatgtggagacatctgcttcctttcttttcctatttcctgaaagttttctttctgcaaaatatacctattcagagaataaagaaaaaataaagaattatccttctcaagggaaaagagccatccataatgcagtcttttagattttctgctggtcccataaatattgcaatacattgtttatactcagaccatcatgtcatttatgatgattagcaggaactcaaaaggcattgactgacctggacagttacaatttgttaaaaatatgcattgtgatttttttctcatattgggggtcaacttaagaagttgactttgtcatttatacacagtttatttatccatggtaacagcagcctacagtgggcctaattataggcccactaattatttgcctttgggacagtgagggtgataaaacatgggttttgataagaaagtttggcatttttagtagtattcttttatgttaaaatgttgtactttgctttactcttatgaaaacactttttgttaaaaaaagaaatttgctatgaaggataaactccatttcaatggtgtatattagtcttcggcctcagtcactacatagctgctgtaatgtggttctggggaagcccatcaccagagcacgtggcagctgggagtggaagaagggtgcaaagagtaaaggaagcagagaggagcaagagcaaacatttgtgggggcctaagcatgtttcagaaatgttgcgtcaactcttatttcctcataacaaactcatgatgtaggtttgttttgtagacactgctgggcatctcactgatggctttttcccccttatacaccagcagatcctcgggttgtttggggtcatgtgatacccagctaaaataactacatttcccagctcctcagctcatgctcagtcatctgatagggcttctggtgaagccctttaataaggggcagaatatgttggcaacttgtcttttgcctcttcctagagtgtacccagggatgctcctggagattgagcagtcatcttggaactatgggctaataagacatagtaattagttttctgttacattcagctgaatgcaattcctaattagaaaaacattgttcatagtagttaattgagctttttagtgagaattaagcagtcactttttatattcagcctgggacccagcttcaccagtttttccaatttttaaaaacaaaattggaaatcagcttttacgtaaaattttgtcttaaaatattggtttgttttgtttgcttgtttgctttaaatactctgagcaaaaaaaaaaaaaaaaaaaaaaaaaacccaacatccatttgtaggccaccattttgccaccactggtcatttattgctttcatttattcacttaacaaaccatggagatgttgaaagtaattcagaagtgtgtcactaaaggactagagaataagactgtcaaaggaagatttttaaaacgtgagattattaaagttgaagaagagtgggctgtgcattggctaattaatagttttcaaatatatgaagggattttagacagctgatgttgactatcctttgtcttctgcagaatagggtaaaaaagaaaacacaattatttttcaggagaagaattttgaataaatgaataaatacgagaacagttttctaggtgctgagaattattaaattttagcagaggaaggggctgtgggcctttattttgtaaagtttttttgaattaggacagattatcagagagaaatttgtgtggttttggtgaccttggaattacctcccatctggaattttgagattcagattacttattctgaagggattcaatagctgcaccctactttttgtactcattgtgcactgcaggatgcaattcaagggaatagctgggaagtccgaagtggttttggattctgatttcttgacaaagtcgttggtacctcctaagccatcactgctccagttaagggacatgtggctctgaatacagggctccttttggagtctcccctgggatgtcacatcttctggtttgacagatgccaacttgacatttttctcctctttcattattctgaataattctgcaaagccctcatcctcccagcactatatgtactaagcgtgagaatttgccttttccacttgtcaaaatatgttaagagtttgtaggagtccaaggtcatgcttcagttttcagacagaagaggaattccaagaattccagaaatggcaggagatctcttttcttgctaactttggttcaggtgtgctttaaaaattcaacatttaatgggctgttaaatattccttcctcttgctgaggaacttcaagttattttaatatatattgagggttgcctagtaactacagctttactagcttactgagagaagttttactctttttttttttttttttttttggctacagaaaggcaatcaggggagagcaattggagatggcttcatggagaaaaggaggaggaatatggtgtctctttgggacttgaggtcatgtaaaactgatgttagaagaaacatgtaggtccctgtctgaggcaattagaagcaagttcaaggaaatcatcttccacttaatctttgcttatgctgaatagtttgagtgaatgatgtcacagggagttgaattaccaaaatgctcacctgccttcccccatttctccctcccttcctccttccatccttctttccgtccctcccttcttctcttcttccttccttcatttctttctttttctttttttaaagaaaataaataatcttactgttctaaggacctaacttcaggctctgagatatgtattagttataattttttttttaaggtgaaatttcactcttgttgcccaggctggagtgcaatggtgcgatcttgactcactgtaatctccgcctcccaggttcaagcaattctcctgccttagcctcccgagtagctgggattacaggcgcccgccaccacacccagctaaattttcctatttttagtagatacgggggtttcactatgttggccaggctggtcttgaattcctgacctcaggccatccaacccgcctcggcctcccaaagtgctggattacaggcatgagccaccgtgcccggccagttatgactgattttataactgaattatttctcttcttaattctgcttcttataacctagtgggaaacaaccaatgaacaagatgaaaatctaattgaaaccaccatttattttcctgagtcagtccaggtttgtaactaatttgtagattatctcaatgttgaactttgctgagttttgtgaggacatggagattttataagccaaggacgtagatatctctgggaggacattttcttgtctaccacagtacatcttgttgctattcattactaaatccttactttgagatcttaaaacagggaacatcctaccaatgtcagttcagatgcaaatttgtttgagcttgtgttctctcttgattaatacatttcagagagttaatttgtttaccaagaagaaaatcatttttttgtattggttaccaatgaaaagtggcatagtccaactaaagagagtacgcaaagatgggttttgtacctcctggggagatgctagctacccagaaacgtagactaataataaataagattactggccatcagccggttttgccaggtgatggcatgaatgttcaacgtatgcttttatgcaattctgtgatgctgcagtaattggggaaggcattagctgacagcagtccctgattcgatccatctctttctggctctggttacttctgactcataaagtggacagggaaagcaaaaggagaaatgtgtataatagtaaaatgttcacttgcagtgtgtcgtgtacccttaggctaaagatagacaagcatctcagaatctgggtcccatattctcatttccccgtatataattcctcaagtgggcagaagtgtatctggttatataatccagttatagtgggaagagaaactatgtttaaatatgcatagggagaaatcattgtcagctacagatacatatttaattacagtaagaaaaaaatatgaatttgaaaatgatgtgggggttgttttattcaaattggggttctaattcagtctaaaaaaaactgagcagtgttgttgaaatgattgcctcttagcagatagtatgtgtatatgtattctgtagctctgcctgacttaaagaggcttttacaacagatggaaaggcatagtgagagaagaaaataatttaaatttaaccctttgtaaatactctagctttaagggcattttgccttccttgggttgtgggtagagtatgctatcatatctgaactgtgtgttccccttataacatcctgtgctaagtgctcatgctccccaaaattcaggtccctctaaatgatggtgatgggaatccaactctgacagtttgaccccagatgtgtgctttacactgacccaagatatagcctagcaatatacgatgtaaaaattaacattaactcattgactcaactactaaataggtactaaaagtcaagctttttgctagacctgagaatatagaagttgaatttagctcttgccctcaaagaatttacagtctagggggtagacctgctcctaaactagcaattaagtctttaatatctatgcatttattctgcaacactgaatttaaaacaggtttttctcagaagcaattttgtttctacaaactgtctcctgggctcagagtccctcgtgttaccgagttccttgaaagccatgcttattgcttttaaatgcaacatatctcgggttgatgtttttgttctatagtaatcctttcattcccttttttatttgagagtttgaaaataatgttgtgtgcaaaatccctaaggaattagcagagctgatttgattcaaatataacttcccaccctgtgtgcagtgtcatgcccctgagtttcatatacatgagttctaaccccttcttgtctcttgccaagatttatcagcaattggttaacctatttgggttagcttagcttcattttcttcatctgaataatcggcataggtatggattctcacaagaatcagatgctattttacagaagttttataacaagcttaaattttgaaataaaactaaagcatcatgatgtaggcaacatgggataaaattgtagcctaaccactgtgtatgctggagtcacgcaatttgaattatacagtctttgaggtttcatatgttttagtttaaaggctgactttgccatttgtaagctgggtggctttgggtgatttgtttaatatttctctgttagtttccttattagtaaaataaaataataatgttttcttttataggctttataataacgatgaaggtgctggtggagatgataaagtgatgatgatagtgttggtggtgatgatagtgtctctgcagtggctggaatatttatgcaccccccgctccaaatttaaatgtggaaatcctaacccccaaggatttggtattaggagatggggcctttgggaggtgatgaagtcatgaatcacaaataggagtagtgcttttacaaaacagacccccaggtagtcatttatcttttcatcatgtgagaacacagctaaaagattgctgtctatggaccatgaaatgggccctcaccagatgctgaacttgccagtgccttgatcttggacttctcagcctccagagatgagcaataaatttctgttgtttataagccatccagtttatgatgttttgttatagaggcccaaatggactcagccttacagttattaagcccttccttcttgccagtactgtgctgagtactctacatgcatcacctcatagcattctcagttgccccctctggtagctactatcataatccctattttcttttttcttttttattatactttaagttttagggtacatgtgcacaacatgcaagtttgttacatatatatacatgtgccatgttggtgtgctgcacccattaactcgtcatttaacattaggtatatctcctaacgttatccctcccccttccccccaccccacaacaggacccagtgtgtgatgttccccttcctgtgtccatgtgttctcattgttcaattcccacctatgagtgagaacatgtggtgtttggttttttgtccttgtgatagtttgctgagaatgatggtttccagcttcatccatgtccctacaagggacatgaactcatccttttttatggctgcatagtattccatggtgtatatgtgccacattttcttaatccagtctatcattgttggacatttgggttggttccaagtctttgctattgtgaatagtgccgcaataaacatacatgtgcatgtgtctttatagcagcatgctttataatcctttgggtatatacccaataatgggatggctgagtcaaatggtatttctagttctagatccctgaggaatcgccacactgacttccacaatggttgaactagtttacagaaccaccaacaaactaccatcagagtgaagaggcaacctacaaaatgggagaaaatttttgcaatctactcatgtaatgaagggctaatatccagaatctacaatgaactcaaacaaatttacaagaaaaaacaaacaactccatcaacaagtgggcgaaggttatgaacagacacttctgaaaggaaggcatttatgcagccaaaagacacatgaaaaaatgctcatcatcactggccgtcagagagatgcaaatcaaaaccacaatgagataccatctcacaccagttagaatggcgatcattaaaaagtcaggaaacaacaggtgctggagaggatgtgaagaaataggagcacttttacataatccctattttcaatgagaagttgaggcttgtggagttgcttaacatgtccaggatcacctaatgctccaacataagtttgattaactttaatacttttaatatatattgtgtctcagttaatgttttattgtgctctagtagtttaaactgcgttatcttgtatcaagaattcaggtgtaataaagattaaaagggacatgatgtatgtttaatatttagcatctgttccatagtaaatgctaaataactattagatatttaattggtattagatctatttcttttttaacttataaattataatagttattgattctattattgcctttaaaatttaaaaccattctgaaatgatgaaatggtttattctcctctataaggatgcaaaagttactattgcccatatcactgaagatgagggaatgccaagatttttaaaatttctacagaatagcaaaaatagtttcatcatttaggtcaaagtttcaagtttgagtaaggcttatattcatttttttcaaataactagcttgtatttttaaacaaatatcactaaagtctataatatcattatcttatgattcagtaaagaaagagaaataagctgtttaaatatgatgccatacaaattcattcaaaagagaatgatgcattcaataactatgtttgtgaatttggctctatgctatgagatacccaatttgtcttattttatccttgaattcatacttctttaagcttcaaggagatgtgatgcattagaaattgtagattatctgtggcaaatttgactccaggcttttagtaacacctcatttcaaattctcaaaagagaatcctgttgtcttaatgttttggtcttcgacatccaagtgtgttttaacctctatggtgcacatacctgcccaccactgctccttgacctgcagcttcactgaacatttgaactcttgttgcaatgcttatgttattgggcccctccacatccttgccacagttgattgaaccaaaggcaactcagtagaacactcctaatcctgccccctaaaccctccccgtaagtccttgtcatctcagtaaacgacatctccaatcttccacttgcttaggttatcaaccttaagtcactcttgagttctctctttttctcacattttattagcaaattctaagccccttatcaaattccattagctctgtgttcaaaacacatctggatatagtgattgatacccctgttgtttccactctaggtcaagatttcatatataatcacctgggctattgcaatcaccttctaacttgtttccttttctacccctgcccatttttgattgaggtgatttttgagactgtaagatcataccactcctctgctcaaaattctgcaagtcttggccaggtaaggtggctcatacccataatcccagcactttgggaggtgaaggcaggaggattttttgagctcaggagtttaagaccactctgggcaacacagcaagatctcatctctactaaaaataataataaaaaattatctgggtgtggtggtgtgtgcttatagtcctagctacttggaaagactgaagcaggaggacttgcttgagcccaggaggttgagtcagcagtgagctatgatcatgccactgcactccagtctaagcaacaaagcaaaaccctgtctcaaaacaaaccaacaaaaaacaacaaaaaaacctacatgtcttatattttacgtataataaaatacagagtccttcatggcctctgaagtttcccatgattgtgtgtctgcatccttctgtgatgtggtcttctatcacccttccctttactctgtaagctgacttgctttttcttaattatggtagacacacttgccccagggtctttgcacttaccctctcctaagaatgatctttccctgcttgtggctcggcttgctcccttacatcacctggccttctggttgaatggtgcctgcttgagggacctgtgagcaaccttcgaggcagcacctctctccctcatggcacttaccatctgttatctggtatcatgtcacttttcaccagctgtggtatcctttttttaatgacatgacttctgacatcacatttgctgttctctttttccataccaattctccaataataattagtgctcagcaagttaattcaatgctggtactaactcctggagcttgtagagatcccgctggttaaaggctcaatcccacaagactgtccctacttcagacgccaaccacaagggggtcccagcctacccacacctgtttagcagactagaaatttataggttcccattctcaggtttcataattcactagaacaactcacagaactcaagaaaacactttacttatatttactggattattataaaggattcgactcaggaacaggcataaaagaaatgtatatggtatggggtgtgatgtgaggagcttctgtgtcctcttgagggatgccatcctcccaggatctcagtgtgttcaccagtctggaagctccccagatcttgtcatctaggtgcttttatgaagatttcattacttaggcatgattaattgaatcattggacattggtgattagctctatctttagctcctctccagctggggttgggactgaaagttccaactctccaatcacaacgttggttcttctgcccagttgagagtcacctcattatcataaactcaagactggttgaaaggggctagttttgaatcacaagagacactcctaaaattccagtcacttttgtcactcaggacattccaggggtttgggagtctctgtgctggaaccagggacaaagatgaaatacatgtttcttgttatatcacaccagccaaactgcttcatattgttcttgggtgttgtctgtccccacttgcaagaacttagctctacagaaacaagtcacttttgccagttttattactggtctcatttagcaccccaagcagtgcctaatacaccacagaccaggggtgtctgatcttttgtcttccctgggccacattggaagaattgtcttgggccacacctaaaacacaccaacactaacgatagctgatgagctttaaaaaaaagcacataaagatctcataatgttttaagaaagtttacgaatttgtgttgggcggcatttaaagccatcctgggctgcatgtagaccatgggtcgcaggttagacaagcttgccatagacactcaatcagtacttactgaatgaattacttacgtgaattaaattggacattaattaatgcaatacttcatggaggaagaccataggtagaggcagacatgagtgaaaacacgctccatgagggtcggagacagagaaggagagaaaacaaagttgttttctttttctttttctttctttctttttttttttttttgagacagagcctcgctctgttgtccaggctggagtgcagtggtgtgatcttggctcactgcaacctctgtctcccgggttcaagcaactctcctgcctcagcttcgtaagtagctgggattacaggcgtccactacctggcttatttttgtatttttagtagagacagggtttcaccatgtcggccaggctggtcttgaaatcctgacctcaagtgatccacttacctcggcctcccaaagtgctgggattacaggtgtgagccaccgcgcctggcccaaagttgttttctgaagagctttctggttggatttttactttttcatgatactttgttttacttctttttcttggaaaattctctgagctttgcctctgtcctgaaaacaaattctccttttcttaagtaaggttgagtgggttttccatttgttgtaagccaaaataccttggcaaatgtaatccttctaagcctattagagtaaaaaaagtatgtctggtacataataggtgctcaaaaatatttgctgaatgaatgaatgatagctacaaagagaaaggcttgtatttcctattggcttcagggagaaagttctaacacatttgattcctggccattgtagtgccaaagtcagaaatgcattaagctttctgaaaggaaccatcaaacttggcctctttgagggcacttaacttcaaagctccaatagaaatattacaactattaattaaataactttattttttgggctgggcatggtggctcaagcctgtaatcccagcactttgggaggccaaggtgggtagattgcctgaggtcaggagttcgagaccagcctgaccaacatggtgaaccccatctctactaaaaatacaaaaattagctgggcatggtggcccatgcctgttatcccagctactctggaggctgaggcaggagaattgcttcaacctgagaagcagaggttgcagtgagccaagatcatgccactgcactcaagcctgtgtgacagtgagactctgtctcaaaaaattcaatcaaccaaatcaaataaataaataactgcctttttttgttgttgctttgagatggagttttgttcttgtcgcccaggctggtctgcaatggcgcaatctcggctcactgcaacctccatctcctgggttcaagcaattctcctgcctcagcctcccaagtagctgggattacaggtgtgcaccaccacatttgtctaaatgtatttttagtagagttggggtttcaccatgttggtcaggctggtctcaaacttctgacctcaggtaatccacatgccttggcctcccgaagtgctgggattacagacatgagccaccgcgcccagccaaagaaatgtatttaaggtcagcatcagggactgaattttttctgcctgcagaattgaaaactgtggatgctgttctgtgaatctccttcatagcaggcttgaaaagttgttctgggactaaacgtttgttaaatgggggttaacaatggttcactctgttcacctctcaccctactccatgcatctcccagttctagcccaacgtttatgccctcccactgtgagatgatggaaggctgaggggagaaaagtagtgtggtggaggaggggagaaagattgtgctggggaagtctgggattggagaaacagaagggtgttaatgcgaaagaaggatgaagtgaggggcagcttagcttcaggtaaagatccaactcgggatgtttctcactttgcccctttgttctcagaatcagcgtggttcacttgacaacataaacagatatatgctgttaaatggcccattagaatgcaatgaacatgagcaggacttaccctttgaaactgaacagttcctggaaactcctaactctgcttttctgaccacaggctcctctcgaattatctgattttaggaaaatctattagctgtgactaacactgaaacagcctattgtatgcctcaggacctgccttctctcctggaaccatactgtggggtagctatgaagatgttggttgtatttccttcattattcaataggaaaaactgagaccaagaggagttagagaatgtgtttgcccaaagtcacacagtagaaggacagctggctttcaaactcagctttctctgactattaaagccaacttagaacatacagcatttcttgaagttttaatattcttcctctcctaatttgttttttctttcttggtaactaattttcactaagacagtttgcatgctcttgagcttatagctgaaactgatctatgccagtctttctttaattaaaaatcaggccttaaaagggggatggaaaaggttgagtttttgtcactttttgcagcttgtatgttatagtgcttggctgtgatttgttttcagccagaggacagccctttggagaagaacattatttgagggtgttcccaagcgggtgatggtcactgtccagtgggagagcaggcggaagttcttaccctgctcacatgttaaataatccaagtggcattgctctgagcacttgtgttatttatagtgggtctaattatgagtgtccttgccctgaaaggaagttgtcttccccaagggtgggtgacagactaacaaactattgagctctagcaggagaacgtggagtcctgtcctcttagttggttgaaaatcattaaattacccacctgattaactagcgggtacagaggaatattacaatattacagggacaaatgggaatatactaattgggtcaagatgaattcccttttggacttgaacattaaaattcttattttattttcaaatatgcatcctttgaacgtatttatgcagggaatatgcactgtcagagaaaacatccattgaagtaccctaaagagcaagtaacatatggtgcttttgttagtttttattactgcactttatttctgaatagctgataataattgtgagacacttaaggctacaggtaagaaagaatatggaaaaatctagatgcagatctggtcttgagatgttaaagcctgttactcaacctgttggaagtttcttcctctacaatggagacaagaataatattagctgggagagttaaataggctacattgatgcagaagtccagattttaggcttttactaaatattgatcattattctccatttgaaagtaaaccatgttttactgccaatttttacgatgaaaaaatttttgtggttttgcaaaggtaatttaggcaatcctttgatctccgctgaaatgatagagggatttgttagaagttgtattcaggccttctaatgcttcccatttgctgattcaatgtatttggaagatttgcctacagattcggggccaaacattgagacacaaatagactttttgttttaaatttgtgcacttgagtgtgatattttttcatgccagcttccagtgacaggctgcatagtttattttctgtggcaaccactttccctcactaagttttactctttaagtctagctgcctctcccattaaggttcacccttctctgatctctggcccagaagcctgcgtgaaagtaaaccaagatttttctttttttttttttttaactatttcctgcattcctctcttttaggtttgatgaggtcagatttcagaattgccaagctgtttcttccttcctctattcataatgttggataaagacaggctgtttaaagagcactttcagtctgaggggtgtcttttctgtgcattgtgaagggtgaggccccaaagctgggacgacgacggcatggcgccaggatccatggagttttagctagtgaatattcaggaaagaaatgtatttgtgtcctttgatccagagctggctacccagggtgctggctggcaagtgaaaggaaacatggaagctgacaagtctgatgttaaagaacattaggagttgtgattgtcttcttaggacccaaactgaactttcttgctgcagactcttggtttgcttatgaaccaagtgagtacttggcagaaaccaagtatatgggatttttaaaaaccccaaaatttaagaacacaaagaagatgtccaatttctagaagttccctagagccatgtaattaaactgtgtgtttttttcagaaatacctggaacacctccattttccaataataggtatctctttatatacatggctgtgtctgaactcccggagaaaagagtagggctgtctgttttcgaaaagcagtctttttttccctttctgaataccagagaaagaaaagtgcaatttcttattcagaggtggagatgctttaagatcaattgcttaactagaaggaggtaatatctatgaaacaatgaggttatagttattatagtccatgttacatattgaggtacaattttcctggtttattgttgttgtttaattttactgggaagtggttcaaaatagttgaggtttctgtagaggtctgataaggatactgagataattgtagttttagaggaaagaacaattcacgaaagttatttccttaatatttctgtctaaaattaaaagcttgagcaacttgcctgaaaacatggattttgaatgatatatggggtctgtttgacccatataattgcaattctaattccaatggcaaatttcaggatctttcgttcagaattcaccttctgtttgagaatggccattttaaaagttttttttaaattcaatttttttcctctacaattaatagctattttatggtttgactaatggagatacatttcaagcgtacattcatgtgcttaggattttatgaagcttccttacacttgcaattccctggctgttaccaggaaacagccctcagctcgctgctttcacagaaccatatattgttatggcatccacagctaaattcaaatcgaagagcaaacctctcaggtttgtgtgctattaggtgatacatgcttcagttcccactatgagggaggtcaaccccagagagctttttgttatttccccaaaatggaagctgggaaacaaagttgcttccttaagaataaagtaaaacttacttccctgggaaggtggaagtgagtagaaatggatttgagaaagaaagaacattttaaacaagaattcaacaaagtggcaaaggaatacagggaaccagtttgtgtccaccagtaagatttaaggttggtgtatccttgcagtggaaagctgtgtatgcattagaaaaaaatagttagggctatggatattaagtggaaagttgcctttgatttgctttctacaggaagagtaaaggagaacactgtggaacataatacatagttgatgcgatcctcttaatttttaaaaatacacacatatactgggcgtggtggctcatgcccgtaatcccagcattttgggaggctgagatgggtggatcacctgaggtcaggtatttgagaccagcctgaccaacatggtgaaaccctgtctctaccaaaaatacaaaaagttagttgggcgtgatggtaggcgcctgtaatcccagctactcaggaggctgaggcaggagaatcacttgaacctgtggggcgaggttgcagtgagctgagatcgtaccattgcatccagcctgggcaacaagaatgaaactccgtctcaaaacaaaacaaaccaaacaaaaactcatacatgtatagataaataggaagatagaattatatctctatgggaattagctttggctgcagataccctcaaactcagaataatagtagcttattaaggtcgtttagttttctttcatgggaaagaagttaaagttagtatcgtagttccatggtcaacaggaaacctggtatctttcatgtgtctgctccaccattcttgtatacggcttcccacctagaggttacctcatggtccaagatggctgttgaagctccacgcatcatgtatcttcatgaccagaaaaaggagggatggaagaagagtaaactaattttgtcccttctcattttaaaaaagccttcttggaaagctcacacaaaacttcttatatctccttggccaatatttggtcacttggctttacctggaagaatagaaaatacagtccctcagctggcacattgccgagggttttgtactgccaaataaaaagagaatgactgctgggaggcagctttttggaactgctgcaagtggcttcctttggtcactagaagtggagatgaagagcgggaacccttccattttcttctttatatacttttgtactgttgtattttaaaataatgagttaaaaaaaaagcagagggatgcatattttaaagaagaaatgaaaacctaagtggagttgtggtaagtcatcagtccaagattagcgacatgatagaaaagatgattctctatcttgcttggacctactctttgatgttaaagcatctttgcatctttgaatggatcacctcctgcatgactgttctctgggtcctgagcagggagagacaaccaggtgcatacacaatttggatttcatggtctttttatctctactaaaactatttgcagagatacagttctaatgacaaatgctaattattggctgtcacttagccttctaatgattaaatgcaaaggcattagggtgttaaggaagatagacataattataataataagactaaaatatatggaatgctttcttgaagtagtatattccattgaacaataattgctcttcaattgcagttttaatattctaaacctcaacttctcaccttgaaatactactactaataatagttcctttataaatcatggaattgttataagagttaaagaagataatgctgattaggtgacaggctgtcccttaataaatgctcaataaatgcaagatgaggatgattttattgttggcatagcatgtgccaggcattctgtaattattttgaattttacccccaacaacaagtttataagggtgactttaaaaaaaaaaacagcattattgggatataattcatataccataagattcatccttttaaagtgtataattcagtatttttagcatatttacactgttgtgtaaccatcatcacaatgtaaatttagaacgttttcatcattccatagagaattcccgtacccattaacagtagtcacttctcattttcccttccatcaatttctgaaaaccacaaatccactttctgttttcatgcattggcttcttttggaaatgttgtataagtgaaatcctacaatacatggtcttttgtgtctggcttctttcacttagtacattgtttttgaagtttcatctatgttgtagcatgcattagtactgcattcctttttaaggctaaatgatattccattgtgtggatagaccacattttgtttatctattcatccatttatacatttgggtttgttaaattaagtttagcctacaactgtctctttttatatattttaagtttagcctaaaggttttttgtcaactgtagtttactcttgtgtcaattactgaattttggctaatcaaagatgaccaactgtttaaatcatgcacaagtgccatggtgtgaccaatttggctatttctgtatctcacttttgtttctttgtcctttatttggtgtgtgtctataaatccttttttactatgtggctatgctaaagtctctgtaagcctattctggcttgagagtctgccctattactcattatttatttgacatattttgagatggctgttcagggggccagcagacagaagcaacctgcaaagctgttttctatgggcgagatttgcatctgtagagagtctacattgaggcagccaaccctacccttgtcttgatctacggaagattaactgagagtctgacacctttaaagaagaaacatttactatctcttctctctgagggctgctacctgtttgatttcatttacacaagaccacctttgctaaccaagcctcctcttctctacttcccatgacctgtcttgccagtctaacctggtttatcagcctagcctaatttgggccatcctgagccctcattctttctgtaacctcaagatggtttataagcttctgcaccccatcgggtagttggggtattcactctgtggttctctcccatgtgcacgttaataaatttgtatgccttttcccctattaatctgtcttttttgagttgattttttaagacagcctttagagggtgaagggaagcttcctttcacccctgcaataccctgtacacccattatttcccaaatgtaagaatatatatgacccacataagaatataagaataaaggggtaagctaagttcctgtgagcggaattgcaggatcagaagatgtgtatattatgaggaacactcttgtcaagttgcccttccatggagactgtctgaaccacactcctatgtgttatgaagagcttgaggcaatatttctgtctggaccaattataaagaatagttgtgactttcctcagtaattggtttgtttttgtcttatggagaatgttattcacaacttaccaagcttggattatgttgcttgcttagagcctttgtggtccatcatgaatgtctgtgaaactatattctgaacgtttgttagtgtcactccactttcatatattatgtggtattggaaaagcctttcactggagcttaaaattctcactcaggtgaatcttgagtcaatttcaattttagtcatagaaccccagagctccaaaagactaaagcgtcaagaacctagtttatagccagggaagtctttcaattttgagtgagtttgggtaaaattcactatagatagaacacctaaggataaattgatattatagaggaaataaatcaccagcttctctcattttataacaaatcagagtaagaatgccattccagggctttgcaatattcagcaacctcctacaagcttctttttgtctttggatacaaggaagatagaagttgagtctcttgcctccacgtattactattggagacaaagtcttggggaagtcaggttccaattagtttctaggggaaaggctctcactttcttcatatcctttgaaaaagcaatccagtaaaactttacaaagtttccaagaaagcgcaaagaaagatttatgtgaatgccactggctctactgatgttatgtattctttaagttggggattcatttatttcttcattttacttggaaactgttttgttttgtgctcaccatgacccaattactataatttgagcagtgcataaagcaggctctgcccctcatagaatttacagtctaaagagagataattatacaaacaattactttaagtgtagtttgtttatgatggagaaaggtcatgtgttctgagtgtggatgagaggggcctctcatgtaattgatttatgcagcaagcatttgttgaatacctacagtatggtgatccctgtgctagagctggggatacagtaatgaaggctatagacaaataccctccacctctggaagttggagtctagtaagagcatctctcatttattaaacacttatattccaggccttgttctaaggtgatttaaatgtagtaactcatttgaccctctcgacaacccagtgtggtagataggattacaattatctcatgaaggacagagaggttaaacaacctgcccaaggccacactgcatgtacattttggaattaacctgctcgtgggcaggtgggctcctgaggttgtgttcttgactttaattgtatatgcttctccctattctgtgtttatagagaagaaggcattaggagaggtttcctagaacaagtaacatgatacataaaagataagtagccaagtggaagggtgtggaatgggaagattgttccacatagatgcattgcgcccaggtgcaagaaagaaggtggggaaggtggcaatagtttcaggaaagaaaggagcctggtgtgtgggaggctggaggtgggtatatcttcacagcttggcacaagtcttgtaggttgcctgcagactcaagactttatgtgccgggactgctgctgttctcagcctctgttttgtttcttttcatactgagtgatcttcaccgtgtcacttttgctcttgttttctatgtctgcctgctggcagtgactttgctagccaggatcaagtttgggcaagataccaggaggctcagagacctgcgatctgagtggcatttcctcaggccttgtcctgacctcctggcccagagctaattgtgctacctaagtttgaaaatgctttaaaatttcaagtatatcctcctgggacaactggtatgtcttggcttgataaacaagttgatatctatgtctacctgatcctaaggcatttgccactctaatttgtcatcttgttggtttccaacgtgacaagtactttggttgtacattgcctcatccagtagaccaaattctgattaattattccttttaaatctgggataatggctttaattttgagaatcctcttctttgcctaatgccttccttttctcaacttcaacaccattgacatttttgttgcagaaaattctttggtgggggctgttttgtgcgttgtaggatatttgcctgcatccctggtccctacccatgagatgccattagaaacccctctcagttgtgatgaccaaaagcttctccagacattgtcaaatgtccactgggggacaccatcactcctagttgagagctattgctgtaagcataaaggaatagtattcttcacctatagtcctgtgtcattgctatatggattgtgtttatgaactggatgatgtattataagaggccatttcacagcatttcaataatttgaaatttaaacatttttttctaacctattgtagttaaattaatacaaataataaaataataaaacatccaattaacaaaagaatgcataataataaaataatagctaaccttattaagcactaagtattgggtaccttatacacatagctgtaagttctgcactaccattatcatcattaacagatggaaaaactgaagctcaaaagggtaagttatttactcaaagcagaatgacagtattttttttactttaattctatctcaagcttctcatatttagagcttaagctgaacctctcttaatattaaatttgtgatataataaacaatatttttatttctgattttgtttattatttgcttgatgccagaagataaattactgctttttctaggaggacaattatatttttgattaatattgtaattttagagaaagtggattcccaaaatgctgatcatttttttcagctagcagtatttatagacagcaaccatactataacttatttgataattatctaatttttgactatttttctagtggattattaaagtattactttattgtcaggagtaaattcctgaagaatgaattcaaaaagaaaatagccagtatggctggactacccattataaaacatggatggtggtaaagattcgtttttgatcaaaccttgggaatttgagctcagggtgcaaagcagggcttaggagagagatgaaattgatttcaaatcttttttgcttctttttttgagacagggtctcactctattgcccaggcgggagtgcagtggtgcaatcatggctcactgcagccttgatccctctgggctcaggtgatcctcccacttcagcctccagagtagctgagactacaggcgcacgccaccatgcccagataatttttgtgttttattgtagagatggggttttgccctgttgtccaggctggtcttgaattcctgggcccaagtgatctgcctgcctcagcctcccaagtcctgagattactggcatgtgccactgccacatttcaaatgtgactccataatgtattagctgtgttaccttgatcacattgcttaagtgtctgagtcctagttgtttaatttgtataaactggacattaacaggtcttagctcacacagtttgggtgacatttaagtgaaagcatacacgtgaaatacttagttgaatacctgtcaactaagcagtgaagatctgtgaggaggaggatgatgatatattacaaatagtgtgctgacagtgcttaatatctctcatccttaaaacaaacaacaaaaacaccttgcagatgctgtccctttcatatctcttcacaacaagaattgattttgaaagcatgtttctttctttctttctttctttctttctttttttgagatggagtctcactctgtcgcacaggctggagtgcagtggcacgatctcggctcactccaacctccaccttccaggttcaagcaattctgcctcagcctcccgagtagctgggattacaggcatgtgccaccacgcctggctagtttttgtatttttagtagagacagggtttcaccatcttggccaggctggtcttgaactcctgacctcatgatccacccgcctcaggcttgcaaagtgctgggattaaggtgtgagccaccacacccagccgaaaacatgtttctttcctggaagttatctgtgaaaatctgcaactgtctcctctatggccacccaggtttccttcccttaaattcttggcttaaatttttttaccacatgacaattattcttccccttctgcccttttctggcaacatctgttccttgtgggttttttttttaaagagtgctttctcaaccatggaattcatttctcttcccttctttgagactgacattctaattttctatactgagccttctcacaaaatgtcttttactgaatgttgcttcaataatgtggaggttgagagactgaaccttgctgaaatgtttccttgtgaaattattacagtgattcaatttcagaacagacattttttaatgcaaaatccctaatttgggatttttttttttgccacagtagagtgatatatctccagttttgctacagcttgtttttaacaaatatattctatatttgttttatctatatggaaatttattcatcttgaggttctgtggttttagaacaaaactcactgatgtttgaaaacattgatgtgacaaatggccagcagagcccttctccatggtataaaaagtagcacttggtacaatgaactttttaaggaaaaatgtgtggagcaattgtttaaaagaatgtttctcttaaaacaatgtctctcagtatgatttgaatatttgtactctacatattctggactttttaaaaaaaataataaacctcttatataaatatgttaaggcatgtttggaaatgtcaggcctattctgaggcttttgatccaagggcctcatttatgaaattctgggaatttcatgagttctcagtatgacttttgcccactcatttttttgctcatttgtttattcactcagccattcaaaaataaagaaatgagaacataatactcttccaggccttgaggattcaaagtgattcagataaaatatagtgtgtttttatattctaaagaccaaggcaaaaactaaaaatgcagacaaatcagtaagcaaaataatttaaggtattgacttgaggtcaatttgtggaggcctagggggtgctttagatttgggagatgggaatgtgtctctgagatggtgacatcatggtagactgtgagtgcatcagtggccttagtcactgccataatctttgctttgtgactttattgtctccatcaactctgactctgggtttaaccatgtgagataaaatattagcaaacttgacacagcaatggcttataaaagtatttacaggcttccacttttgggaacagtgagtaggtgtgccttttcttactcctctcgctgagactataaagctgggacattgcatgtaaatcaaacctaagaagactctgaaaggtggagagaagaagttagccagactaacttttgcctcatagatcccacacatggaggtaaagaagccaacaacccagaaaccccaataggcacacacaaaaaaaagtcccagcaaaagcctgctctccctggccagaggaccaggaagtgtggcagcctagcaaggcaagaaacttttagataagagctgctctataccattcaaacactaaagaagagactgtggccccaccctctccaatgaaggccaagtgggggacctagtcttccaccctcatgagactgtaatgagttatcccaatacttcaccaagatgatgtctgtgaaggccgagtcaggagctcagactctcatccacacccatcagtaacaagtcctccacaccatggtgtctgcggagaccacatgggaagcctggacttctaattctgctcagtaggaatgaggtgctccttccttccccactagggtggtgtcagaggagacctaatggaatcagcattgcccagtggtaatgaggccactcctactgcagaaccagtggaggccgcatgagcagacagaatccctaccaccccaacccagcaataatgcgggggcctgtcaagtatcattatcaataatgaggggccccgtcaagtatcaagtatgattttctggggattctggatttctaccagcagcaacaagaaggcatactttcctaccccttctcctgttgtagcaacattagaggcatcctgttgaaagagatttatttaagatctagaacctcataacataatgtgctaaatacttaggtttcaataaaaagtacttattataccaaatcaggaagctctcaaacaatgaatgccaacacagaggtgatagaattatctgacaaagatatgaaaagagctgtgataaaaatgccccaaggagcaattacaaacttgcttgaagcatgaggaaaaaaattgaaaatgttctcaagagaaatgagatagaaagaaggcccaaatggaaattttagaactgaaaaatacaataattgaaattggatgggctcaacatcagaatagagagaacacaggcaaaatagaccgatagtaatcatccagttggaataacagagaaaaaatagactggaaaaataatcacaagagtttcagggaccttgtggcattgtaactaaagatctaacattcatgtcaacagggcccagaaggagaggagagagacatgggactgaaaagtgtggaagtcctcatctaccattgctgacagaatcttggaaactgtgactttaagtgaaatgatgtacaagttctttttttttttttttttttttttttgagacagagtctcactctgtcacccaggctggagtgcagtggcacaatctcagcttactgcaacctctgcatcctgggttcaagcaattctcctgcctcagcctcctgaatagctgggattacaggcacacaccaccaaacccagctaatttttgtatttttagtagagacggggtttcaccatgttggtcaggctggtcttgaactcctgacctcatcctcctcccgactcggcctcccaaagtgttgggattacaggagtgagccactgcacttggccacaacaagaagttcttgagtaatgtcgtttcattattatggtgagaaaaaaattggttttattatgcactttttttttttttgctttaagtcacagtttccaagaacctattgatattaagggaggacctaataaactcaatgaaataatggctgaaaagatttggcagaaggaagtttactcatccagtgctaagagaaaagaactgtcaacccagaatcttatacctagcaaaaatgtccttcaggaatgaaggggaaatcaagacactgtcagatgaaagaaaataaagagaatttgtcaccagcagatctaccttaaaaaatagttgattaagatttctaaacagaaaggaaacaatacaagaaggaaccttgggacatcaggaggaaagaaggaactcagtgagcaaaaatatgggtaaacacaatacgttttccttcccctctcaagttttctaaattaggtttgatgtttgaagcaaaattataacattgtcttctatgtttctaactggatatagaaaaaatatttaggacaatgataaataggagaagtaaaattatgtgaagggtggtaaagtttatcccagagaaataatgacttatggtcacacaaaaatctgtgtacgaatgtttttagcagctttattcataacagtcagaagctgaagaacctagatgtccttcagtgaccaaatgggtaaacaaactgtgttacattagtacaatggaatatcatcacctgggtgaatctgtagagaattatgctaaatgaaaaaagccaaatcgaaaaggttacatactgtatgattacacacatataacatcgttgaaatgccaaaattatatcaaaggagaacagggccgggcaccgtggcttacacctgcaatcccagcactttgggaggccaaggcgggcagatcacaaggtcaggagttcaagaccagcctaccagcctggctaatagggtgaaacgctgtctctactaaaaaatacaaaaattagccaggtgtggcagcctgcgcctgtagtcccagctacttgggaggctgaggcagaagaattgcttaaacccgggaggcagaggtgagatcgcacccctgcactccagcctgggcaacagagcgaggctccatctccaaaaaaaaaaaaaaaaaaaaaaaaaaaaaagtggagaacagattagtggttccagggcttaaggcaggcaaggaagtagttgtggtaatgaaagggcaagtgagggatcctcatgatggaaatttttctgaatcctgcctgtatcaatgtctgtatcctgactgtattatactatagttttggggcatgtttcccttagaagaaactgagaaagagtagctacaatctctctgtagtatttgctgcaactgcctgtgactcaactattatctccaaataaaaagattagttgaaaaatgaaaagcattttcaatgtctgtttgctgtcatgggctcccgcttgctccagaagaataagccccagataggctattggagaatcagacgccatgagccacagagctaagtcattccaggcaaccttaagacaacccaggacttgactgctcatgtgtgaatgaacccagccatgattaatgaagccgggtcagatcagccaaactgcccaatcaacagttatattcatgggaagcgataaattgttgtttaagcagctaagctttggaatgattggttatgcaacaataactaactgatagagaaattccacctaagacgtgaaggaggaaaaggagtcaaccacgtgaagtgcagcggaggaaatattctcttatctcttgtcagagaagaatataacactttggaggctggcctattatgagtgaagtaggaagtggtgggatatgaggcctaatgagtaagcaggggtcagttatatagggtaggctaagcaactggaacttagtcttggtgactactcagaacacctctctaagtccctttggaagccccagggagatcattgcttttttttttcaactctacaaaaatacctattgggtgcataccacaaaatgagtgctctgcatagatagtctatcaccattatgaccacagacctggtgttgtgcgagggcctggagtgccttgttatttgtccctacgtaatagaaagtaaagtttctggactttgctttctgtactgctctttcctcattgcttgggacagtgtctgtcttgtaattggtgctcagtagatatctgcagaataaatgagtaaatgaaggaaacaaaatgtgttgcccttgtttgcatgcaaatcaccacctagctggatggtatgaactgctaaccactatggagtgtttgctatataccaagcaatatgctaagtatgttatttatttatttgtttattgagacagggtttctgttgcccaggctggagtgcagtgcatgagcatgactcactgcagcctcaacctcctgggatcaattgatccttccccacctcagcctcccaagtagctgggaccacaggggtgcaccaccacacctggataatttttttatttttctattttcttggagatgagttatcaccatgttacccagtctggtcttgaactcctggcctcctgcaattcttccacagtggcctcccaaaatgctggaattacagatgtgagccaccgtgcctggccctaagtactttacatgcactgacatattcaatctcacacagccctatagggaagataatattattgtgtttatagagtgcaataaaatcttgtatatatagtctcatatacacaatgtatacagaactacttcttcattatgctattaaatataatttttatacaggcttagatatttaataggtgtgacaagctcaatatccccatccccaaacttcacacctccctactgaacttcgtccttttccaggctttctcagctaatgaaaactccattctcccacttgcgtgagctaaacattttggaatcatcctagacttttgtcttaaccttacccttacattcaatcccatcagtaaatcatgttgattataatttcacaatatgtccagattcttagcactttccacttctcctccactttcatcgtggtccaagtcagtatcaccccctgcaatgtttgttgtgaccccctctaactggttccccgacctgcgcctttcctgccctacggtacctgaagttggattatatcacttccattcaatgcttcgtctcacttcccatctcagtcagagaaaaaaccaacatctttactcaattatttatttttattttttactttttttgaggcagagtctagttctgttgcccaggctggagtgcagtggtgcaatctccgttcactgcaacctctgcctcccaggttcaagtgattctcctgcctcagcctcccgagtagctgggattacaggcttgcaccaccatgcccggctaatttttgcatttttagtagagatgggggattcaccacattggccaggctggtctagaactcctgacctcaagtgatccacctgcctgggcctcctaaagtgctaggattacaggtgtgaaccaccgtgcccggccaagccaacaactttagtgaaacccataaggtctgaccgtgctgacccacgctcaccaccactgccagccctgaactcttctcctatcttcaagcttctttattctccctttaacatgctggacatgtgtctgactcaaggccatttatttcttccacctagagcccacctccctcacatatccactctgttgattgccttgtctctttcaagtcgttgctcagatgataccttcttcatgagaacttccctgatcatccctcaccctatttaaaatcacaatacccaccactagcaattcctatcactgtccttggtttatttcccttcgtggtgcatcacaccatgagacatattataagatacacacacacacacacacacacacacacacacacacacacgcatgtaagcatatatatcttattgattgtatgaaagcacaacaaagacagcagattttctcccttttgttcatagccatagcccctgtacctaaataatgcctggcacatggtaggcacctgataaatatttgttgaatgaattaaagaatgatatcagctctcaaatttttgtttaaatagaatgctcacccagtattttagattttctggcatttctttagtgtctttacttttttctataaaactagttagaaatcgaagctagacaaataaatataacaaattatggcttctttctgcagtgcttctgctttggagaagagaaaggcattggagacagagaaggaaaagcatatataactttctgttttagcgcttgcttggttgacactggtcaactttgtactgacaaaggaagggttccctgtgtgtggcaagaatgctctgagctgttcatggcagatattgattccatcagaatgttttcaaaataatatattcatttttattatacgaaaaacacatactacaggacatatatttatgaaagaagaatgtaaaatgaagaaaactgcaaaataggttacaacatagggaggtgccagttcttgagggttctggaatgtcttattaagacgttgatttttattgatttttgccctaaaggcatcaggcagccacagaaacactttaggtaaaggagcaatgtgttcagattactgttgccaaaatcaccccagatgctaggtagaaaatggattgcaatgtagcaagaataaaacagggagccctctgaaactcagaagatggtagcttagagtagagtagcatagagttggtagcttagagtagagtagcatagagtaagtagcttagagtagagtagagtcccttgcagagaaatataaatattcctggtttaactagagggtaaaaatacacagaatttggtgactgatgaattgtgttaaaagataattttcaaaacaggtaaaattatgactcttatacaaatgtagaatgaagatgtgttgaagtttctacttaactcattaattaaatgaaggaacaacgttgaatattataactagttcaaagggtaattcaaagaactcatacatttatatatcccgaatgatgaaatgaatattcaaaaggaggcaaatctagcttcgtggacagtggggggtggggtgggtgggattcagttgaacctctactagacaggacataatttgcatctttatagactagaataattttgcattgttttcacttacctacaacttacagagaagtagaatagctcccacagaatcaaaagcaggtaattctcaaaaggtacttgctacagaaagcccaattttccattgaagtgcagattattccctagaattgctgtgtgtgtgtgtgtgtgtgtgtgtgtgtatgtgtgtgtgtgtgagagagagaaagaaagagagagaggagagagaggaggggaagggagaggattacgtatagctcaaatcttgtatgagcaactgcaacctccgcctaatttacagaatgagtgtatatgtatataaactagaagagaaacagattaaaaagcaggggcaacctcctttatgtacttaataactgacaaatagcattttctatggtatacatattattttacaatatcatttctaatgatggaaacctctagtttacacatttgccatgattaattaaaccagtcctctgaaacatttagagtatttccagtttttctccagagagccctattcccatacctgtgcatatttccttaattatttcctcaaagggaagttcctggaagcagtatttctgggtcaaagtgtagatataattctgcctctagaaaggccgtgctaatttacttcaccaccaggaaagggttggcttagctaatttattccctgtggatgctttttaaggatttttaatcttctttatacatattttacttcatgattaactaacccatttttgctggtatttttctttacagtaaatttaaaatatatcttgatatccactgttcaattttctccaaattggcttttctttccttacaaatgaagggtatatatgaatcttaggcatagaatcatgttgtttactcattaaaaagattttttttccttcataaaatacatgattctgacccagctcattattttggtaagtggaattggtagcagcctgtatattatgactgggggaggccctagaaatcactttttgtagtcttcaagcaccaactgtgaaatcctgtcatgacacagtcattcataggatggaaaattctgactttcttggcctcagagatcatccaggccaatgcccttgtgactgctcaatgggttcattttaatcactccccaggtacagccaatttgtcaagacagaggaattgcagtagggaaatagtttaattcacccagagctggctgaacaggagaccggagcctctgtggacatttggaagctagggtttttcaaggatagtttgatgggcaagggaatgggtgctgctgattggttgtggatgcagtcacaggagtgtggaaaacagtcctgtgtactgagtccactcctgggtgggggccacaggatcagttgagtcaagagtcataggtctgggtggggctattggtggtcaacaatgcaaaagcctgagaagacaactcaaaaggccaatcttaggttctacagtactggtgttatctgcaggagtaattgaagaagcagcaaatcttgtgacttccagaatcatggctggtaattctttatgcctacatcttagcagaatagctcctctcatcctcctaacctggtggtctttcataagttttacaaaggccatttagttctgaagaaaagtgattatcatttaacctataaactaaatttctcccaacgttagcttggcccaagcccaagaatgactaagggcagttttgagattaaaggcaagatgagggctgattagatcaaatccctttcattgtcttaattttctcactgtcataatttttgcaaagatggtttcactcttatattgcagaaggagaaatttgcagacaatggcagataggatggaggggcattacctgtggggcaaactcctatctcctggttctccttggttaacatctccacccttgacttccagattatatcaacccacaccattttctgtggctattgaaaagcctgaaagtgacagaggagactgagactctaaggggatagtgtcagccaaattggagggttgggcactcatggagaagtgactggtcagccccagatagtggactgtccaggccagcagggagtcatttagcctgaacactagtttaccaccaccatggcagaggaagagcaaaaggctgagagttagagaagcaatgaaatccaagaagagttgagaagttgtatgagataacatctaattctaatgtagttagaaaaatacttagcttggcttcctgcacttctgtcaaagacactgactatgctatcactgaaggagagataatatggagttcttttcaaagcaaatacttcttgcagattgctaggatacatggagtcctggattagtgtcttaagaacccagtttcagaaaaactcccttcaaaactatcactgtgggtgaacacttagtgccagtgagtgaacttaaaatcacaaacgcaaatgtcacactgaaatagattatctataaagtagtcgtccagatgaaacagcatatggctacaactaagtgtctctttttagattatgataagcatgaaaataaacttcttacagatggatcgaccatcagcctgagtttatgcatccctaagagtccaactttgctgaaaaaattcctggagtagtggttaagagcttattttccagattcaggcaaacaaaagttagaatcctggcatatttctcctagcttttgaccttgagtaagatgctcaacctcactaaaaacaaaatttgctcatctgtgaaataggaataataatagaatctgccaaacaggaatgttgggatgactaattgaaataatgcatataaaaggctcagcattccacagtgcgcagaaaaagagttcagccaatgctaggcattaatattaacatcctgcttgagaaaaatatttgatttgctttggaaagtaagtgccaataggagtagcacatgagaactgaggctaattcagtcagcactgtgaggatatatatctttttttttattattatactttaagtactagggtacatgtgcacaacgtgcagatttgttacatatgtatacatgtgccatgttggtgtgctgcacccattaactcgtcatttacattaggtatatctcctaatgctatccctcccccctcccctgaccccacagcaggccccagtgtgtgatgttccccaccttgtgtccaagtgttctcattgatatatatctttagagtttggagagaatgctctgagaagagaaagtcaatgtgattacagaaagggaatgctggcaaaatggaaaacaattttcacctacttagttaaattgtaccttaacttcatagaataactatagaaacctaactgcagcccagtgcaagagatggggatgctaatggatctgcatgagaaagtgctcttcaggatggcatccaccttaattgtagaacagtgattccccaatggtggacagggagaccagacatttggtggagggggttgaaaaagcctcaagtcaacattttaatagagttttattggagtagaatcttggcttatggggagatgtggaatgtatagggattccacagaaggcataattacttccatttctccctggagagacttgtcaaacagatttctatgagatctgagcttaaagagttgagaaatactaccgtagaccagaggttggcaaactatggtccacaggccaaatctggcccactgcttggctttgtaaataaagttttattggaaggtatccacactcattcatttacatatattctgtggctgctttcatgctatatttgctgagttgagtagttgcaatagcgacctgggggctctcaaagattaaaacatttactctttggctcattacagaaagtttgccaactcctgtggtagattataaaggcctaaacagccccaggcagtgtactatttcctttcaacaggaattttgtgaccaaaatttgctattttcttcataacagtccttgaatcctttagaagtataattgttactctttaagacattgtgaaggcttactattatagtaaaattaggaattctaagcaaattcttaattgtttcagctgcttcttagaactggaaattttggtgaacttaccagaatattctttgctaggaaaagaagccaataaaaaatgttagagattttaaaccagggctaagcaattattaagggtatcaaattttaaaggaagaaaagacaaaggaaaaacagaagaaattattcatggattggtgacaatttaaggctgaaaattaggtataataaaatcaccaccaccaacaacaaagtacatgctgaatgagattttcatgtaactactaaatctgctgtctttccacccagcttattagaactgtgtgatgtgcttatctgcttaagctttgacagtggcctgtggggattgacttgttcaaatcaggggctttgaagatattcacaaagacacatatttttcaaatatacaatttcagatcagcatgcattcagctgtggcagtggtcctcattttgccccccagaggatgtttgacaatgtctagagacaattttggttttcagtggaggtgggagaatctgctactggcatttagcaggtggaggccagaggtgctactaaacatcctaccatgcacaggataaccccccactagaaagaattttctggcccaaaatgtcaactgtggtaaaattgagaaacatgatgtataggaggtgagctatttcaacatggaagttatactatcattgaattctcatacagtgtatttacattaggattacctatcttttatttatttatttatttatttatttatttattgacactctgtcatgaggctggagtacagtggcacaatcttgactcactgcagcctccacttccctgggctcagatgattgtcctacctccgcttcccaagcagctgggactacaggcatgcactaccacacctaatttttgtatttttttttttatagagataggatttcaccatgttgcccaggctggtcttgaactcctggactcaagcaactcacccacctgggcctcccaatgtgctggaattacaggcatgagccactgcacccagccaggattaactactatttatagccagtgaaactattatagttcgaataaaagatttctcttttaaataaaaatgttagtttaaaaagtcaatttaaagaaaaatgttaactaaacaatactatagatgacaagtagatttgttacataaaatataaagacagttgaatgaattaatttttaaaaactgccctaaactcttaagcgaatgggattattttcaaactgtcattctttgaaacaatgccagtgttaacccaagtagttcccacatgctatcatatttagtaagtcttcctgttttatttttgctaaacaatactgagatatttaggataagcttttagtcctctggatattggtggctcttctcgtgttcttaggacagtgtgctggcagttgaaattgggagtttagtttaacggattacatttctccttcactttctctctcaaactcaagatggcagctcatgccgctctgtttcaaaggccaccatgtgccaccttttgcaagccacccatctcagatgcccgcatcgggaagcacttttagaagtctttgtcggcagccccaagagggagacacagcgtcgtctgaaagtactttataaatatttatgggattgacttgcaaattacagataaaatacctgaaaacatggtaaagagcaaatttgtctggtcccaactgaagaggttttgactcagtagacctcggctagtctctaggaatctgcatatttaacaattatcctgagtgatgctggaccaaacagtgagaatcactgaggtatgatatatgacaataaaggaaagatcttgattgcacacattgctctcaactttggtactgtctgcttttgtaccatgtgtttgtatgttatagtttgacatcacagactgcctgttcataaaccaaatttgagttttccttatcttctaatgaaccaatgtattttcatttgtccttactacttaataaatcaaaagaaaaataagaaatgagaaaaaagtcccctagacttaataccgatgggtcaaaaatggaaatcattaggcatgctgaaattgaagaacctttaacttgcattcagcagcttttggacataagccaggcaaaaactgtgaagaaaatgaacacattttaaaaaatgttagaaatgctgtcattgaagtttgggtctgaaaactgagggatagttaggaaatgtaaaatatctttcttggtgaagatattttttcttgcagtgggcatgatttttgcatacctttagcatgttcagtttctgaacacattcttggggcatgtacaaaagcaagaggttgccaatagtagaatgacagcaagaaacttatttttcacatcctttatttgaagaagcagagtgacgttcattcccactgtaattacagttctcaggtggtggaaatatttcaagggagccaatcgtctcatctgttattcagacataagcaagatgttgataggactctccttgacaaccatagtactgagaatgttcattttcatggctgaatctccacctgaaaaggattttgtgcttgaactcttaccaatggctcttgtaacttgccttcttaaagttactcactctggtcgttaattagactgtgattggatggcaaaaaaaaaaaaaaaaaggactggagaagaatgtagatgacatatgttagattaggctgtaattttaagatcttgctttaatatctgtacatcttactgtctttttaaaaatttaattaaacattctatttcaagataattgtaaattcacattcaattgtaagaaatattacaaaaagatcctataccctctactcagtttctctggtagtaaagtcttccaaaactacagtatgatatcgtaacaaagatattgacattgatattgatgtagtcaagctacagaacagttccattgccacaaggatccctgatgttaacctgttacagccaaatccacatccctgggctccctctctcctccaccaccacattcctaacttcagaccatcgttaatctgttttccgtttctataattttgtgacatcaagaatgctatacaaatgcaatcatgtagtatgtaacattttagatttggctgtttttttcactcagtataattcttacagagatttatccaagttgttgcagatattaatagtcaatttctttttattgctagtagtattccattgtatggaggatgtaccacagttcgtttaatcattcacccacagaaggatttccacattatgaggcttccaggtttcggctattttgaataaagctataaatattcatatacagattttttttttatgtggggataaaagttttcatttctgtgtcataaattcctaagaatgaaacttctggttgtatgatgctggtttcattttttaagaaactaccactgtttttcagagtggctgtaccatgttgcattcccaccaactatgtatgagtcatccaatttttccacatccttgtctgcatttggtggtggtggtattattattatttcagccaatctgataggtgtgtattggtagccattgtggttttaatttgcccttccctcagaggcagtgatattgaacatgttttcatgtgcttcttgaacatctgcgcaccctctccggtgagatgtctgttcatgacttttgcccattttgtcattagattatttgtttgttttactgttgtgatttgagggttctttgcctattctagataccagttctttgtcagatatgtggtttacacatcttttcttccagtctctcacttgtcttttcatcctcttcacagagtttttcacataacggaagttttcattttgatgaggtccagtttttcaaattttccctctgtggattatgcctttgataacaggtctaagaactctctccagactgtgatctcatgcattttctttttatcgttttatttgatatttaagttttatcattttatttaatatttaggtctattttaagctatttttatataaggtgagtgttttaatgtttaagtcgacgatttttccacccccctccatggatgtccaattgcctcagtactgtacactgaaaagtttgcttttcttccactgaattgcttttccacctttgtatctgtgtttttatattgcttgatggatttaataactgtgcaggatgaaaaccaatagaattgactaattatactaatacctctgggtatttaaaaaataacagaatcctctttcatttaatttacaggttttttgttttgttttgtttttttggtagtctctctctgctgcccaggctggagttcagtgacatgttctcggcttactgcagcctctacctcctgggttgaagcaattcatgtgcctcagcctccagagtagctgggactacaggcatgtgccaccactcccagctaatttttatatttttagtagagatggggttttgtcatattggccagactggtctcaaactcctggcctcaaatgattcatccatcttggcctcccaaagtgctgggattacaggcatgagccaccttgcccagccatacagtattaacttttattaaacaaaacaaaaactaacaaacaaaacccaaaatctattctcacgatccagagaaaacgttgttaacatttttttttgtctttttccaatgcatttttagtatagtggagatcatgacctaaatgaaaatttatattctgcttcacccctccccacaataacatattatgaacacttttctatgtccttggaaattccttctgaaacttgtttcaaatgaaccaactatgttatcctgcagacagataatatatgtattatagatgtagtataatttactatataaatattatgtacactatctatattactattttttataaaataattacctatgttatcttacagatgtataacatttattatagatatattctatatgtatcgtaatatgtactacatgtttactatatgtgtaccatttactttatatagctactaatgttgctctatagataagtagatatattacattatatattgtagaagtattataatttactttgtcactccttattgttgaaatttgagtaatccctgacttttttattgtaaataatgctgctaacattttattgtacattcggtgggatcagacacatatcttagcttctttatttagaactaaacttcggagtagagtggatttcgttttttcaccctgaacaaagcagttaatttatgttcaagtttctgagacagaagagaaaaatggaatatataaacattgcagacaagtagtagttaacttgaattcctcacccatctgccaggtactgatagaattataagaggtttttaaattgactatgttttgaaggaccaaatattttatgtagactttgttttgtttcttcttattagctcagaggttcttaaactttgtagtacataaaatttatttataggtcaaatatacaaaaccacatatatatggtaattggaggtaatttaaggatcgaggataatcatgactgaagagcagccacccgtctgcacttgaatatggaattcattttgttttgggttttttcctaaggatagatttctattctttttctttttgagacggagtctcgctctgtcgcccaggctggagtgcagtggcgccatctcggctcactgcaagctccgcctcccgggttcacgccattctcctgcctcagcctcccaagtagctgggacggcaggtgcccgccaccatgcccggctaactttttgtatgtttagtacagacggggtttcaccatgttagccaggatggtctcgatctcctgaccttgtgatccgccggcctcggcctcccaaagtgctgggattacaggcgtgagccaccgcgcccggcctgatttctattctttttaggttatttattgtcaagcgacctttaaagatgaccagtcgagtataatagtgccactcagacatttgccatcagtaactattattattaaattatactcatttgctgggcgcggtggctcacgtctgtaagcccagcactttgggaggccgaggcgggtggatcatgaggtgaggagtttgagtccagcctgaccaacatggtgaaacccggtctctactaaaaaaatacaaaaattagctgggcctagttgtgcttgcctgtaattccagctactcaggagtctgaggcaggagaatcgcttgaacccaggaggcggaggttgcagtgagcggagatcgcaccacctcactccagcctgggtgacagagcaagactctgtctcaaaaaaaaaaaaaaaaaaaattatacttagtaatttttaggtttaaaaatgtctcattttattttgcttttggagaatattgtttttcatatgctcattagctctttgcattttctctctctggcattattaatattttaatgtgctagtgtaccttttactagttattttcttcaggatagttttggttgctagaatcagacccccattcaagctagcttaattaaaagttgcagtgatgttgatggtgatgggttcctggggatatagatgatttccaagaaacccagaggaaaggctagatctcagtattaggaattgaaagattgtgaagaactaaaatgtctcttttacctagagtagaaatgatctagttccctgtagcaggttccacagcttaactctcctgcaagtgattcaacatggccaacaacttctgtttaaacctaccagcattgacctttcaatttggtctgcacctctggtagtaatcttcaagtctctgggttgaatatcctaagcaagaatctggttggtgttaatcagccaattattagctagttagtttagtgtctggtccaactcttcaccatccattatgaggaatatcacgacaaccatgagctgccagattctaggatgggcaatgagatcttcagcatagaccaagcccatggttttcagatttaattgcacttgaaattctagcatgttccttgaatgcctattttatttgtacatttgggatttttatctctgggacttttttctgaaatatacctagtgatattgctatcaaagcatgaagaaatttatcttcaaatacttattttcttttgattccagtaattgtctgaatgacacataatatgcccgttgtggaaacaattttgatttttaaaactttattttcacaaagcaacatcacatttctggcttgcaaatatttcacaggtgaaaacatcaaaaagaaaacatttaaatgcaaatgtcagtcaggggagatgctgagctcagtctttgtatttccttccag

SEQ ID NO: 461 - DNA, 78 bp, Homo sapiens
gtggcacaactctttacagacaactttgactaccaaactcgagatgactttgtgcgaggtctcttagtgaatgaggag

SEQ ID NO: 462 - DNA, 142 bp, Homo sapiens
gtggcacaactctttacagacaactttgactaccaaactcgagatgactttgtgcgaggtctcttagtgaatgaggaggtgagaaaagtcttccaatgcctctttaggagagaggagaaggctatgattgtatctcatgctg

SEQ ID NO: 463 - DNA, 260 bp, Homo sapiens
gtgagaaaagtcttccaatgcctctttaggagagaggagaaggctatgattgtatctcatgctggtaacttttgatcttttttgtattttattgaggcttaggagggaggaaaagcaggggacaggaggaacagtacacaaagaagaatctttgtggcagtgagaggcagaggggaacttaaaaggattagaaaagttgtacttgggggcattcttcctgtctttcttgcttaggtgacctccctttccttctcattcag

SEQ ID NO: 464 - DNA, 196 bp, Homo sapiens
gtaacttttgatcttttttgtattttattgaggcttaggagggaggaaaagcaggggacaggaggaacagtacacaaagaagaatctttgtggcagtgagaggcagaggggaacttaaaaggattagaaaagttgtacttgggggcattcttcctgtctttcttgcttaggtgacctccctttccttctcattcag

SEQ ID NO: 465 - DNA, 264 bp, Homo sapiens
ttttggtggagacgggcgcatgtgggcgctttgctcgctgctgcggtccgcggccggacgcaccatgtcgcagggacgcaccatatcgcaggcacccgcccgccgcgagcggccgcgcaaggacccgctgcggcacctgcgcacgcgagagaagcgcggaccgtcggggtgctccggcggcccaaacaccgtgtacctgcaggtggtggcagcgggtagccgggactcgggcgccgcgctctacgtcttctccgagttcaaccg

SEQ ID NO: 466 - DNA, 297 bp, Homo sapiens
aacgcgggcgtaggtgaccggcggctttctcagttttggtggagacgggcgcatgtgggcgctttgctcgctgctgcggtccgcggccggacgcaccatgtcgcagggacgcaccatatcgcaggcacccgcccgccgcgagcggccgcgcaaggacccgctgcggcacctgcgcacgcgagagaagcgcggaccgtcggggtgctccggcggcccaaacaccgtgtacctgcaggtggtggcagcgggtagccgggactcgggcgccgcgctctacgtcttctccgagttcaaccg

SEQ ID NO: 467 - DNA, 325 bp, Homo sapiens
atgcggagcggctaggtggtgcacgggaaacgcgggcgtaggtgaccggcggctttctcagttttggtggagacgggcgcatgtgggcgctttgctcgctgctgcggtccgcggccggacgcaccatgtcgcagggacgcaccatatcgcaggcacccgcccgccgcgagcggccgcgcaaggacccgctgcggcacctgcgcacgcgagagaagcgcggaccgtcggggtgctccggcggcccaaacaccgtgtacctgcaggtggtggcagcgggtagccgggactcgggcgccgcgctctacgtcttctccgagttcaaccg

SEQ ID NO: 468 - DNA, 400 bp, Homo sapiens
ttttggtggagacgggcgcatgtgggcgctttgctcgctgctgcggtccgcggccggacgcaccatgtcgcagggacgcaccatatcgcaggcacccgcccgccgcgagcggccgcgcaaggacccgctgcggcacctgcgcacgcgagagaagcgcggaccgtcggggtgctccggcggcccaaacaccgtgtacctgcaggtggtggcagcgggtagccgggactcgggcgccgcgctctacgtcttctccgagttcaaccggtcagtcaacgagccacgccccgtcccgctgggccctcagtgcggcgcagcctctgagcatcggggcacctcccagggcttcggcttccctgcttcacacatgtggttcactgttgcgggggttcgtggagttatg

SEQ ID NO: 469 - DNA, 433 bp, Homo sapiens
aacgcgggcgtaggtgaccggcggctttctcagttttggtggagacgggcgcatgtgggcgctttgctcgctgctgcggtccgcggccggacgcaccatgtcgcagggacgcaccatatcgcaggcacccgcccgccgcgagcggccgcgcaaggacccgctgcggcacctgcgcacgcgagagaagcgcggaccgtcggggtgctccggcggcccaaacaccgtgtacctgcaggtggtggcagcgggtagccgggactcgggcgccgcgctctacgtcttctccgagttcaaccggtcagtcaacgagccacgccccgtcccgctgggccctcagtgcggcgcagcctctgagcatcggggcacctcccagggcttcggcttccctgcttcacacatgtggttcactgttgcgggggttcgtggagttatg

SEQ ID NO: 470 - DNA, 461 bp, Homo sapiens
atgcggagcggctaggtggtgcacgggaaacgcgggcgtaggtgaccggcggctttctcagttttggtggagacgggcgcatgtgggcgctttgctcgctgctgcggtccgcggccggacgcaccatgtcgcagggacgcaccatatcgcaggcacccgcccgccgcgagcggccgcgcaaggacccgctgcggcacctgcgcacgcgagagaagcgcggaccgtcggggtgctccggcggcccaaacaccgtgtacctgcaggtggtggcagcgggtagccgggactcgggcgccgcgctctacgtcttctccgagttcaaccggtcagtcaacgagccacgccccgtcccgctgggccctcagtgcggcgcagcctctgagcatcggggcacctcccagggcttcggcttccctgcttcacacatgtggttcactgttgcgggggttcgtggagttatg

SEQ ID NO: 471 - DNA, 581 bp, Homo sapiens
gtcagtcaacgagccacgccccgtcccgctgggccctcagtgcggcgcagcctctgagcatcggggcacctcccagggcttcggcttccctgcttcacacatgtggttcactgttgcgggggttcgtggagttatggtgggtgggaaatccgagattctttgcatccatgtgatttctgcggatctgtgaagaacttcaggcctgggtctgagcgtccttttcccaacccttgggccccggcctggctgtcagcactttcggagctccaccctcttccgtgcaccccaaggccagtgtgtcgttgttagcgtgtggggtggacagatctggtgtgtagccggtggtggagaaaggactcattttgtcctagcacccacacacacaggcccccactcctctccacctctgctaaggagggctcaaaacccaccagcataaatgtggctcggtagtccaacgtggacttttaatttttttttcttttttttttttccagagtctacaataaaacatctaattggtgtcagagagtttacagaataaaaccttctgaatgtcttgtgtaatgtttgtcttgtag

SEQ ID NO: 472 - DNA, 445 bp, Homo sapiens
gtgggtgggaaatccgagattctttgcatccatgtgatttctgcggatctgtgaagaacttcaggcctgggtctgagcgtccttttcccaacccttgggccccggcctggctgtcagcactttcggagctccaccctcttccgtgcaccccaaggccagtgtgtcgttgttagcgtgtggggtggacagatctggtgtgtagccggtggtggagaaaggactcattttgtcctagcacccacacacacaggcccccactcctctccacctctgctaaggagggctcaaaacccaccagcataaatgtggctcggtagtccaacgtggacttttaatttttttttcttttttttttttccagagtctacaataaaacatctaattggtgtcagagagtttacagaataaaaccttctgaatgtcttgtgtaatgtttgtcttgtag

SEQ ID NO: 473 - DNA, 86 bp, Homo sapiens
atactgcctatccatacttacatctcatgtaaagaagacaaccccagaactggaaattgtactgcaaaaagtacacgagcttcaag

SEQ ID NO: 474 - DNA, 148 bp, Homo sapiens
atactgcctatccatacttacatctcatgtaaagaagacaaccccagaactggaaattgtactgcaaaaagtacacgagcttcaaggtagagatccgctcacagagaaagtgcttaaggtggccgtgactgctactagtcttctgcag

SEQ ID NO: 475 - DNA, 308 bp, Homo sapiens
gtagagatccgctcacagagaaagtgcttaaggtggccgtgactgctactagtcttctgcaggtgacaatcaccatgtcattgccacaccacagatttaacatgtgactttttagttgccattttaagacccttgtcagtttttttcagtgctgccctctaaagcatatataaaagtatcagaagtatatattcttctgatgtccagttctattgagaaaaatttattgtctttttggttatgttgttaggtctgtggattttttccccaaatgattgtgttctgttttgttttctaaacactgttag

SEQ ID NO: 476 - DNA, 246 bp, Homo sapiens
gtgacaatcaccatgtcattgccacaccacagatttaacatgtgactttttagttgccattttaagacccttgtcagtttttttcagtgctgccctctaaagcatatataaaagtatcagaagtatatattcttctgatgtccagttctattgagaaaaatttattgtctttttggttatgttgttaggtctgtggattttttccccaaatgattgtgttctgttttgttttctaaacactgttag

SEQ ID NO: 477 - DNA, 162 bp, Homo sapiens
gtatcagtgcttcaaatcggcctggatgtttgaggtgtttcataggggcttttcgtttcctgtcaactataaaagcttaaagactgccttgcaagtttacgacaaggaggttcagtggacccttggagccatcctctacaggacccgctttctaccattaag

SEQ ID NO: 478 - DNA, 365 bp, Homo sapiens
gtgaactgctccatgttgtgggaccagggatgtgaagcaagtacatcaaccttgaaacgcgcgcagttggtttgggagagccggcctgaggaagcccctgccccaaggctgcccacagagggaaggattgtgtgtgtgtgtgtgtgtgtgccatcttgacagagtgagtcagtctgacttgcctttgtgcttgccgtttgtaggtatcagtgcttcaaatcggcctggatgtttgaggtgtttcataggggcttttcgtttcctgtcaactataaaagcttaaagactgccttgcaagtttacgacaaggaggttcagtggacccttggagccatcctctacaggacccgctttctaccattaag

SEQ ID NO: 479 - DNA, 913 bp, Homo sapiens
gtaagtactagaaggtcaagcccagggcactcttaagaaccataatgcagtgttggccccactggcttgccacaccctggcctcagtccagcttcttctcactcactgttcttcccatctaccctgggcccctttcaaacgggacaaatacttgtgcccagacatattccgtatcttttttgttttggtcacttttactgtctcttacccctgaaattcccctgttcatacctttgcttgttcaagtcctgcccagacatcagagtccagccagaggctgtccctttccagtcttcctctgtcccctcaatcagacttcatccctttctctgagtctcaagaattcatcctacctcgccaatgcatttatcatgttctgctttttctgttgctttttaaaaatcccctttcattgtaagtcacttaagtgcagacactgtatcttactaattattgtatcttattacttgcttagcacagtgcttggcaaaaaataaacctctaataaatatttagagtcatagaatatcagagctgaagagaaccttcctaccatctcattttataataaactgaggtacaaagaggttggaacctgttcagtattcattcaaggagtacatggtgaaatgccagctggaaaagaaacctatctcagggatatatgacattatgccgagaccgggttcatgcactgattgatttgacaggtgaactgctccatgttgtgggaccagggatgtgaagcaagtacatcaaccttgaaacgcgcgcagttggtttgggagagccggcctgaggaagcccctgccccaaggctgcccacagagggaaggattgtgtgtgtgtgtgtgtgtgtgccatcttgacagagtgagtcagtctgacttgcctttgtgcttgccgtttgtag

SEQ ID NO: 480 - DNA, 710 bp, Homo sapiens
gtaagtactagaaggtcaagcccagggcactcttaagaaccataatgcagtgttggccccactggcttgccacaccctggcctcagtccagcttcttctcactcactgttcttcccatctaccctgggcccctttcaaacgggacaaatacttgtgcccagacatattccgtatcttttttgttttggtcacttttactgtctcttacccctgaaattcccctgttcatacctttgcttgttcaagtcctgcccagacatcagagtccagccagaggctgtccctttccagtcttcctctgtcccctcaatcagacttcatccctttctctgagtctcaagaattcatcctacctcgccaatgcatttatcatgttctgctttttctgttgctttttaaaaatcccctttcattgtaagtcacttaagtgcagacactgtatcttactaattattgtatcttattacttgcttagcacagtgcttggcaaaaaataaacctctaataaatatttagagtcatagaatatcagagctgaagagaaccttcctaccatctcattttataataaactgaggtacaaagaggttggaacctgttcagtattcattcaaggagtacatggtgaaatgccagctggaaaagaaacctatctcagggatatatgacattatgccgagaccgggttcatgcactgattgatttgacag

SEQ ID NO: 481 - DNA, 117 bp, Homo sapiens
ggagcatcgagtacagctgtccggcctccaacgagtgtgagatcaccaagcggagacgcaaggcctgccaggcctgccgcttcaccaagtgcctgcgggtgggcatgctcaaggagg

SEQ ID NO: 482 - DNA, 214 bp, Homo sapiens
acctgtgcttgcccggggagagtcagggctctcctgtcagctgggtcccctcccagccccgggaggccgccactggagccctgcctcttcctggcagggagcatcgagtacagctgtccggcctccaacgagtgtgagatcaccaagcggagacgcaaggcctgccaggcctgccgcttcaccaagtgcctgcgggtgggcatgctcaaggagg

SEQ ID NO: 483 - DNA, 6446 bp, Homo sapiens
gtgagcccccagcccactcccctgtcctttgccctgcaccctctgggtacactgctgggtgcaataggccccctgatggctgtggcaccgcttgaggctaacaatctggtgtttccagtccctctacctcccagagacactctttccctgagaagtatggtaaaagcaccgggtgtgctgatgcattgcagtggatgtgagtgagttcagggtaccacctgggtactctaggcccagcaccttctacagtggctctgaaagagtccaaggcagcctctgtctgttcctaagctttgttcttgtttctggcagcttctgacctctccccagcatagaacatgtcccctttttgttaattttcccaaagcagcaccaacacaaggcagattttaatttttttttttttgagacagagtctcactctgttgttcaggctagagtgcagtggcacaatctctgctcactgcaacctttgcccctgggttcaagagattctcctgcctcagcctcctgagtagctgagactgcaggtgtgcaccaccacgcccagctaatttttgtatttttagtagagacgacgtttcaccatgtcggccaggctggtctggaattcctgaccacaaatgatccacctgcctcggcctcccaaaacaaggcagatttttatcagtacttgagaggggctacatcatagtttagcacccaactttaaaaagactaacaggcaaggccggacacagttgctcacacctgtaatcccagcactttgggaggccaaggtgggcggatcacctgaggtcaggagatcgagaccagcctggccagggtggtgaaaccgcatctctactaaaaatgcaaaaaattagctgggcatggtggctcgcgcctgtaatctcagctacttgctacttgagaggctgaggcaggagaattgcttgaacccaggaggcagaggttgcagtgagccaagatcacaccactgtactccagcctgggtgacagagcgagattccatctcaaaaaaaaaaaaaaaaggccgggcactgtggctcatgtaatcccagcactttgggaggccgaggcgggcggatcatgaggtcaggagattgagaacatcctggctaacacggtgaaacactgtctctactaaaaatacaaaaaattagctgggcatggtggcgggcgcctgtaatcccagctacttgggaggctgaggcaggagaatggcgtgaacccaggaggcggaggttgcagtgagccaagatcacgccactgcactccagcctgggcgacagagtgagactccgtctcaaaaaaaaaaaaaaaaaggctgggcgcggtggctcatgcctgtaatcccagcactttgggaggccgagacgggcggatcacctgaggtcaggagtttgagaccagcctgaccaatgtgatgaaaccccgtctctactgaaaatacaaaaattagccaagcatggtggcatgcgcctgtcatcccactcaagaggctgagacaggagaattgcttgaacctgggaggcagaggttgcaatgagcccagatcgcgccattgcactctagcctgcgcaacaaaagtgaaactccacctcaaaaaacaaaaacaaaaacaaaaacaaaaaaacccaaaaacgctgggcttggtggctcatggcctgtaatcccagcactttgggaggctgaggcagacggatcacgaggtcaggagttcgagaccagcctggccaacatggtaaaaccccgtctctactaaaaatacaaaaattagccgggcgtggtggtgagtgcctgtaatcccactacttgggaggctgaggcaggagaattgcttgaacccgggaggcagaggttgcagtgagctgagatcatgccacagcactctagtctgggcaacagaatgagacactctcatctcaaaaaaaaaaaaaaaaggacttacaggcatgtctgctcttaaaagtcactaatttttttctcactcaggaaagcttatcagaatttgggggaatgagcaagatgctgacattaagcattgcctgggaagggcctattatttccgttatttctgcttttatgtaaccattggttactttgggggctataacacgtataattaaaaaaaaaaaaaaaaaggccaagtgtggtggctcacacctgtaatctcagcactttcggaggctaagatgggaggatcacaaggtcaggagttcgagaccagcctggccaacatggtgaaaccctgtctgtactagaaatacaaaaattagccaggtgtcgtggtgggtgcctgtagtcccagctactcaggaggctgaggcaggagaattgctggaacccaggaggcagaggttggagttagccaagatcgtgccactgcactcccagcctgggtgacagagtgagagttcgtatcaaaaaaaaaaaaaaaaaaaaaatcttgagtgcttaccttgtgctaggcactgtattcttttatgatctcagttagtccccacagcaaccctataaggtgtcagtactgttataactgaaactaagagaggcatttgaaactttgttgaagtctcacaactaggaaatggcagaaccaagatttgaacttgggtcagtataggtccagagctgagctcttcaatgttagactgcttcctctgcttattactaataacaccgaactttggacagacgctgaatgactgattgtgacattccagcacgtttttttttttttttttgagacagtctcgtgtggtcgcccaggctggagtgcagtggcacgatctcggctcactgcaagctccgcctcccgggttcacaccattctcctgcctcagcctcctgagtagctgggactacaggtgcccgccaccacgcctggctaattttttgtacttttagtagagacggggtttcagcgtgttagccaagatggtcttgatttcctgacctcgagatccacctgccttggactcccaaagtgctgggattacaggcgtgagccactgctcctggccaggttttttttttttttttttttttttttgagatggagttttgctcttgttgtccaggctggagtgcaacggcctgcagtcgtggttcactgcaacctctgcctcccgggttcaagccattcacctgcctcagcctcccaagtagctgggattacaggcgcctgccaccatgcccggctaatttttgtgtttttagtagggatggggtttcaccatgttggccaggctggcctcaaactcctgacctcaggcgatctgccctcctcgggcttccaaagtgctgggattataggtgtgagccactgcaccccgccaatccagcaagttttaacttggccaaaatccaccaatcttaaactttgtgcacccttcccactctgaagaacagtgagccagccggccagggtgcgggtatctcctacctaccctggggcccctcactgtatgttgactattgacaaatatttattgtgtgctggctgtgaataggacttgtatattgagcacttaggtgtcatgaaccatgctggatgttttgaccatattatcccctttaattctcacgacccaactctgtggggcacttttacagctgggaaactgagggttcaaggggttaggtatgggacttgcccaaggtcataaaggtatgtggtagccagagtccctgttcggcacagacctgttctttgctgtcctggccagtgttccaggccttggggacatagctggggctgaagcagggctgtttctgccctcaggcagtttacatcctggcagaggggagagctgggcaacagtgagttgcacagacttgtcttattaccgctgtggtatgtgcaggaaggggaggtgctggttctgaggctccagagggcttgtctttttttttttttttttgagacggagtctcgctttgttgcccaggctagagtccagtggcgcgatctcggctcagtgcaagctccgcctcccgggttcaagcgattctcctgcctcagcctccccaatagctgggattacaggcgcatggcaccacgcacggctaattttggtatttttagtagagactgggtttcaccatgttagccaggatggtctcgatctcctgacctcgtgatccacccgcctcggcctcccaaagtgctgggattacgctcccggcctctttttttttttagacagagtctcactctgttgccaggctatagtacagtggcacgatctcagcttactgcaacctccgcctcccaggttcaagcgattgttctccctcagcctcccgagtagctgggactacaggcacacgcccagctaatttttgtatttttagtagagacagggtttcaccgtgttggtcaggctggtctcaaactcctcacctcgtgatctgcctgcctcggcctcccaaagtgctgggattataggcgtgagccactgcgcctggcctttttttttttttggtacagagtttcgctctggttgcccaggctggagtgcaatggcacgatcttggctcactgcagcctctgcctcccgggttcaagcgattctcctgcctcagcctccggagcagctgggattacagacatgcaccaccatgtccggctaatttttttttttcgagatggagtctcactgtgtcacccaggctggagtgcagtggcacaatctcggctcactgcaacctctgcctcccgggttcaagcgattctcctgcctcagcctcctgagtagctgggactacaggtgcctgccaccacacccagctaatttttgtacttttagtagagacggggttttaccatgttggccaggctggtcttgaacttctgacctcaggtgatccacccacctcggtctcccaaagtgctgggattacaggcgtgagccaccgtgcccggccgtggtgtcttgagctgagtgcagaagcgcaaatagggggtaggagaaaatgcaccgcgaggagaaatgtgctgcgggcctgctgtctagctgtgtcatttggtcgttgcggggccctgtgaggccgggagggctgccagcacccaccatgtgccaggcctcgttgctagtgctggggccagttcctgccccggtggagctgccactgaagggggaggcgtaataaacaagataggtgagtgcatatgcagcgtggtctgttgtgctgagggctgaagagaaaccagaagcagggctcagaggccaggaggactctgcaaagggatttggcattatcacagggtggccagggaagatcttcaaggtgacagtgagcagagggaggtgagggagcctgtgtggacttcaggactagagctccaggcagggcctgtttgaggaacatggaggaggcgagagcaaggagtagaggtcaaaaggaggcaagaagcaggggcgtaggcctaggaggacataggttcgctttggcttggactcagagaagggaaatccccagagggttttgagaagaggaggtacaggatgtaatggaggcttaataggaccctcttggctgctgagtcgagaacagactggagcaagcagggacagccaagcgaggggcgaggtgacagtgactatcaggtcaagggtggaagtagttgccaggggcaggaggcggattctggaccttggaggaggtaaagcccaccagaatgtgtcggtggcttggatgtggggtgtgagaggaaccagagattctgcctaggtttcttcttgggcaagtgaacacgtggagtccacgtaggctgtgttcggtccgagatgccttctagacatgcaggatgtcaaggaggcagctggagagatgggtctggagctcacagcaagtccaggctagaggtagaaacgtgagagccccacggctggggaagattgccatgggattggagatgagctccaaggacagccctggcagtctggatggaagagcttgggaagatgctcagaaaccacaaagtggctggtgcggtgggaggaaaaccagagtgtatgctgtcctagaagcaaaagaagaaagtgtttcagtgtttctaggagcaggaagtgatcaacagccttagatcctccttttaggccaagtaacatgaggactaagaattgaccactggatttagcaatgcagaggtccttgtggcccttgatgtcggcagatgagggcagtgtggtccagagatgaggcttggggctgagatgcagccccgctgcctggtccagctcctccctcatccaggcagggctcccccgcccagcagccactcccctccctgcctgctcatggccccctgctctccctttcctccccatacccccagacctgtgcttgcccggggagagtcagggctctcctgtcagctgggtcccctcccagccccgggaggccgccactggagccctgcctcttcctggcag

SEQ ID NO: 484 - DNA, 6349 bp, Homo sapiens
gtgagcccccagcccactcccctgtcctttgccctgcaccctctgggtacactgctgggtgcaataggccccctgatggctgtggcaccgcttgaggctaacaatctggtgtttccagtccctctacctcccagagacactctttccctgagaagtatggtaaaagcaccgggtgtgctgatgcattgcagtggatgtgagtgagttcagggtaccacctgggtactctaggcccagcaccttctacagtggctctgaaagagtccaaggcagcctctgtctgttcctaagctttgttcttgtttctggcagcttctgacctctccccagcatagaacatgtcccctttttgttaattttcccaaagcagcaccaacacaaggcagattttaatttttttttttttgagacagagtctcactctgttgttcaggctagagtgcagtggcacaatctctgctcactgcaacctttgcccctgggttcaagagattctcctgcctcagcctcctgagtagctgagactgcaggtgtgcaccaccacgcccagctaatttttgtatttttagtagagacgacgtttcaccatgtcggccaggctggtctggaattcctgaccacaaatgatccacctgcctcggcctcccaaaacaaggcagatttttatcagtacttgagaggggctacatcatagtttagcacccaactttaaaaagactaacaggcaaggccggacacagttgctcacacctgtaatcccagcactttgggaggccaaggtgggcggatcacctgaggtcaggagatcgagaccagcctggccagggtggtgaaaccgcatctctactaaaaatgcaaaaaattagctgggcatggtggctcgcgcctgtaatctcagctacttgctacttgagaggctgaggcaggagaattgcttgaacccaggaggcagaggttgcagtgagccaagatcacaccactgtactccagcctgggtgacagagcgagattccatctcaaaaaaaaaaaaaaaaggccgggcactgtggctcatgtaatcccagcactttgggaggccgaggcgggcggatcatgaggtcaggagattgagaacatcctggctaacacggtgaaacactgtctctactaaaaatacaaaaaattagctgggcatggtggcgggcgcctgtaatcccagctacttgggaggctgaggcaggagaatggcgtgaacccaggaggcggaggttgcagtgagccaagatcacgccactgcactccagcctgggcgacagagtgagactccgtctcaaaaaaaaaaaaaaaaaggctgggcgcggtggctcatgcctgtaatcccagcactttgggaggccgagacgggcggatcacctgaggtcaggagtttgagaccagcctgaccaatgtgatgaaaccccgtctctactgaaaatacaaaaattagccaagcatggtggcatgcgcctgtcatcccactcaagaggctgagacaggagaattgcttgaacctgggaggcagaggttgcaatgagcccagatcgcgccattgcactctagcctgcgcaacaaaagtgaaactccacctcaaaaaacaaaaacaaaaacaaaaacaaaaaaacccaaaaacgctgggcttggtggctcatggcctgtaatcccagcactttgggaggctgaggcagacggatcacgaggtcaggagttcgagaccagcctggccaacatggtaaaaccccgtctctactaaaaatacaaaaattagccgggcgtggtggtgagtgcctgtaatcccactacttgggaggctgaggcaggagaattgcttgaacccgggaggcagaggttgcagtgagctgagatcatgccacagcactctagtctgggcaacagaatgagacactctcatctcaaaaaaaaaaaaaaaaggacttacaggcatgtctgctcttaaaagtcactaatttttttctcactcaggaaagcttatcagaatttgggggaatgagcaagatgctgacattaagcattgcctgggaagggcctattatttccgttatttctgcttttatgtaaccattggttactttgggggctataacacgtataattaaaaaaaaaaaaaaaaaggccaagtgtggtggctcacacctgtaatctcagcactttcggaggctaagatgggaggatcacaaggtcaggagttcgagaccagcctggccaacatggtgaaaccctgtctgtactagaaatacaaaaattagccaggtgtcgtggtgggtgcctgtagtcccagctactcaggaggctgaggcaggagaattgctggaacccaggaggcagaggttggagttagccaagatcgtgccactgcactcccagcctgggtgacagagtgagagttcgtatcaaaaaaaaaaaaaaaaaaaaaatcttgagtgcttaccttgtgctaggcactgtattcttttatgatctcagttagtccccacagcaaccctataaggtgtcagtactgttataactgaaactaagagaggcatttgaaactttgttgaagtctcacaactaggaaatggcagaaccaagatttgaacttgggtcagtataggtccagagctgagctcttcaatgttagactgcttcctctgcttattactaataacaccgaactttggacagacgctgaatgactgattgtgacattccagcacgtttttttttttttttttgagacagtctcgtgtggtcgcccaggctggagtgcagtggcacgatctcggctcactgcaagctccgcctcccgggttcacaccattctcctgcctcagcctcctgagtagctgggactacaggtgcccgccaccacgcctggctaattttttgtacttttagtagagacggggtttcagcgtgttagccaagatggtcttgatttcctgacctcgagatccacctgccttggactcccaaagtgctgggattacaggcgtgagccactgctcctggccaggttttttttttttttttttttttttttgagatggagttttgctcttgttgtccaggctggagtgcaacggcctgcagtcgtggttcactgcaacctctgcctcccgggttcaagccattcacctgcctcagcctcccaagtagctgggattacaggcgcctgccaccatgcccggctaatttttgtgtttttagtagggatggggtttcaccatgttggccaggctggcctcaaactcctgacctcaggcgatctgccctcctcgggcttccaaagtgctgggattataggtgtgagccactgcaccccgccaatccagcaagttttaacttggccaaaatccaccaatcttaaactttgtgcacccttcccactctgaagaacagtgagccagccggccagggtgcgggtatctcctacctaccctggggcccctcactgtatgttgactattgacaaatatttattgtgtgctggctgtgaataggacttgtatattgagcacttaggtgtcatgaaccatgctggatgttttgaccatattatcccctttaattctcacgacccaactctgtggggcacttttacagctgggaaactgagggttcaaggggttaggtatgggacttgcccaaggtcataaaggtatgtggtagccagagtccctgttcggcacagacctgttctttgctgtcctggccagtgttccaggccttggggacatagctggggctgaagcagggctgtttctgccctcaggcagtttacatcctggcagaggggagagctgggcaacagtgagttgcacagacttgtcttattaccgctgtggtatgtgcaggaaggggaggtgctggttctgaggctccagagggcttgtctttttttttttttttttgagacggagtctcgctttgttgcccaggctagagtccagtggcgcgatctcggctcagtgcaagctccgcctcccgggttcaagcgattctcctgcctcagcctccccaatagctgggattacaggcgcatggcaccacgcacggctaattttggtatttttagtagagactgggtttcaccatgttagccaggatggtctcgatctcctgacctcgtgatccacccgcctcggcctcccaaagtgctgggattacgctcccggcctctttttttttttagacagagtctcactctgttgccaggctatagtacagtggcacgatctcagcttactgcaacctccgcctcccaggttcaagcgattgttctccctcagcctcccgagtagctgggactacaggcacacgcccagctaatttttgtatttttagtagagacagggtttcaccgtgttggtcaggctggtctcaaactcctcacctcgtgatctgcctgcctcggcctcccaaagtgctgggattataggcgtgagccactgcgcctggcctttttttttttttggtacagagtttcgctctggttgcccaggctggagtgcaatggcacgatcttggctcactgcagcctctgcctcccgggttcaagcgattctcctgcctcagcctccggagcagctgggattacagacatgcaccaccatgtccggctaatttttttttttcgagatggagtctcactgtgtcacccaggctggagtgcagtggcacaatctcggctcactgcaacctctgcctcccgggttcaagcgattctcctgcctcagcctcctgagtagctgggactacaggtgcctgccaccacacccagctaatttttgtacttttagtagagacggggttttaccatgttggccaggctggtcttgaacttctgacctcaggtgatccacccacctcggtctcccaaagtgctgggattacaggcgtgagccaccgtgcccggccgtggtgtcttgagctgagtgcagaagcgcaaatagggggtaggagaaaatgcaccgcgaggagaaatgtgctgcgggcctgctgtctagctgtgtcatttggtcgttgcggggccctgtgaggccgggagggctgccagcacccaccatgtgccaggcctcgttgctagtgctggggccagttcctgccccggtggagctgccactgaagggggaggcgtaataaacaagataggtgagtgcatatgcagcgtggtctgttgtgctgagggctgaagagaaaccagaagcagggctcagaggccaggaggactctgcaaagggatttggcattatcacagggtggccagggaagatcttcaaggtgacagtgagcagagggaggtgagggagcctgtgtggacttcaggactagagctccaggcagggcctgtttgaggaacatggaggaggcgagagcaaggagtagaggtcaaaaggaggcaagaagcaggggcgtaggcctaggaggacataggttcgctttggcttggactcagagaagggaaatccccagagggttttgagaagaggaggtacaggatgtaatggaggcttaataggaccctcttggctgctgagtcgagaacagactggagcaagcagggacagccaagcgaggggcgaggtgacagtgactatcaggtcaagggtggaagtagttgccaggggcaggaggcggattctggaccttggaggaggtaaagcccaccagaatgtgtcggtggcttggatgtggggtgtgagaggaaccagagattctgcctaggtttcttcttgggcaagtgaacacgtggagtccacgtaggctgtgttcggtccgagatgccttctagacatgcaggatgtcaaggaggcagctggagagatgggtctggagctcacagcaagtccaggctagaggtagaaacgtgagagccccacggctggggaagattgccatgggattggagatgagctccaaggacagccctggcagtctggatggaagagcttgggaagatgctcagaaaccacaaagtggctggtgcggtgggaggaaaaccagagtgtatgctgtcctagaagcaaaagaagaaagtgtttcagtgtttctaggagcaggaagtgatcaacagccttagatcctccttttaggccaagtaacatgaggactaagaattgaccactggatttagcaatgcagaggtccttgtggcccttgatgtcggcagatgagggcagtgtggtccagagatgaggcttggggctgagatgcagccccgctgcctggtccagctcctccctcatccaggcagggctcccccgcccagcagccactcccctccctgcctgctcatggccccctgctctccctttcctccccatacccccag

SEQ ID NO: 485 - DNA, 103 bp, Homo sapiens
cacaaacagggcaaggtgggccccgatggcaaggagctgatcccccaggagtcccctcgagtgggtggatttggatttgttgccactccttcccctgcccctg

SEQ ID NO: 486 - DNA, 265 bp, Homo sapiens
gggccctccctctctttctccaagaaggctgccaaccccagagccccagccttgccctgaggagaggaagtgtttccagcatgttcccacgtgtttgcccaccggccagctgtcgagcgtgggctgcggtccccctgatgccagcctctctgcttgttccagcacaaacagggcaaggtgggccccgatggcaaggagctgatcccccaggagtcccctcgagtgggtggatttggatttgttgccactccttcccctgcccctg

SEQ ID NO: 487 - DNA, 841 bp, Homo sapiens
gtgagcaggcgggtcagcagggccgcatgggccaggttggacagggctgcctgggggcaggcatgatctctcccatctctttgagcttggcagagctcagtgagtggaaccatctggggccctgtgcggcaggatcctgagtctttccttggccccagtgggcttccattgaacactgccttggtcacacacgttctgtaggtccagatctgtgccagctcccttgatggcaggggcaggagagaaaagggactgctgggagtgagcccaggctggcagctgcacgcccacacaccgggcagggaagccagagagccgcagagggagcccagccccagggggtggctggggtgggacaggccctgggttggcagagagcagaggctttctgagtctgggagcaagacgagtagatactctctgatggtgactgtggcagtcacagggttgaagtggggaaggcaggaagagactagagcataagcattgcctgtcatcagcattgcctgtcatcagcattgccccctgcaggggcctggcgtcagcatcctctggagttgctgggataggcgcagctcgagtggaggccctggcacctccctggatgggaggagggggctttccttgcttgggtacccactttgacaggccctcaaggtcttttggggggttggggcaggggccctccctctctttctccaagaaggctgccaaccccagagccccagccttgccctgaggagaggaagtgtttccagcatgttcccacgtgtttgcccaccggccagctgtcgagcgtgggctgcggtccccctgatgccagcctctctgcttgttccag

SEQ ID NO: 488 - DNA, 679 bp, Homo sapiens
gtgagcaggcgggtcagcagggccgcatgggccaggttggacagggctgcctgggggcaggcatgatctctcccatctctttgagcttggcagagctcagtgagtggaaccatctggggccctgtgcggcaggatcctgagtctttccttggccccagtgggcttccattgaacactgccttggtcacacacgttctgtaggtccagatctgtgccagctcccttgatggcaggggcaggagagaaaagggactgctgggagtgagcccaggctggcagctgcacgcccacacaccgggcagggaagccagagagccgcagagggagcccagccccagggggtggctggggtgggacaggccctgggttggcagagagcagaggctttctgagtctgggagcaagacgagtagatactctctgatggtgactgtggcagtcacagggttgaagtggggaaggcaggaagagactagagcataagcattgcctgtcatcagcattgcctgtcatcagcattgccccctgcaggggcctggcgtcagcatcctctggagttgctgggataggcgcagctcgagtggaggccctggcacctccctggatgggaggagggggctttccttgcttgggtacccactttgacaggccctcaaggtcttttggggggttggggcag

SEQ ID NO: 489 - DNA, 100 bp, Homo sapiens
ggtgtggagaaaaagaaaggtgtcaacccattactggaggaagctgttggacagcaatctttggtgaaactttctgaatctttgaaacaatcttcaaaag

SEQ ID NO: 490 - DNA, 339 bp, Homo sapiens
gaagttcaagtttgaatgtaacttcagatcatatgaatacagaaattactacttataagaagaaattgagtactaatcagccatgccataagactgtaacagatgaagctcagagcaaccttaacacaacagttggattttcaaagtttacatttacaaggatgaaaaattctcagattctttctcagtttaatcaaaattgtataactggaagtatgtctgataccaaaattacacagggtgtggagaaaaagaaaggtgtcaacccattactggaggaagctgttggacagcaatctttggtgaaactttctgaatctttgaaacaatcttcaaaag

SEQ ID NO: 491 - DNA, 2261 bp, Homo sapiens
gtaagttaagacttttcagcttttctgaaattcagtgaagcaaatattttttgataatactccattttggttttgtgaatatatcaaaatttttgttaataaaatttccacagttttgatctatcaaattttggagttaaaataattataactgttaaaatcttagagctttaacatcaaaatatgttaaataacagttggatataatgtttcagaacatttttagttattttttaatcttgtttaataggttaaaaacacaaagtcaagaagaagaacttatgaaactggctaaacaatttgataaaaatatggaagagctagatgtgattcaagagcaaaacaagaggaattatgattttacccagatgatttcagaaacagagattttaagtaattataaagataatatacagatgtggtcattacataatatagttcccgaaatagataatgctacaaaaaagccaatcaaaggaaacaccaagatatctgtggcaaataatcaaaatagcagtcagaagccatttgaccaaattgctgaagcagcctttaatgctatttttgatggttctactcagaaatgtagcggacagttaagccaagaactgccagaggctttttggagcaccagtaatactacctttgtaaagacaaatgctttgaaagaggagaaaatcattactaatgaaactctggtcattgaaaaactgtcaaataaaaccccacgatcactttcttctcaagtagatacacccataatgacaaaatcatgtgtgacttcctgtactaaggagccagaaacttctaataagtacattgatgcatttactacaagtgattttgaggatgattgggaaaacttactaggtagtgaaccttttgctatgcaaaatatcgacatgcctgaactctttccttctaaaacagcccatgttactgatcaaaaggaaatttgtacctttaatagtaaaactgttaaaaatacgtcaagagcaaatacaagtccagatgccaggttaggagattcaaaagtattacaagatctttcttcaaagacatatgacagagaattaatagatgcagaatatagattttcaccaaattcaaataaatcaaacaaattatccactggaaataaaatgaaatttgagaactcttccaataaaattgttattcaagacgaaattcaaaattgtatagttacatctaatctgacaaaaataaaggaagatattcttactaactctactgaagcttctgaaaggaagtcagctttgaacacaaggtattctaatgaacagaaaaataagtgcattttaaatcagtctattaaagcccctgttaatactgatctttttggctctgcaaatctaggcagtaaaaccagtgttagtaacccaaatcagactagtgcatcaaaagtaggttctttctttgatgattggaatgatccctcatttgccaatgaaattattaaagcatgtcatcaattagataatacctgggaagcagatgatgtagatgatgatttgttgtaccaagcatgtgatgatattgaaagactaactcagcaacaagacattagaaaggacagtaagacatcagaaagtatatgtgagatcaataataattccgaacatggagccaaactaactcagcaacaagacattagaaaggacagtaagacatcagaaagtatatgtgagatcaataataattccgaacatggagccaaaaacatgtttgctatatctaaacaaggaagtaatttggtacaatcaaagcatttgaatccaggcagcatttcagtgcagacatctttgacaaatagctcacaaatagataagccaatgaagatggagaaaggggaaatgtatggaaattctccaagatttttaggtgccacaaatttgactatgtattctaagatctcaaactgtcagataaataatctgcatgtgtcttatactaacactgatgttccaatacaagtgaatagttccaaattggttcttccaggaagttcaagtttgaatgtaacttcagatcatatgaatacagaaattactacttataagaagaaattgagtactaatcagccatgccataagactgtaacagatgaagctcagagcaaccttaacacaacagttggattttcaaagtttacatttacaaggatgaaaaattctcagattctttctcagtttaatcaaaattgtataactggaagtatgtctgataccaaaattacacag

SEQ ID NO: 492 - DNA, 2022 bp, Homo sapiens
gtaagttaagacttttcagcttttctgaaattcagtgaagcaaatattttttgataatactccattttggttttgtgaatatatcaaaatttttgttaataaaatttccacagttttgatctatcaaattttggagttaaaataattataactgttaaaatcttagagctttaacatcaaaatatgttaaataacagttggatataatgtttcagaacatttttagttattttttaatcttgtttaataggttaaaaacacaaagtcaagaagaagaacttatgaaactggctaaacaatttgataaaaatatggaagagctagatgtgattcaagagcaaaacaagaggaattatgattttacccagatgatttcagaaacagagattttaagtaattataaagataatatacagatgtggtcattacataatatagttcccgaaatagataatgctacaaaaaagccaatcaaaggaaacaccaagatatctgtggcaaataatcaaaatagcagtcagaagccatttgaccaaattgctgaagcagcctttaatgctatttttgatggttctactcagaaatgtagcggacagttaagccaagaactgccagaggctttttggagcaccagtaatactacctttgtaaagacaaatgctttgaaagaggagaaaatcattactaatgaaactctggtcattgaaaaactgtcaaataaaaccccacgatcactttcttctcaagtagatacacccataatgacaaaatcatgtgtgacttcctgtactaaggagccagaaacttctaataagtacattgatgcatttactacaagtgattttgaggatgattgggaaaacttactaggtagtgaaccttttgctatgcaaaatatcgacatgcctgaactctttccttctaaaacagcccatgttactgatcaaaaggaaatttgtacctttaatagtaaaactgttaaaaatacgtcaagagcaaatacaagtccagatgccaggttaggagattcaaaagtattacaagatctttcttcaaagacatatgacagagaattaatagatgcagaatatagattttcaccaaattcaaataaatcaaacaaattatccactggaaataaaatgaaatttgagaactcttccaataaaattgttattcaagacgaaattcaaaattgtatagttacatctaatctgacaaaaataaaggaagatattcttactaactctactgaagcttctgaaaggaagtcagctttgaacacaaggtattctaatgaacagaaaaataagtgcattttaaatcagtctattaaagcccctgttaatactgatctttttggctctgcaaatctaggcagtaaaaccagtgttagtaacccaaatcagactagtgcatcaaaagtaggttctttctttgatgattggaatgatccctcatttgccaatgaaattattaaagcatgtcatcaattagataatacctgggaagcagatgatgtagatgatgatttgttgtaccaagcatgtgatgatattgaaagactaactcagcaacaagacattagaaaggacagtaagacatcagaaagtatatgtgagatcaataataattccgaacatggagccaaactaactcagcaacaagacattagaaaggacagtaagacatcagaaagtatatgtgagatcaataataattccgaacatggagccaaaaacatgtttgctatatctaaacaaggaagtaatttggtacaatcaaagcatttgaatccaggcagcatttcagtgcagacatctttgacaaatagctcacaaatagataagccaatgaagatggagaaaggggaaatgtatggaaattctccaagatttttaggtgccacaaatttgactatgtattctaagatctcaaactgtcagataaataatctgcatgtgtcttatactaacactgatgttccaatacaagtgaatagttccaaattggttcttccag

SEQ ID NO: 493 - DNA, 105 bp, Homo sapiens
attcctgaccccgcagtgggcgcgatggcggaggctgtactgagggtcgcccggcggcagctgagccagcgcggcgggtctggagcccccatcctcctgcggcag

SEQ ID NO: 494 - DNA, 265 bp, Homo sapiens
attcctgaccccgcagtgggcgcgatggcggaggctgtactgagggtcgcccggcggcagctgagccagcgcggcgggtctggagcccccatcctcctgcggcaggtgcgggtggctggacctaggaggggactgctgggcactaggcggcagcaaggacggaactccggggtctcttaatagggagagatccggggggacccacgcctgcatcttgcggaaagcggggtggaggtttagggctggactcttgggtcctttaaag

SEQ ID NO: 495 - DNA, 437 bp, Homo sapiens
gtgcgggtggctggacctaggaggggactgctgggcactaggcggcagcaaggacggaactccggggtctcttaatagggagagatccggggggacccacgcctgcatcttgcggaaagcggggtggaggtttagggctggactcttgggtcctttaaaggtgagtggtctgggggcctctgggcttggggccagacccctgggtcctctatgaaagaacgtgctggggaccctgattttgggatgttaggaagttggaactcttttgttctgataggggaaggtagtggggctccggactcccgactcccggggaaagagtgggctggggtttctgcttctggatcttaggaagaggatagggtcagtctggactacttggcctccagtgggtggaagtccggttctgcgccctcacctgggtcccccgttcccag

SEQ ID NO: 496 - DNA, 277 bp, Homo sapiens
gtgagtggtctgggggcctctgggcttggggccagacccctgggtcctctatgaaagaacgtgctggggaccctgattttgggatgttaggaagttggaactcttttgttctgataggggaaggtagtggggctccggactcccgactcccggggaaagagtgggctggggtttctgcttctggatcttaggaagaggatagggtcagtctggactacttggcctccagtgggtggaagtccggttctgcgccctcacctgggtcccccgttcccag

SEQ ID NO: 497 - DNA, 85 bp, Homo sapiens
gctttccacgtttgtgcagcaatcctcgagtgtttagagaagaggaagatatcctggctggcactctttcagttgacagagagtg

SEQ ID NO: 498 - DNA, 106 bp, Homo sapiens
agcaccacagacctgccaaaggctttccacgtttgtgcagcaatcctcgagtgtttagagaagaggaagatatcctggctggcactctttcagttgacagagagtg

SEQ ID NO: 499 - DNA, 373 bp, Homo sapiens
gctttccacgtttgtgcagcaatcctcgagtgtttagagaagaggaagatatcctggctggcactctttcagttgacagagagtggtaagaaacacgctgctgaggcacaaatgcggagggccgctcttttcagaggcatcttgcaaatggttaagaacgagccctccttgaggttccttgctaagtaagtttataagctccattttagttgggacagattaagcacaaacttgtttaaagcaataagataatttactggctcactggtcaaccccaggaccaatgggcctatcatggggactgcctctctctgcaccacacccaccctcctgcaagaggtcgacccccccatcctctcccagctgctgacag

SEQ ID NO: 500 - DNA, 394 bp, Homo sapiens
agcaccacagacctgccaaaggctttccacgtttgtgcagcaatcctcgagtgtttagagaagaggaagatatcctggctggcactctttcagttgacagagagtggtaagaaacacgctgctgaggcacaaatgcggagggccgctcttttcagaggcatcttgcaaatggttaagaacgagccctccttgaggttccttgctaagtaagtttataagctccattttagttgggacagattaagcacaaacttgtttaaagcaataagataatttactggctcactggtcaaccccaggaccaatgggcctatcatggggactgcctctctctgcaccacacccaccctcctgcaagaggtcgacccccccatcctctcccagctgctgacag

SEQ ID NO: 501 - DNA, 440 bp, Homo sapiens
gtaagaaacacgctgctgaggcacaaatgcggagggccgctcttttcagaggcatcttgcaaatggttaagaacgagccctccttgaggttccttgctaagtaagtttataagctccattttagttgggacagattaagcacaaacttgtttaaagcaataagataatttactggctcactggtcaaccccaggaccaatgggcctatcatggggactgcctctctctgcaccacacccaccctcctgcaagaggtcgacccccccatcctctcccagctgctgacaggtacctgggtatcctcagctcaggctgttcgccccacactatccccacagccaggcctcccagggtacacgtcccgacccccaggggtgtccccagcactgataataggcagagatgtccagagttgcctgagccacttcttggtgttgcag

SEQ ID NO: 502 - DNA, 152 bp, Homo sapiens
gtacctgggtatcctcagctcaggctgttcgccccacactatccccacagccaggcctcccagggtacacgtcccgacccccaggggtgtccccagcactgataataggcagagatgtccagagttgcctgagccacttcttggtgttgcag

SEQ ID NO: 503 - DNA, 111 bp, Homo sapiens
gggaagatggcggactcggtggctagccgatgaggaggccgcggggggaacccggcccccgggccccgagaccgactgagggagcgacctgcgcagggcccggggagtcat

SEQ ID NO: 504 - DNA, 125 bp, Homo sapiens
atctaggggctgctgggaagatggcggactcggtggctagccgatgaggaggccgcggggggaacccggcccccgggccccgagaccgactgagggagcgacctgcgcagggcccggggagtcat

SEQ ID NO: 505 - DNA, 158 bp, Homo sapiens
gatagctgcttcgggattggcgtccgggcggctatctaggggctgctgggaagatggcggactcggtggctagccgatgaggaggccgcggggggaacccggcccccgggccccgagaccgactgagggagcgacctgcgcagggcccggggagtcat

SEQ ID NO: 506 - DNA, 178 bp, Homo sapiens
gagccacgtctccgaagaccgatagctgcttcgggattggcgtccgggcggctatctaggggctgctgggaagatggcggactcggtggctagccgatgaggaggccgcggggggaacccggcccccgggccccgagaccgactgagggagcgacctgcgcagggcccggggagtcat

SEQ ID NO: 507 - DNA, 762 bp, Homo sapiens
gtaggggtggcgcctgcggggagggctgcgggagggcagcgggagctggtgttagcggcagcggccacggtctcctggcgtccctgggccggggtgggtgttggggcccccgacttcgccgactccgcgccatcgcaaagcggtgcactcgggctccacgcgcgccctgcgaggtgggcgctgcgttttcatttcacgggtgaggagacttagagagacgaagccacttgtccaaggtcacgccgctggtgagtgggagcgcccagcatggaacccagcaccgtccagccgcggagcccgcgttccaccctctgtgccgccgccgcctcctgtgggagagggaggtggtcgggagagtgcacgccggtgccgcctgggctccagactgggcgcgaccactaacccggttaatgacctcgggcttaacttaaccccttcgctgctctgggcctgcgtttctccaccggtgaaatgaggtaatgccagccctgcctactcttcatgggcgtgtaaggagcatcagagatggtgcatgtggaattgctttgcaagtagtgctgcgctgagcgcactgaggattatgattgctgtttcaaaggcgtggaaggaggcagaggggcggggtggggaagaggcccagagcagtcacaaaggcttgctctgaccacaggccccctaaatgaggagtgaggtaagcagtaggtagcaggtctttctcccctttggagaaaacctcacccccttttttgggctgcccctcag

SEQ ID NO: 508 - DNA, 587 bp, Homo sapiens
gggaagatggcggactcggtggctagccgatgaggaggccgcggggggaacccggcccccgggccccgagaccgactgagggagcgacctgcgcagggcccggggagtcatgtaggggtggcgcctgcggggagggctgcgggagggcagcgggagctggtgttagcggcagcggccacggtctcctggcgtccctgggccggggtgggtgttggggcccccgacttcgccgactccgcgccatcgcaaagcggtgcactcgggctccacgcgcgccctgcgaggtgggcgctgcgttttcatttcacgggtgaggagacttagagagacgaagccacttgtccaaggtcacgccgctggtgagtgggagcgcccagcatggaacccagcaccgtccagccgcggagcccgcgttccaccctctgtgccgccgccgcctcctgtgggagagggaggtggtcgggagagtgcacgccggtgccgcctgggctccagactgggcgcgaccactaacccggttaatgacctcgggcttaacttaaccccttcgctgctctgggcctgcgtttctccaccggtgaaatgag

SEQ ID NO: 509 - DNA, 601 bp, Homo sapiens
atctaggggctgctgggaagatggcggactcggtggctagccgatgaggaggccgcggggggaacccggcccccgggccccgagaccgactgagggagcgacctgcgcagggcccggggagtcatgtaggggtggcgcctgcggggagggctgcgggagggcagcgggagctggtgttagcggcagcggccacggtctcctggcgtccctgggccggggtgggtgttggggcccccgacttcgccgactccgcgccatcgcaaagcggtgcactcgggctccacgcgcgccctgcgaggtgggcgctgcgttttcatttcacgggtgaggagacttagagagacgaagccacttgtccaaggtcacgccgctggtgagtgggagcgcccagcatggaacccagcaccgtccagccgcggagcccgcgttccaccctctgtgccgccgccgcctcctgtgggagagggaggtggtcgggagagtgcacgccggtgccgcctgggctccagactgggcgcgaccactaacccggttaatgacctcgggcttaacttaaccccttcgctgctctgggcctgcgtttctccaccggtgaaatgag

SEQ ID NO: 510 - DNA, 634 bp, Homo sapiens
gatagctgcttcgggattggcgtccgggcggctatctaggggctgctgggaagatggcggactcggtggctagccgatgaggaggccgcggggggaacccggcccccgggccccgagaccgactgagggagcgacctgcgcagggcccggggagtcatgtaggggtggcgcctgcggggagggctgcgggagggcagcgggagctggtgttagcggcagcggccacggtctcctggcgtccctgggccggggtgggtgttggggcccccgacttcgccgactccgcgccatcgcaaagcggtgcactcgggctccacgcgcgccctgcgaggtgggcgctgcgttttcatttcacgggtgaggagacttagagagacgaagccacttgtccaaggtcacgccgctggtgagtgggagcgcccagcatggaacccagcaccgtccagccgcggagcccgcgttccaccctctgtgccgccgccgcctcctgtgggagagggaggtggtcgggagagtgcacgccggtgccgcctgggctccagactgggcgcgaccactaacccggttaatgacctcgggcttaacttaaccccttcgctgctctgggcctgcgtttctccaccggtgaaatgag

SEQ ID NO: 511 - DNA, 654 bp, Homo sapiens
gagccacgtctccgaagaccgatagctgcttcgggattggcgtccgggcggctatctaggggctgctgggaagatggcggactcggtggctagccgatgaggaggccgcggggggaacccggcccccgggccccgagaccgactgagggagcgacctgcgcagggcccggggagtcatgtaggggtggcgcctgcggggagggctgcgggagggcagcgggagctggtgttagcggcagcggccacggtctcctggcgtccctgggccggggtgggtgttggggcccccgacttcgccgactccgcgccatcgcaaagcggtgcactcgggctccacgcgcgccctgcgaggtgggcgctgcgttttcatttcacgggtgaggagacttagagagacgaagccacttgtccaaggtcacgccgctggtgagtgggagcgcccagcatggaacccagcaccgtccagccgcggagcccgcgttccaccctctgtgccgccgccgcctcctgtgggagagggaggtggtcgggagagtgcacgccggtgccgcctgggctccagactgggcgcgaccactaacccggttaatgacctcgggcttaacttaaccccttcgctgctctgggcctgcgtttctccaccggtgaaatgag

SEQ ID NO: 512 - DNA, 359 bp, Homo sapiens
gggaagatggcggactcggtggctagccgatgaggaggccgcggggggaacccggcccccgggccccgagaccgactgagggagcgacctgcgcagggcccggggagtcatgtaggggtggcgcctgcggggagggctgcgggagggcagcgggagctggtgttagcggcagcggccacggtctcctggcgtccctgggccggggtgggtgttggggcccccgacttcgccgactccgcgccatcgcaaagcggtgcactcgggctccacgcgcgccctgcgaggtgggcgctgcgttttcatttcacgggtgaggagacttagagagacgaagccacttgtccaaggtcacgccgctg

SEQ ID NO: 513 - DNA, 373 bp, Homo sapiens
atctaggggctgctgggaagatggcggactcggtggctagccgatgaggaggccgcggggggaacccggcccccgggccccgagaccgactgagggagcgacctgcgcagggcccggggagtcatgtaggggtggcgcctgcggggagggctgcgggagggcagcgggagctggtgttagcggcagcggccacggtctcctggcgtccctgggccggggtgggtgttggggcccccgacttcgccgactccgcgccatcgcaaagcggtgcactcgggctccacgcgcgccctgcgaggtgggcgctgcgttttcatttcacgggtgaggagacttagagagacgaagccacttgtccaaggtcacgccgctg

SEQ ID NO: 514 - DNA, 406 bp, Homo sapiens
gatagctgcttcgggattggcgtccgggcggctatctaggggctgctgggaagatggcggactcggtggctagccgatgaggaggccgcggggggaacccggcccccgggccccgagaccgactgagggagcgacctgcgcagggcccggggagtcatgtaggggtggcgcctgcggggagggctgcgggagggcagcgggagctggtgttagcggcagcggccacggtctcctggcgtccctgggccggggtgggtgttggggcccccgacttcgccgactccgcgccatcgcaaagcggtgcactcgggctccacgcgcgccctgcgaggtgggcgctgcgttttcatttcacgggtgaggagacttagagagacgaagccacttgtccaaggtcacgccgctg

SEQ ID NO: 515 - DNA, 426 bp, Homo sapiens
gagccacgtctccgaagaccgatagctgcttcgggattggcgtccgggcggctatctaggggctgctgggaagatggcggactcggtggctagccgatgaggaggccgcggggggaacccggcccccgggccccgagaccgactgagggagcgacctgcgcagggcccggggagtcatgtaggggtggcgcctgcggggagggctgcgggagggcagcgggagctggtgttagcggcagcggccacggtctcctggcgtccctgggccggggtgggtgttggggcccccgacttcgccgactccgcgccatcgcaaagcggtgcactcgggctccacgcgcgccctgcgaggtgggcgctgcgttttcatttcacgggtgaggagacttagagagacgaagccacttgtccaaggtcacgccgctg

SEQ ID NO: 516 - DNA, 286 bp, Homo sapiens
gtaatgccagccctgcctactcttcatgggcgtgtaaggagcatcagagatggtgcatgtggaattgctttgcaagtagtgctgcgctgagcgcactgaggattatgattgctgtttcaaaggcgtggaaggaggcagaggggcggggtggggaagaggcccagagcagtcacaaaggcttgctctgaccacaggccccctaaatgaggagtgaggtaagcagtaggtagcaggtctttctcccctttggagaaaacctcacccccttttttgggctgcccctcag

SEQ ID NO: 517 - DNA, 514 bp, Homo sapiens
gtgagtgggagcgcccagcatggaacccagcaccgtccagccgcggagcccgcgttccaccctctgtgccgccgccgcctcctgtgggagagggaggtggtcgggagagtgcacgccggtgccgcctgggctccagactgggcgcgaccactaacccggttaatgacctcgggcttaacttaaccccttcgctgctctgggcctgcgtttctccaccggtgaaatgaggtaatgccagccctgcctactcttcatgggcgtgtaaggagcatcagagatggtgcatgtggaattgctttgcaagtagtgctgcgctgagcgcactgaggattatgattgctgtttcaaaggcgtggaaggaggcagaggggcggggtggggaagaggcccagagcagtcacaaaggcttgctctgaccacaggccccctaaatgaggagtgaggtaagcagtaggtagcaggtctttctcccctttggagaaaacctcacccccttttttgggctgcccctcag

SEQ ID NO: 518 - DNA, 70 bp, Homo sapiens
atgttgaaattaaattagatgaagaaggatttgtattgccatccacagctaatgaagatatccataaaag

SEQ ID NO: 519 - DNA, 191 bp, Homo sapiens
ccttcagtccaattgatcaatgcaaggtggaaggaatcaaagcaaagcaaaggaatgaatacaggaagatagtgtttgtgagggtatcacacgaggaatttttcctttcttctctcaccagatgttgaaattaaattagatgaagaaggatttgtattgccatccacagctaatgaagatatccataaaag

SEQ ID NO: 520 - DNA, 1170 bp, Homo sapiens
gtaagtagtataaggagttttgttgttttaaacctaagcatcctgttcgattttggagatatatgggacttagaagcaatagaagttctctggaaatgcaaaatggaatggtcccttccctgaaggcaagttggggttagcagcagagccgttgagtcaagactgtctgggtttaagtctcaaatattagccacgtagtagcagaatatcctgggcagaatatttaacctttttctgcttgcttcttcctctgtaaaatgatagtaatattgacctcaaagacttacttaaggtctaaataaaatagtacctggaacgtaggaaatgctcactaattgttagctactactataacctaggcttgtactgtccaaatatagtagccactagaccatgtggctatttaaatttaaattattaaaagtttaagaaaattcaattcctcagtcacattgtaagtgctcagtagccacatgtggctcatggctgccaaattggacagcaccattataaagatttccacatcacagaaatttctcctggacagcactgacaagagactccaagtcctccgtccttacagttcttctaacttgatgagcagaagaaagccttctcgtaaaggacagcagttcataggcttcagatggtcacttctcttctctttacgaagggaactgcagtttaccagaggggaaggacagttcggaagccttccgtgctcgcagaccaggtgtctgggtgtggcatgctttctttacttaccatggaggcactgcaagttggaatgatggaagttatgagttgcacagatgtctaatgtcttaactcaagggttttcttcacagtctggattgaaggatctctgccacctatcataaggggaaagagaaagcatgcatggttcttgtcataccccagataacttcagaacccattctgtggtttagcgttattgagctttcttaatttaaggctgacttgattgatcataaagccaattgaattaaaattctcaccattgtttggttgtggtcattactttgcagccttcagtccaattgatcaatgcaaggtggaaggaatcaaagcaaagcaaaggaatgaatacaggaagatagtgtttgtgagggtatcacacgaggaatttttcctttcttctctcaccag

SEQ ID NO: 521 - DNA, 1049 bp, Homo sapiens
gtaagtagtataaggagttttgttgttttaaacctaagcatcctgttcgattttggagatatatgggacttagaagcaatagaagttctctggaaatgcaaaatggaatggtcccttccctgaaggcaagttggggttagcagcagagccgttgagtcaagactgtctgggtttaagtctcaaatattagccacgtagtagcagaatatcctgggcagaatatttaacctttttctgcttgcttcttcctctgtaaaatgatagtaatattgacctcaaagacttacttaaggtctaaataaaatagtacctggaacgtaggaaatgctcactaattgttagctactactataacctaggcttgtactgtccaaatatagtagccactagaccatgtggctatttaaatttaaattattaaaagtttaagaaaattcaattcctcagtcacattgtaagtgctcagtagccacatgtggctcatggctgccaaattggacagcaccattataaagatttccacatcacagaaatttctcctggacagcactgacaagagactccaagtcctccgtccttacagttcttctaacttgatgagcagaagaaagccttctcgtaaaggacagcagttcataggcttcagatggtcacttctcttctctttacgaagggaactgcagtttaccagaggggaaggacagttcggaagccttccgtgctcgcagaccaggtgtctgggtgtggcatgctttctttacttaccatggaggcactgcaagttggaatgatggaagttatgagttgcacagatgtctaatgtcttaactcaagggttttcttcacagtctggattgaaggatctctgccacctatcataaggggaaagagaaagcatgcatggttcttgtcataccccagataacttcagaacccattctgtggtttagcgttattgagctttcttaatttaaggctgacttgattgatcataaagccaattgaattaaaattctcaccattgtttggttgtggtcattactttgcag

SEQ ID NO: 522 - DNA, 103 bp, Homo sapiens
gaagcctgtggtgtgcggagtctcctctcttggcatcgaccacaccagcctcctgggggatacggtggagaagatcgcatggcagaaagggggcatctttaag

SEQ ID NO: 523 - DNA, 190 bp, Homo sapiens
gaagcctgtggtgtgcggagtctcctctcttggcatcgaccacaccagcctcctgggggatacggtggagaagatcgcatggcagaaagggggcatctttaaggtgaccaggcagactgggggaagggagagacatggaaggcctgggagtctacgttttcatcctggcttcactgtgtgactggaacaa

SEQ ID NO: 524 - DNA, 545 bp, Homo sapiens
gtgaccaggcagactgggggaagggagagacatggaaggcctgggagtctacgttttcatcctggcttcactgtgtgactggaacaagttgagtctcctctccagactatttccccattgaaacgtgagggatggctgggcatggtggcttatatgcttgcaatcccagcatttcaggaggtcgaggtgagaggatcacctgagatccggagtttgagaccagcctgaccaatatggggaaactctgtctctactaaaaatacaaaaattagccaggtgtggtggtgtacgcctgtagttccagctacttgggagactgaggcaggagaatcactcgaacccgggaggcagacgttgcagtgagccgagattgcgccacagcactccagcctgggtgacagagtgagacttcatctcgaaaaagaaaagaaaagaaacatgagggatgagagacagtggtagcccagacccagggatgtgggggccagagataggagtgtggaggatgctaggtagccctttctctctccttcttccctccacag

SEQ ID NO: 525 - DNA, 458 bp, Homo sapiens
gttgagtctcctctccagactatttccccattgaaacgtgagggatggctgggcatggtggcttatatgcttgcaatcccagcatttcaggaggtcgaggtgagaggatcacctgagatccggagtttgagaccagcctgaccaatatggggaaactctgtctctactaaaaatacaaaaattagccaggtgtggtggtgtacgcctgtagttccagctacttgggagactgaggcaggagaatcactcgaacccgggaggcagacgttgcagtgagccgagattgcgccacagcactccagcctgggtgacagagtgagacttcatctcgaaaaagaaaagaaaagaaacatgagggatgagagacagtggtagcccagacccagggatgtgggggccagagataggagtgtggaggatgctaggtagccctttctctctccttcttccctccacag

SEQ ID NO: 526 - DNA, 415 bp, Homo sapiens
attcatcatcagcaatggactgcggaccgagcacggggtgtttgagatcacactggagactgtggacagagccctgcctgtggtaaccaggaacaaggggttgagactggcccaaggggccgtgggcctgctttcccctgacctccttcagctgaccgaccctgatacacctgcggagaacctcaccttcctcttggttcagctcccccagcatggccagctctacctgtgggggacagggctacttcaacacaatttcacccagcaggatgtggacagcaagaatgtggcctatcggcactcaggaggggactcccagactgactgctttactttcatggccacagatgggacaaaccaaggctttattgtgaatgggagagtgtgggaagaacctgttttattcaccattcag

SEQ ID NO: 527 - DNA, 8166 bp, Homo sapiens
gtgagccccatggaaacttttcaaaccccttctttggattaatacttacagaaaaggagatctgttaatgtgcttcactatagtaaccatttcacaaaatacatgtatcttataacatcacgctgtataccttaaatttatagaatgaaatttgttttttaaaaaaaggaaagaaaaggagaaaaaaatgagtcatttttcagctctggtgcagctgtgtttttcttttactgtcttgttgtatgtaaggtgaagccacacgattaaaatgacagaagcaaagcaagaaattagggcctgttattgaaaaatatacacagtaaacagatctttatgcaagttctgctacgaggagaaatgtgaaaagctgaggctcccagctaaagatagatctggaaaagtcatttccctctttttggagtatgtttttctgtctgacgaaaagggatttattagtaaacatttggcataaacagagactgccttttgacacaatgtgttctggtaactgtatcataaatcatgttgtcataaagtagatcatatttccccatagaaacaatgttgtaattgggggctgcgcacctgttccagaattccgtatcaaataaatcattggaatgaataacaatctggtgaaaaggcaaagatacaacattaatgaaaatctacattcatttaaaatatggaaatttgtttcaagtcacataaagcaagagccaagtccagaagatctataatctcgcagctctcaaagctggttgatcctgaggtcctggagagaaacacagatccccaggccgggcatgagaactgggaaatgttggactttgaacgaaccattgtatacaatccagttttgagttctgtcagttcagaaggaggcctggagagcactggtttgtctattgtacacccacacttttggttcctggtgcaattttcaccacgtcacaatacagtcttctaaagagcactataaaataacataaatggagcatactcctatattattcaatgggttcccataaactatcaagtatcactgtcacacccatgttcgaatatcactgtcctctatcttacttttacctatctaaattcaatatatctgctctgataaacactggttagatgtcagtaaagaggatgctgctcacctttttagcattaaaatgatttttgaaagctgatttggataatccaacaaaacaaaacaaaaaatcccagaaagctggaacgaatatcttatttttttctcttgataagtgtcccttaacaagcaggtaatcatttaattgatcaatattttaactagttcagtctttgagtgttgctaggcattcactaaaatgtgagatgtggggattccttttcaagctggctcttttgtttgagagatggagtagtgaagttaagatacaggcttgggggcaagaactgcctgagtgactcacaactctgtgacaatcatcaggttacacaacctcctgtgctcttgtttcctcttctttgaaatggaatgatgctcgtagcacctgcctcacaaggttgcgggaggtttatatgagcttatgcatgtaaagtattagtagaacaacacctggcacataggaagaactaagtaagtgttagctactactcttactgtcgttgttgttgtcattatattctttccttgacgaccttcttccaatctttacaacaccaagtatgatcttgaaggaggaaaggagttaccaagaggagcaatgattgttctttttttcctgtttgcttatgaaggctgggtgcttcttggcttaatacatttgtatcagatccagggcttttaattttacatgcatttctggaacttctagcttctttcatttcctgcttccctccgtcaatgcccacaggacagtctgctgaagacattagtgactgtcttgaagaaaccagtgaccttgctggagaacacaggactgaatgcataaagatgttcagaaatgaaggttagatattaatcgaatggtgagaataaagaacaaaacctccgtatgaaacgattggcaatactgtaaaaatttcctaatttgcatccagagaaagtcttattagatggcattttagaaatcatttatcccaggaatttctacatttctggatcctcagataattgccagagagaactacaaaatgcaaattcttgggccttaccccagagaggcaactttggtaagtccagtctcaggcccagaaatctgtatttttgaaagatatcttcaggtaattctgatgcagtcaggactagccatcaatagtctggtctagtctgttgttctgaattgttctgaggagcctcaagaatttatggaagttgaggctggggcagtggctcacgcctgtaatcccagcactttaggaggacgaggcaggtggatcacctgaggtcaggagttcgagaccagcctggccaacatggcgaaaccccgtctctactaaaaatacaaaaaattagttgggagtggtggcgggcacctgtaatcctagctacttaggaggctgtggcaagagaattgcttgagcccgggaggcagaagttgcagtgagccacgatggtgccactacactccagcctgggcaacaagagcgaaactccatctcaaaaaaaagaatttatagaagcctttttagggcctcccagagattgagattctggggccttcagcccaatgtactgatggaacttaggtgtgtgtgttgtgtgtgagtgtgtgtgggtgttgatactaaaaacagtactataaataccataaaactaaatataagaaaacaaattttttatgcttgcaagtattcagtttttagtagttaaaaggtttccttttaaatacattgattcaagttaaaaattgaattgatagaaaactagtaaataataagagtacacatagtacaggcatatggcaaaaatatggtttcaattactcaagattaggaaacaaggttttagggagaaaataaacaataaaggctgaaaagcattgatttggtgcaatcccttatttacacataggaaagctagcattgcctgaacacctgcaatgcaccagagaatgtcctggactttttttatatgttatttttcttaagccttatgacaccaccttgcgagagatgcaatagtgttcccattgtacacatgagaaaaccaaggttccaagaggcaaaggaagtcacctaaactgacataactgagtatcactgctgaatttggggctcagagctcatttccagtagaaggttctttccattatacctcgttgtaccaaaaatttgtggagaatatgcatttgtgtgaaggaacctcctcaatgtgtcattctgatatttggccagcagttttacatatttataatggaagagcctagcgtctgcccaagacccaaattttaatcttgtcatttcactaacccaatcacggactgctatgttgtttgtcaagtggcgctaaaccaaagctgaaagcctgttttaatgaaagtgtgatcatggtgctttttaaaaattaaatatatgcaaccaatctaatcacctaaatttatgttgcttgctgttaaatttggcaaggaatttggctgggtagaagagataaattctgtggcagaggattttcccccttccatttttaatgtaagctatggcagcattaattaaatgggggagtttaatagtcagattttaccttctgcaaaaatattttgtgaatcataaatttctcctgcattgtttggtgctgctggcctggaagaaagatttggcagcatgttctaggacagatgacaccgagtgattagcaagctgacttcagctgctggcagccgggtactaaaagaacatgctaatgtcctccattttgacatgccggctggactttttttttttttttttctgaggagctggcgctatttatgattccatttttatctcttaaatgccatgacagatggcagcttcttcagccaactctattgccaggcaatgcagaaagcttgaaagcaccgtggtaatggtgaaatcagaccaggcaggcaccccagtcaaatctgagagttattccccaaatttcatgagagcggtggtcatcttggctgcatctcttctcagggggatgtaacaagggaaattaaacaaaatggatccacagaaggagctgctaccaccaacttcttcacctcagaatggataccaacatagcaatggctttatggttttaaacattgagaatgtatttggaggatttaggggagggggtatttggaagaccatctgattgatcagcttttccagacatgaacagcactgaccttttttcacgtgtactgctagctttattttgactgggaactcaaccgtaaccattcattctgtccctctctctgatgatgtctctctgcctgtgagtagtttgcactgttacttgtgaaagtggaatgatgttatttgatccagtcatgtttagaaattgcatcattttcacccctggcctattagctttaggtcagcactgacagctgccttggtgtcccagataggagcgctggcctcagaaaacatatttcttactcttctgtggtctgtggcccgcgtgccctcactcccatctgtctgatggcaggctgcctgtttccaacgtgggcagatcacgatcttccagcagggaggggtttgagatggacagcctggatcataagacaactgcggtgacctcacagaggccatgcacgcatcgagtagatgtggccgtcctgagatgagctttgaggaccccgtcaggcattcttgcaattcagtctgcagggaggaaagtcagaattagatattcaagatggccgcctctgatggagtccctggcactcactcaagcttgcatttgggtttgttgctcctggtcccatctctccccttctttcttcttccttctctgctgatatttgacatacttttaatagtgcacaatgtctatagctctacaattaatgctaatgctaaaaatacacgtcctttggcttatatttgcgctaaggtaccaatggctgatttaacactctccacagagcacacttgatacagggatctggtaaggaacagagagccagtttaatgtgaaacagggtagaatgagaggtgtgaaacatatttctggagggggaaaatgggaaaaagggaacttggaggcactgagggagcacctagcctccttcctattttattgtgggtcagatgataggatctggggggaatatgaaaaagtaacagaaaaacaatagaataaaggcataactctgttctcaggctctgcctgagaaataaagcataattttatacctaaaaatgtatatcagtttacttttgaaactgtgaaggtgactaagtaaaaagtttgaagaacagacatatttttctaggttcctttattttcttttttaaaattatttttctttttttaagatgggcttttgccatgttgcccaggctggtctcaaactcctgagctcgagcgctccacccaccccagcctcccagagtgtccaagctataggcgtgagctaccgcgcctgacttcctttcctttccttcccttcccttcccttcccttcccttcccttcccttcccttcccttcccttcccttcccttccctccctcccctccctcccctccctcccctcccttccctccctttcctttcctctttttttttttttttttttttttgagacaggttctctgtctgttgcccaggctggagtgcggtggcacgttcatggctcactgtagcctcaacctcccaggatcaagtgatccttccacctcagcctccctagtagctggggctacaggcacgcaccacacccagctaaattttgtattttttgtagagaaagggttttgccatgttacccaggctgatattgaactcctggactcaagccatctgcccgccttggccagccaaggtactgggtttacaggtgtgagccactgcaccagcctcttttattttttttaataaataattgatttttataaatgcctcatgatccagtaatgaaattgcccaatttgttaaaaatatacttatcaaaggtttaattttatgaaaggaaaactgattggtttgttttgagaaaattatgtgattttgctcaatctataattctaaaggtaactgaatacctttattcaaggtgtaaaaaatgctgctgtgggggaaatgtatgaggtttcattctttacaagtcgaggtgtgtgaaatgtcaaaatttactttatttgttgtatttcacttagcaattttaactttttggacatagatttctttttctttgcatcaaatcagatatattttccttgtcaacagtcttattaactagataattagaaaactaaaaaacttcagcatagccttcaaagcaatatcagtactcagccaaactcatctctttttactttttgtctaactgccctccctgagtccgtggtcgcaggcaggctggttgactcgttgctttcacactatctaatagcttcaggtttcttcatgctcaaaaggatcaatgctcaaaccctgaaggacaagacacatttcacaaagaataaagggattgttagtcaaatctgccagatttgtaaaataaatataaatgccataccttctctagttaaaaaagaacttccaaagaaaatatacaatttatatatgtatataaaatttatacataaaaatgttatgtatagtttatacattctacgaaagcattagttttagaggtttttgtatcggtggaatagaagagtgcatcctctacgaatatttccagcaactatggtacatggagaaaagctaacaaggcacaattctgtgattatttctaagtacatttctttggtgtacagtgaatttgtcagtcccattggatagtaacgatttcctaactttttggagttttaatattgtgccttgtttgcataatttcatgatactcttaatcttattgaaataaaaattacatattgtaatgctacaaagatcatttaaatcagtgttattgtgaaattggcttcagtaggtagaatgtgatttcatgatcaatagaatcaaaagcacattaagatatcacaaacctaagactgtaagaaagattttgcttgtctcaaatgtgtatcatttcagctttctttttatagttttgcaatggtgctcaggcaccacaactcttttgtggtggattgctaaaccagaatttgttttaaactctgcaagagtagtgggtgcagggattaaaagacctgcattctagtctcagcttcatctcctacctgcccttatgatctcccaccaactttgtgaacctttctttgaagcaggaaaataatccttgtgtagcataactctcatctgtcttatagggggagaaagtgcagaagcacatgtaaaccataagagattagagcctcccgtcatattttagagttgggtggtacttaatgatcttctggtccatccccttcatttttcagagccatggaaatgaggcctggaaggggaagatgatttaagtgagattacatgtctgagaaatgtgatctgctattaagaaatttaccataaaaacgtatgagtagaatgaattagctaaattcaactcatttagcactttattgtattggcctcccagttgtcagacttacaactttagtctattacacaccaatgaagaaaaaaacaattgaaaaattataaataaataaagggggtatactcttcaaatttgtatgatgagtctcattggatgtgaaatttttatttgcgtcaaggaaccacattaagcactgatgagcctgagaaatatgattgtcagaatttccctgttccatcacatgggtctgtcattaatgttgttgggaaaatattcttgggtgtagaatggtccatttatgcattactctagtgactggtttaatgatagggatttttctgcaagatctgcccttgatttttcatttgagtcacaacacgacaataccctttagtaaaggtgtgtattgttatcatttcattccagtagatggtgacacaagaatccatgctgaaggctgccttgcctctctttaccag

SEQ ID NO: 528 - DNA, 465 bp, Homo sapiens
atggtgacacaagaatccatgctgaaggctgccttgcctctctttaccagattcatcatcagcaatggactgcggaccgagcacggggtgtttgagatcacactggagactgtggacagagccctgcctgtggtaaccaggaacaaggggttgagactggcccaaggggccgtgggcctgctttcccctgacctccttcagctgaccgaccctgatacacctgcggagaacctcaccttcctcttggttcagctcccccagcatggccagctctacctgtgggggacagggctacttcaacacaatttcacccagcaggatgtggacagcaagaatgtggcctatcggcactcaggaggggactcccagactgactgctttactttcatggccacagatgggacaaaccaaggctttattgtgaatgggagagtgtgggaagaacctgttttattcaccattcag

SEQ ID NO: 529 - DNA, 468 bp, Homo sapiens
tagatggtgacacaagaatccatgctgaaggctgccttgcctctctttaccagattcatcatcagcaatggactgcggaccgagcacggggtgtttgagatcacactggagactgtggacagagccctgcctgtggtaaccaggaacaaggggttgagactggcccaaggggccgtgggcctgctttcccctgacctccttcagctgaccgaccctgatacacctgcggagaacctcaccttcctcttggttcagctcccccagcatggccagctctacctgtgggggacagggctacttcaacacaatttcacccagcaggatgtggacagcaagaatgtggcctatcggcactcaggaggggactcccagactgactgctttactttcatggccacagatgggacaaaccaaggctttattgtgaatgggagagtgtgggaagaacctgttttattcaccattcag

SEQ ID NO: 530 - DNA, 8116 bp, Homo sapiens
gtgagccccatggaaacttttcaaaccccttctttggattaatacttacagaaaaggagatctgttaatgtgcttcactatagtaaccatttcacaaaatacatgtatcttataacatcacgctgtataccttaaatttatagaatgaaatttgttttttaaaaaaaggaaagaaaaggagaaaaaaatgagtcatttttcagctctggtgcagctgtgtttttcttttactgtcttgttgtatgtaaggtgaagccacacgattaaaatgacagaagcaaagcaagaaattagggcctgttattgaaaaatatacacagtaaacagatctttatgcaagttctgctacgaggagaaatgtgaaaagctgaggctcccagctaaagatagatctggaaaagtcatttccctctttttggagtatgtttttctgtctgacgaaaagggatttattagtaaacatttggcataaacagagactgccttttgacacaatgtgttctggtaactgtatcataaatcatgttgtcataaagtagatcatatttccccatagaaacaatgttgtaattgggggctgcgcacctgttccagaattccgtatcaaataaatcattggaatgaataacaatctggtgaaaaggcaaagatacaacattaatgaaaatctacattcatttaaaatatggaaatttgtttcaagtcacataaagcaagagccaagtccagaagatctataatctcgcagctctcaaagctggttgatcctgaggtcctggagagaaacacagatccccaggccgggcatgagaactgggaaatgttggactttgaacgaaccattgtatacaatccagttttgagttctgtcagttcagaaggaggcctggagagcactggtttgtctattgtacacccacacttttggttcctggtgcaattttcaccacgtcacaatacagtcttctaaagagcactataaaataacataaatggagcatactcctatattattcaatgggttcccataaactatcaagtatcactgtcacacccatgttcgaatatcactgtcctctatcttacttttacctatctaaattcaatatatctgctctgataaacactggttagatgtcagtaaagaggatgctgctcacctttttagcattaaaatgatttttgaaagctgatttggataatccaacaaaacaaaacaaaaaatcccagaaagctggaacgaatatcttatttttttctcttgataagtgtcccttaacaagcaggtaatcatttaattgatcaatattttaactagttcagtctttgagtgttgctaggcattcactaaaatgtgagatgtggggattccttttcaagctggctcttttgtttgagagatggagtagtgaagttaagatacaggcttgggggcaagaactgcctgagtgactcacaactctgtgacaatcatcaggttacacaacctcctgtgctcttgtttcctcttctttgaaatggaatgatgctcgtagcacctgcctcacaaggttgcgggaggtttatatgagcttatgcatgtaaagtattagtagaacaacacctggcacataggaagaactaagtaagtgttagctactactcttactgtcgttgttgttgtcattatattctttccttgacgaccttcttccaatctttacaacaccaagtatgatcttgaaggaggaaaggagttaccaagaggagcaatgattgttctttttttcctgtttgcttatgaaggctgggtgcttcttggcttaatacatttgtatcagatccagggcttttaattttacatgcatttctggaacttctagcttctttcatttcctgcttccctccgtcaatgcccacaggacagtctgctgaagacattagtgactgtcttgaagaaaccagtgaccttgctggagaacacaggactgaatgcataaagatgttcagaaatgaaggttagatattaatcgaatggtgagaataaagaacaaaacctccgtatgaaacgattggcaatactgtaaaaatttcctaatttgcatccagagaaagtcttattagatggcattttagaaatcatttatcccaggaatttctacatttctggatcctcagataattgccagagagaactacaaaatgcaaattcttgggccttaccccagagaggcaactttggtaagtccagtctcaggcccagaaatctgtatttttgaaagatatcttcaggtaattctgatgcagtcaggactagccatcaatagtctggtctagtctgttgttctgaattgttctgaggagcctcaagaatttatggaagttgaggctggggcagtggctcacgcctgtaatcccagcactttaggaggacgaggcaggtggatcacctgaggtcaggagttcgagaccagcctggccaacatggcgaaaccccgtctctactaaaaatacaaaaaattagttgggagtggtggcgggcacctgtaatcctagctacttaggaggctgtggcaagagaattgcttgagcccgggaggcagaagttgcagtgagccacgatggtgccactacactccagcctgggcaacaagagcgaaactccatctcaaaaaaaagaatttatagaagcctttttagggcctcccagagattgagattctggggccttcagcccaatgtactgatggaacttaggtgtgtgtgttgtgtgtgagtgtgtgtgggtgttgatactaaaaacagtactataaataccataaaactaaatataagaaaacaaattttttatgcttgcaagtattcagtttttagtagttaaaaggtttccttttaaatacattgattcaagttaaaaattgaattgatagaaaactagtaaataataagagtacacatagtacaggcatatggcaaaaatatggtttcaattactcaagattaggaaacaaggttttagggagaaaataaacaataaaggctgaaaagcattgatttggtgcaatcccttatttacacataggaaagctagcattgcctgaacacctgcaatgcaccagagaatgtcctggactttttttatatgttatttttcttaagccttatgacaccaccttgcgagagatgcaatagtgttcccattgtacacatgagaaaaccaaggttccaagaggcaaaggaagtcacctaaactgacataactgagtatcactgctgaatttggggctcagagctcatttccagtagaaggttctttccattatacctcgttgtaccaaaaatttgtggagaatatgcatttgtgtgaaggaacctcctcaatgtgtcattctgatatttggccagcagttttacatatttataatggaagagcctagcgtctgcccaagacccaaattttaatcttgtcatttcactaacccaatcacggactgctatgttgtttgtcaagtggcgctaaaccaaagctgaaagcctgttttaatgaaagtgtgatcatggtgctttttaaaaattaaatatatgcaaccaatctaatcacctaaatttatgttgcttgctgttaaatttggcaaggaatttggctgggtagaagagataaattctgtggcagaggattttcccccttccatttttaatgtaagctatggcagcattaattaaatgggggagtttaatagtcagattttaccttctgcaaaaatattttgtgaatcataaatttctcctgcattgtttggtgctgctggcctggaagaaagatttggcagcatgttctaggacagatgacaccgagtgattagcaagctgacttcagctgctggcagccgggtactaaaagaacatgctaatgtcctccattttgacatgccggctggactttttttttttttttttctgaggagctggcgctatttatgattccatttttatctcttaaatgccatgacagatggcagcttcttcagccaactctattgccaggcaatgcagaaagcttgaaagcaccgtggtaatggtgaaatcagaccaggcaggcaccccagtcaaatctgagagttattccccaaatttcatgagagcggtggtcatcttggctgcatctcttctcagggggatgtaacaagggaaattaaacaaaatggatccacagaaggagctgctaccaccaacttcttcacctcagaatggataccaacatagcaatggctttatggttttaaacattgagaatgtatttggaggatttaggggagggggtatttggaagaccatctgattgatcagcttttccagacatgaacagcactgaccttttttcacgtgtactgctagctttattttgactgggaactcaaccgtaaccattcattctgtccctctctctgatgatgtctctctgcctgtgagtagtttgcactgttacttgtgaaagtggaatgatgttatttgatccagtcatgtttagaaattgcatcattttcacccctggcctattagctttaggtcagcactgacagctgccttggtgtcccagataggagcgctggcctcagaaaacatatttcttactcttctgtggtctgtggcccgcgtgccctcactcccatctgtctgatggcaggctgcctgtttccaacgtgggcagatcacgatcttccagcagggaggggtttgagatggacagcctggatcataagacaactgcggtgacctcacagaggccatgcacgcatcgagtagatgtggccgtcctgagatgagctttgaggaccccgtcaggcattcttgcaattcagtctgcagggaggaaagtcagaattagatattcaagatggccgcctctgatggagtccctggcactcactcaagcttgcatttgggtttgttgctcctggtcccatctctccccttctttcttcttccttctctgctgatatttgacatacttttaatagtgcacaatgtctatagctctacaattaatgctaatgctaaaaatacacgtcctttggcttatatttgcgctaaggtaccaatggctgatttaacactctccacagagcacacttgatacagggatctggtaaggaacagagagccagtttaatgtgaaacagggtagaatgagaggtgtgaaacatatttctggagggggaaaatgggaaaaagggaacttggaggcactgagggagcacctagcctccttcctattttattgtgggtcagatgataggatctggggggaatatgaaaaagtaacagaaaaacaatagaataaaggcataactctgttctcaggctctgcctgagaaataaagcataattttatacctaaaaatgtatatcagtttacttttgaaactgtgaaggtgactaagtaaaaagtttgaagaacagacatatttttctaggttcctttattttcttttttaaaattatttttctttttttaagatgggcttttgccatgttgcccaggctggtctcaaactcctgagctcgagcgctccacccaccccagcctcccagagtgtccaagctataggcgtgagctaccgcgcctgacttcctttcctttccttcccttcccttcccttcccttcccttcccttcccttcccttcccttcccttcccttcccttccctccctcccctccctcccctccctcccctcccttccctccctttcctttcctctttttttttttttttttttttttgagacaggttctctgtctgttgcccaggctggagtgcggtggcacgttcatggctcactgtagcctcaacctcccaggatcaagtgatccttccacctcagcctccctagtagctggggctacaggcacgcaccacacccagctaaattttgtattttttgtagagaaagggttttgccatgttacccaggctgatattgaactcctggactcaagccatctgcccgccttggccagccaaggtactgggtttacaggtgtgagccactgcaccagcctcttttattttttttaataaataattgatttttataaatgcctcatgatccagtaatgaaattgcccaatttgttaaaaatatacttatcaaaggtttaattttatgaaaggaaaactgattggtttgttttgagaaaattatgtgattttgctcaatctataattctaaaggtaactgaatacctttattcaaggtgtaaaaaatgctgctgtgggggaaatgtatgaggtttcattctttacaagtcgaggtgtgtgaaatgtcaaaatttactttatttgttgtatttcacttagcaattttaactttttggacatagatttctttttctttgcatcaaatcagatatattttccttgtcaacagtcttattaactagataattagaaaactaaaaaacttcagcatagccttcaaagcaatatcagtactcagccaaactcatctctttttactttttgtctaactgccctccctgagtccgtggtcgcaggcaggctggttgactcgttgctttcacactatctaatagcttcaggtttcttcatgctcaaaaggatcaatgctcaaaccctgaaggacaagacacatttcacaaagaataaagggattgttagtcaaatctgccagatttgtaaaataaatataaatgccataccttctctagttaaaaaagaacttccaaagaaaatatacaatttatatatgtatataaaatttatacataaaaatgttatgtatagtttatacattctacgaaagcattagttttagaggtttttgtatcggtggaatagaagagtgcatcctctacgaatatttccagcaactatggtacatggagaaaagctaacaaggcacaattctgtgattatttctaagtacatttctttggtgtacagtgaatttgtcagtcccattggatagtaacgatttcctaactttttggagttttaatattgtgccttgtttgcataatttcatgatactcttaatcttattgaaataaaaattacatattgtaatgctacaaagatcatttaaatcagtgttattgtgaaattggcttcagtaggtagaatgtgatttcatgatcaatagaatcaaaagcacattaagatatcacaaacctaagactgtaagaaagattttgcttgtctcaaatgtgtatcatttcagctttctttttatagttttgcaatggtgctcaggcaccacaactcttttgtggtggattgctaaaccagaatttgttttaaactctgcaagagtagtgggtgcagggattaaaagacctgcattctagtctcagcttcatctcctacctgcccttatgatctcccaccaactttgtgaacctttctttgaagcaggaaaataatccttgtgtagcataactctcatctgtcttatagggggagaaagtgcagaagcacatgtaaaccataagagattagagcctcccgtcatattttagagttgggtggtacttaatgatcttctggtccatccccttcatttttcagagccatggaaatgaggcctggaaggggaagatgatttaagtgagattacatgtctgagaaatgtgatctgctattaagaaatttaccataaaaacgtatgagtagaatgaattagctaaattcaactcatttagcactttattgtattggcctcccagttgtcagacttacaactttagtctattacacaccaatgaagaaaaaaacaattgaaaaattataaataaataaagggggtatactcttcaaatttgtatgatgagtctcattggatgtgaaatttttatttgcgtcaaggaaccacattaagcactgatgagcctgagaaatatgattgtcagaatttccctgttccatcacatgggtctgtcattaatgttgttgggaaaatattcttgggtgtagaatggtccatttatgcattactctagtgactggtttaatgatagggatttttctgcaagatctgcccttgatttttcatttgagtcacaacacgacaataccctttagtaaaggtgtgtattgttatcatttcattccagtag

SEQ ID NO: 531 - DNA, 8113 bp, Homo sapiens
gtgagccccatggaaacttttcaaaccccttctttggattaatacttacagaaaaggagatctgttaatgtgcttcactatagtaaccatttcacaaaatacatgtatcttataacatcacgctgtataccttaaatttatagaatgaaatttgttttttaaaaaaaggaaagaaaaggagaaaaaaatgagtcatttttcagctctggtgcagctgtgtttttcttttactgtcttgttgtatgtaaggtgaagccacacgattaaaatgacagaagcaaagcaagaaattagggcctgttattgaaaaatatacacagtaaacagatctttatgcaagttctgctacgaggagaaatgtgaaaagctgaggctcccagctaaagatagatctggaaaagtcatttccctctttttggagtatgtttttctgtctgacgaaaagggatttattagtaaacatttggcataaacagagactgccttttgacacaatgtgttctggtaactgtatcataaatcatgttgtcataaagtagatcatatttccccatagaaacaatgttgtaattgggggctgcgcacctgttccagaattccgtatcaaataaatcattggaatgaataacaatctggtgaaaaggcaaagatacaacattaatgaaaatctacattcatttaaaatatggaaatttgtttcaagtcacataaagcaagagccaagtccagaagatctataatctcgcagctctcaaagctggttgatcctgaggtcctggagagaaacacagatccccaggccgggcatgagaactgggaaatgttggactttgaacgaaccattgtatacaatccagttttgagttctgtcagttcagaaggaggcctggagagcactggtttgtctattgtacacccacacttttggttcctggtgcaattttcaccacgtcacaatacagtcttctaaagagcactataaaataacataaatggagcatactcctatattattcaatgggttcccataaactatcaagtatcactgtcacacccatgttcgaatatcactgtcctctatcttacttttacctatctaaattcaatatatctgctctgataaacactggttagatgtcagtaaagaggatgctgctcacctttttagcattaaaatgatttttgaaagctgatttggataatccaacaaaacaaaacaaaaaatcccagaaagctggaacgaatatcttatttttttctcttgataagtgtcccttaacaagcaggtaatcatttaattgatcaatattttaactagttcagtctttgagtgttgctaggcattcactaaaatgtgagatgtggggattccttttcaagctggctcttttgtttgagagatggagtagtgaagttaagatacaggcttgggggcaagaactgcctgagtgactcacaactctgtgacaatcatcaggttacacaacctcctgtgctcttgtttcctcttctttgaaatggaatgatgctcgtagcacctgcctcacaaggttgcgggaggtttatatgagcttatgcatgtaaagtattagtagaacaacacctggcacataggaagaactaagtaagtgttagctactactcttactgtcgttgttgttgtcattatattctttccttgacgaccttcttccaatctttacaacaccaagtatgatcttgaaggaggaaaggagttaccaagaggagcaatgattgttctttttttcctgtttgcttatgaaggctgggtgcttcttggcttaatacatttgtatcagatccagggcttttaattttacatgcatttctggaacttctagcttctttcatttcctgcttccctccgtcaatgcccacaggacagtctgctgaagacattagtgactgtcttgaagaaaccagtgaccttgctggagaacacaggactgaatgcataaagatgttcagaaatgaaggttagatattaatcgaatggtgagaataaagaacaaaacctccgtatgaaacgattggcaatactgtaaaaatttcctaatttgcatccagagaaagtcttattagatggcattttagaaatcatttatcccaggaatttctacatttctggatcctcagataattgccagagagaactacaaaatgcaaattcttgggccttaccccagagaggcaactttggtaagtccagtctcaggcccagaaatctgtatttttgaaagatatcttcaggtaattctgatgcagtcaggactagccatcaatagtctggtctagtctgttgttctgaattgttctgaggagcctcaagaatttatggaagttgaggctggggcagtggctcacgcctgtaatcccagcactttaggaggacgaggcaggtggatcacctgaggtcaggagttcgagaccagcctggccaacatggcgaaaccccgtctctactaaaaatacaaaaaattagttgggagtggtggcgggcacctgtaatcctagctacttaggaggctgtggcaagagaattgcttgagcccgggaggcagaagttgcagtgagccacgatggtgccactacactccagcctgggcaacaagagcgaaactccatctcaaaaaaaagaatttatagaagcctttttagggcctcccagagattgagattctggggccttcagcccaatgtactgatggaacttaggtgtgtgtgttgtgtgtgagtgtgtgtgggtgttgatactaaaaacagtactataaataccataaaactaaatataagaaaacaaattttttatgcttgcaagtattcagtttttagtagttaaaaggtttccttttaaatacattgattcaagttaaaaattgaattgatagaaaactagtaaataataagagtacacatagtacaggcatatggcaaaaatatggtttcaattactcaagattaggaaacaaggttttagggagaaaataaacaataaaggctgaaaagcattgatttggtgcaatcccttatttacacataggaaagctagcattgcctgaacacctgcaatgcaccagagaatgtcctggactttttttatatgttatttttcttaagccttatgacaccaccttgcgagagatgcaatagtgttcccattgtacacatgagaaaaccaaggttccaagaggcaaaggaagtcacctaaactgacataactgagtatcactgctgaatttggggctcagagctcatttccagtagaaggttctttccattatacctcgttgtaccaaaaatttgtggagaatatgcatttgtgtgaaggaacctcctcaatgtgtcattctgatatttggccagcagttttacatatttataatggaagagcctagcgtctgcccaagacccaaattttaatcttgtcatttcactaacccaatcacggactgctatgttgtttgtcaagtggcgctaaaccaaagctgaaagcctgttttaatgaaagtgtgatcatggtgctttttaaaaattaaatatatgcaaccaatctaatcacctaaatttatgttgcttgctgttaaatttggcaaggaatttggctgggtagaagagataaattctgtggcagaggattttcccccttccatttttaatgtaagctatggcagcattaattaaatgggggagtttaatagtcagattttaccttctgcaaaaatattttgtgaatcataaatttctcctgcattgtttggtgctgctggcctggaagaaagatttggcagcatgttctaggacagatgacaccgagtgattagcaagctgacttcagctgctggcagccgggtactaaaagaacatgctaatgtcctccattttgacatgccggctggactttttttttttttttttctgaggagctggcgctatttatgattccatttttatctcttaaatgccatgacagatggcagcttcttcagccaactctattgccaggcaatgcagaaagcttgaaagcaccgtggtaatggtgaaatcagaccaggcaggcaccccagtcaaatctgagagttattccccaaatttcatgagagcggtggtcatcttggctgcatctcttctcagggggatgtaacaagggaaattaaacaaaatggatccacagaaggagctgctaccaccaacttcttcacctcagaatggataccaacatagcaatggctttatggttttaaacattgagaatgtatttggaggatttaggggagggggtatttggaagaccatctgattgatcagcttttccagacatgaacagcactgaccttttttcacgtgtactgctagctttattttgactgggaactcaaccgtaaccattcattctgtccctctctctgatgatgtctctctgcctgtgagtagtttgcactgttacttgtgaaagtggaatgatgttatttgatccagtcatgtttagaaattgcatcattttcacccctggcctattagctttaggtcagcactgacagctgccttggtgtcccagataggagcgctggcctcagaaaacatatttcttactcttctgtggtctgtggcccgcgtgccctcactcccatctgtctgatggcaggctgcctgtttccaacgtgggcagatcacgatcttccagcagggaggggtttgagatggacagcctggatcataagacaactgcggtgacctcacagaggccatgcacgcatcgagtagatgtggccgtcctgagatgagctttgaggaccccgtcaggcattcttgcaattcagtctgcagggaggaaagtcagaattagatattcaagatggccgcctctgatggagtccctggcactcactcaagcttgcatttgggtttgttgctcctggtcccatctctccccttctttcttcttccttctctgctgatatttgacatacttttaatagtgcacaatgtctatagctctacaattaatgctaatgctaaaaatacacgtcctttggcttatatttgcgctaaggtaccaatggctgatttaacactctccacagagcacacttgatacagggatctggtaaggaacagagagccagtttaatgtgaaacagggtagaatgagaggtgtgaaacatatttctggagggggaaaatgggaaaaagggaacttggaggcactgagggagcacctagcctccttcctattttattgtgggtcagatgataggatctggggggaatatgaaaaagtaacagaaaaacaatagaataaaggcataactctgttctcaggctctgcctgagaaataaagcataattttatacctaaaaatgtatatcagtttacttttgaaactgtgaaggtgactaagtaaaaagtttgaagaacagacatatttttctaggttcctttattttcttttttaaaattatttttctttttttaagatgggcttttgccatgttgcccaggctggtctcaaactcctgagctcgagcgctccacccaccccagcctcccagagtgtccaagctataggcgtgagctaccgcgcctgacttcctttcctttccttcccttcccttcccttcccttcccttcccttcccttcccttcccttcccttcccttcccttccctccctcccctccctcccctccctcccctcccttccctccctttcctttcctctttttttttttttttttttttttgagacaggttctctgtctgttgcccaggctggagtgcggtggcacgttcatggctcactgtagcctcaacctcccaggatcaagtgatccttccacctcagcctccctagtagctggggctacaggcacgcaccacacccagctaaattttgtattttttgtagagaaagggttttgccatgttacccaggctgatattgaactcctggactcaagccatctgcccgccttggccagccaaggtactgggtttacaggtgtgagccactgcaccagcctcttttattttttttaataaataattgatttttataaatgcctcatgatccagtaatgaaattgcccaatttgttaaaaatatacttatcaaaggtttaattttatgaaaggaaaactgattggtttgttttgagaaaattatgtgattttgctcaatctataattctaaaggtaactgaatacctttattcaaggtgtaaaaaatgctgctgtgggggaaatgtatgaggtttcattctttacaagtcgaggtgtgtgaaatgtcaaaatttactttatttgttgtatttcacttagcaattttaactttttggacatagatttctttttctttgcatcaaatcagatatattttccttgtcaacagtcttattaactagataattagaaaactaaaaaacttcagcatagccttcaaagcaatatcagtactcagccaaactcatctctttttactttttgtctaactgccctccctgagtccgtggtcgcaggcaggctggttgactcgttgctttcacactatctaatagcttcaggtttcttcatgctcaaaaggatcaatgctcaaaccctgaaggacaagacacatttcacaaagaataaagggattgttagtcaaatctgccagatttgtaaaataaatataaatgccataccttctctagttaaaaaagaacttccaaagaaaatatacaatttatatatgtatataaaatttatacataaaaatgttatgtatagtttatacattctacgaaagcattagttttagaggtttttgtatcggtggaatagaagagtgcatcctctacgaatatttccagcaactatggtacatggagaaaagctaacaaggcacaattctgtgattatttctaagtacatttctttggtgtacagtgaatttgtcagtcccattggatagtaacgatttcctaactttttggagttttaatattgtgccttgtttgcataatttcatgatactcttaatcttattgaaataaaaattacatattgtaatgctacaaagatcatttaaatcagtgttattgtgaaattggcttcagtaggtagaatgtgatttcatgatcaatagaatcaaaagcacattaagatatcacaaacctaagactgtaagaaagattttgcttgtctcaaatgtgtatcatttcagctttctttttatagttttgcaatggtgctcaggcaccacaactcttttgtggtggattgctaaaccagaatttgttttaaactctgcaagagtagtgggtgcagggattaaaagacctgcattctagtctcagcttcatctcctacctgcccttatgatctcccaccaactttgtgaacctttctttgaagcaggaaaataatccttgtgtagcataactctcatctgtcttatagggggagaaagtgcagaagcacatgtaaaccataagagattagagcctcccgtcatattttagagttgggtggtacttaatgatcttctggtccatccccttcatttttcagagccatggaaatgaggcctggaaggggaagatgatttaagtgagattacatgtctgagaaatgtgatctgctattaagaaatttaccataaaaacgtatgagtagaatgaattagctaaattcaactcatttagcactttattgtattggcctcccagttgtcagacttacaactttagtctattacacaccaatgaagaaaaaaacaattgaaaaattataaataaataaagggggtatactcttcaaatttgtatgatgagtctcattggatgtgaaatttttatttgcgtcaaggaaccacattaagcactgatgagcctgagaaatatgattgtcagaatttccctgttccatcacatgggtctgtcattaatgttgttgggaaaatattcttgggtgtagaatggtccatttatgcattactctagtgactggtttaatgatagggatttttctgcaagatctgcccttgatttttcatttgagtcacaacacgacaataccctttagtaaaggtgtgtattgttatcatttcattccag

SEQ ID NO: 532 - DNA, 198 bp, Homo sapiens
gtggaggagcatgtcagccgcatccgggaggagctggaccgcgagcgggaggaacgaaactacttccagctggagcgggacaagatccacaccttctgggagatcacacggaggcagctggaggagaagaaggctgagctgcggaacaaagaccgggagatggaagaagccgaggagaggcaccaggtggagatcaag

SEQ ID NO: 533 - DNA, 55 bp, Homo sapiens
aaacacaccgaggagatcaccaggatgcggaatgattttgagaggcaagttcgag

SEQ ID NO: 534 - DNA, 307 bp, Homo sapiens
gtgaagttgagtcctccctctttcttccttgcctttcgccggccacacgccccgttgccgtgcatgggcccctgctcagtgcctcacctgacccactgcacctggccaggtggaggagcatgtcagccgcatccgggaggagctggaccgcgagcgggaggaacgaaactacttccagctggagcgggacaagatccacaccttctgggagatcacacggaggcagctggaggagaagaaggctgagctgcggaacaaagaccgggagatggaagaagccgaggagaggcaccaggtggagatcaag

SEQ ID NO: 535 - DNA, 247 bp, Homo sapiens
aaacacaccgaggagatcaccaggatgcggaatgattttgagaggcaagttcgaggtcagtttcccgtgtgctcattgtgtaggtgccagagacacccccgccccatcagagaggaatttacctccagagcttgttaactcagggagcaaaaactggattaaaacagccaaggcatgcaagagaaagaacatggaagtttccaaggccagtggacccactcagaatcccagaacaacctatttccat

SEQ ID NO: 536 - DNA, 3576 bp, Homo sapiens
gtgagcagagcgggctgtggcccagtccccgggtgggcgtgggcgggcaccacgcagggtgcctacgccgagtgtccatcttgccatgtggatccacccttctgtccaagccagaacacgccccccgcgtggcccataattcccatcagcggcaaagctttcggctgcaccatgtcttttcagaaaggtagtgcagcctgtgaaagagctttgtaacagggtggtaggagtgtggaaggacatgcttttctgatctaaaagctgtttttaatttcgtgtattctctttcaatcttaccctttttttgcacctgatgtgtatagacttatcgtagaacacacatgtagcattctcctttattttattcaccattaaacattatgtcaaaaaggaagtttttgaaagaaggatgatttacttcaaatcacatctgaatctgattaatcgttcatttttttttttttttttttttttttttttgagacggagtctcactctgtcgcccaggctggagtgcagtggcgcgatctcggctcactgtgagctccacctcccgggttcacaccattctcctgcctcagcctcccgagtagctgggactacaggcacctgccaccacgcctggctaattttttttttgtatttttagtagagacggggtttcaccgtgttagccaggatggtctcgatctcctgacctcgtgatccactcgcctcggcctcccaaagtgctgggattacaggcatgagccaccacgcctggccagtcattcattgtttttgataaaagtcccaacaaggagtaacagcatcagggctgcctttttcttgttgcttattttggggaggaggtgatgtttttatagtttctttgtaggagttagtttaagtctcttcttcatttggatgtagttaagggctacagaacataattacataattacaattttacctaaaaggctcctggagacggcagtgtgtggcaagcacggtgcaccctctggcctctgccctcatggacgactgcctgtgagcacctgacatgggacatgagggctgtgtcaactctgtgttattgttaataaatcttaccttcttttgatagttgtaagataaaaaatcaatacgaaggagactgaaagagtctcatgacctgaagttggagctaggcagaggtccttgaacaatggtaaagaatggctttattttacatgcaggcaaaccattggcagtttaagccagtggctaagcagagaggtgatggggtcaggtttgtgttctggaaagatgtctggagctgctggatggagaatggattgaacactgcgttgtcccagcatgtgagctgctgcccgtctccctgtccgcttcccattcctgtggagacaggccttgtggggcagtggccatggagcctacggggcagcctacggggcaggctacggggcagcttacggggcaggctatggggcagcctacggggcaggctacggggcaggcccttgcactgcacatcgcacgttgagccacagactcagaaggcttcttcagggtccaggcaggtggggagggatgggggtgacctggagactcctgccccgcagcagaggacagtttcatctgttcactggggagtgccttgtgggcctaggagttcagtgctgtttttttctgattttccaagagaagctggaaatctggatatttataagaaatctgaatattgagtgatggcaaaatctcaacaccatgtgagccaaacagaccagtcaggagccctggttcaggctctgcccaggagcctctaaaggtctgtgacgtgaagacatttgtcgttgtgccgaggcactggttggattcgggggtgcgtgtctccctcatgtctgcccggcatcctcggctcagaacccctcctgctgctccttcttgtttgctcgttgtcttgtcttcttttgaggtgagaaatgtgttttccctgtggggaatgtggtgttgagaaagaaaaaggctcacagtaagtggcctggggctgtgcccgaaaagtaactgattctgacggaatctcgctgtgtggcccaggctggagtgcggtggcgcgacctcggctcactgcaagctccacctcctgggttcacaccatcctgctgcttcaggctgcccagtagctgggactgcaggtgcctgccatcacgcccggctaatttttttgtatttttagtagagacgaggtttcaccgtgttagccaggatggccttgatctcctgacctcatgatctgcctgtctctgcctcccaaagtgctgggattacaggtgtgagccaccgcgcctggcagtaactgattcttaagggaaatgagctcccgagaaagctggaagcctgtcctacatttttttttaacctatttgcagattcgcaattgaaccctcttgagattttagagtctactggttttgtatattttttgcttaacattatatcttcaaaggtgaattttttttcatttagcattatgatatgaatttgtttaaatgctgctacatcatttgcatattttttttgggttaatgtgatatttctcctagttgatatactctaatttttcaaccatttccatatttatttatttattgtttagagacagggtcctgctctgtcacccaggtggagtgcagtggtgtgatcacggctcacggcagccttgacctcccaggtccaaacgatcctcctacctcagtcttctgagtagctgggactataggcatgtgccaccactcctggctaatttttttttttttttttttttgtagagacagggttttgccatgttgcctaggctgttcaactctggggctcaaaagatcctcccaaagtggtgggagccaccatgcctggctgtttgtgtattttttgagacagattctcactctgtcacccaggctggagtgtagtggcatgatcataactaaccgcagcctcaaccccctgagcttgagtgaccctcccacctcagctctcccagtagctgagactataggtgcgtgccatcatgcctagttaatgaaaaaaagtttttgcagagatggggtcttgctatgttgcccaagctggtcttcagctcctgggcgcgagggatccttcaacctcagcctcccagagtgctggggttgcaggcgagagccaccgcgcctcgcttatttccctgtttaaactggtcttaggttatttcctttttgatatttttgctgttgtaataatggtgtgggtaatatctttgagcaagatgctcttatatttcttttgagaaattttttaggcatcaattctcaggaatggatgaaaggatctagttattttatgattattggccaaattgaagagaattctgccacctgctgaatgcattctgtctccggagcttcctagccttatattttaactttttacatttagctgtttatttttaggtgaagttgagtcctccctctttcttccttgcctttcgccggccacacgccccgttgccgtgcatgggcccctgctcagtgcctcacctgacccactgcacctggccag

SEQ ID NO: 537 - DNA, 693 bp, Homo sapiens
gtcagtttcccgtgtgctcattgtgtaggtgccagagacacccccgccccatcagagaggaatttacctccagagcttgttaactcagggagcaaaaactggattaaaacagccaaggcatgcaagagaaagaacatggaagtttccaaggccagtggacccactcagaatcccagaacaacctatttccatgtgagtttgggaggctgtgattaccacacacattcccactcctagctaaaatcagtagttatcagcaggtggtagctattcagtgccgtgggcagccttcttaaaatagtcttctccatggctcctggtctgagaaggctccaatttcagaagtctctgtgttttactaataaaggctgattgtggctgggtggccacacaggcctcggttactgctcactggggtcagctgacattcagctgttggcacccccagtgcagggagcgattagcaatgcctgtcactggcaaaggcaggccgacagtggtgtgtgtgctgagtgtgagcatcagcagaaaaactcagtctaaacccctttgttcttctcttgcagagcttttgcctgcaaggctgttctgaccacagtgggcgttttgggcccgtttacaggctccatgttctgtagccgtaggggcaccacgtcttcctctgctaagctgctgtttgctgctgcctttcag

SEQ ID NO: 538 - DNA, 3467 bp, Homo sapiens
gtgagcagagcgggctgtggcccagtccccgggtgggcgtgggcgggcaccacgcagggtgcctacgccgagtgtccatcttgccatgtggatccacccttctgtccaagccagaacacgccccccgcgtggcccataattcccatcagcggcaaagctttcggctgcaccatgtcttttcagaaaggtagtgcagcctgtgaaagagctttgtaacagggtggtaggagtgtggaaggacatgcttttctgatctaaaagctgtttttaatttcgtgtattctctttcaatcttaccctttttttgcacctgatgtgtatagacttatcgtagaacacacatgtagcattctcctttattttattcaccattaaacattatgtcaaaaaggaagtttttgaaagaaggatgatttacttcaaatcacatctgaatctgattaatcgttcatttttttttttttttttttttttttttttgagacggagtctcactctgtcgcccaggctggagtgcagtggcgcgatctcggctcactgtgagctccacctcccgggttcacaccattctcctgcctcagcctcccgagtagctgggactacaggcacctgccaccacgcctggctaattttttttttgtatttttagtagagacggggtttcaccgtgttagccaggatggtctcgatctcctgacctcgtgatccactcgcctcggcctcccaaagtgctgggattacaggcatgagccaccacgcctggccagtcattcattgtttttgataaaagtcccaacaaggagtaacagcatcagggctgcctttttcttgttgcttattttggggaggaggtgatgtttttatagtttctttgtaggagttagtttaagtctcttcttcatttggatgtagttaagggctacagaacataattacataattacaattttacctaaaaggctcctggagacggcagtgtgtggcaagcacggtgcaccctctggcctctgccctcatggacgactgcctgtgagcacctgacatgggacatgagggctgtgtcaactctgtgttattgttaataaatcttaccttcttttgatagttgtaagataaaaaatcaatacgaaggagactgaaagagtctcatgacctgaagttggagctaggcagaggtccttgaacaatggtaaagaatggctttattttacatgcaggcaaaccattggcagtttaagccagtggctaagcagagaggtgatggggtcaggtttgtgttctggaaagatgtctggagctgctggatggagaatggattgaacactgcgttgtcccagcatgtgagctgctgcccgtctccctgtccgcttcccattcctgtggagacaggccttgtggggcagtggccatggagcctacggggcagcctacggggcaggctacggggcagcttacggggcaggctatggggcagcctacggggcaggctacggggcaggcccttgcactgcacatcgcacgttgagccacagactcagaaggcttcttcagggtccaggcaggtggggagggatgggggtgacctggagactcctgccccgcagcagaggacagtttcatctgttcactggggagtgccttgtgggcctaggagttcagtgctgtttttttctgattttccaagagaagctggaaatctggatatttataagaaatctgaatattgagtgatggcaaaatctcaacaccatgtgagccaaacagaccagtcaggagccctggttcaggctctgcccaggagcctctaaaggtctgtgacgtgaagacatttgtcgttgtgccgaggcactggttggattcgggggtgcgtgtctccctcatgtctgcccggcatcctcggctcagaacccctcctgctgctccttcttgtttgctcgttgtcttgtcttcttttgaggtgagaaatgtgttttccctgtggggaatgtggtgttgagaaagaaaaaggctcacagtaagtggcctggggctgtgcccgaaaagtaactgattctgacggaatctcgctgtgtggcccaggctggagtgcggtggcgcgacctcggctcactgcaagctccacctcctgggttcacaccatcctgctgcttcaggctgcccagtagctgggactgcaggtgcctgccatcacgcccggctaatttttttgtatttttagtagagacgaggtttcaccgtgttagccaggatggccttgatctcctgacctcatgatctgcctgtctctgcctcccaaagtgctgggattacaggtgtgagccaccgcgcctggcagtaactgattcttaagggaaatgagctcccgagaaagctggaagcctgtcctacatttttttttaacctatttgcagattcgcaattgaaccctcttgagattttagagtctactggttttgtatattttttgcttaacattatatcttcaaaggtgaattttttttcatttagcattatgatatgaatttgtttaaatgctgctacatcatttgcatattttttttgggttaatgtgatatttctcctagttgatatactctaatttttcaaccatttccatatttatttatttattgtttagagacagggtcctgctctgtcacccaggtggagtgcagtggtgtgatcacggctcacggcagccttgacctcccaggtccaaacgatcctcctacctcagtcttctgagtagctgggactataggcatgtgccaccactcctggctaatttttttttttttttttttttgtagagacagggttttgccatgttgcctaggctgttcaactctggggctcaaaagatcctcccaaagtggtgggagccaccatgcctggctgtttgtgtattttttgagacagattctcactctgtcacccaggctggagtgtagtggcatgatcataactaaccgcagcctcaaccccctgagcttgagtgaccctcccacctcagctctcccagtagctgagactataggtgcgtgccatcatgcctagttaatgaaaaaaagtttttgcagagatggggtcttgctatgttgcccaagctggtcttcagctcctgggcgcgagggatccttcaacctcagcctcccagagtgctggggttgcaggcgagagccaccgcgcctcgcttatttccctgtttaaactggtcttaggttatttcctttttgatatttttgctgttgtaataatggtgtgggtaatatctttgagcaagatgctcttatatttcttttgagaaattttttaggcatcaattctcaggaatggatgaaaggatctagttattttatgattattggccaaattgaagagaattctgccacctgctgaatgcattctgtctccggagcttcctagccttatattttaactttttacatttagctgtttatttttag

SEQ ID NO: 539 - DNA, 501 bp, Homo sapiens
gtgagtttgggaggctgtgattaccacacacattcccactcctagctaaaatcagtagttatcagcaggtggtagctattcagtgccgtgggcagccttcttaaaatagtcttctccatggctcctggtctgagaaggctccaatttcagaagtctctgtgttttactaataaaggctgattgtggctgggtggccacacaggcctcggttactgctcactggggtcagctgacattcagctgttggcacccccagtgcagggagcgattagcaatgcctgtcactggcaaaggcaggccgacagtggtgtgtgtgctgagtgtgagcatcagcagaaaaactcagtctaaacccctttgttcttctcttgcagagcttttgcctgcaaggctgttctgaccacagtgggcgttttgggcccgtttacaggctccatgttctgtagccgtaggggcaccacgtcttcctctgctaagctgctgtttgctgctgcctttcag

SEQ ID NO: 540 - DNA, 156 bp, Homo sapiens
gtatgagaagctcataggtggcaagtacatgggcgagctggtgcggcttgtgctgctcaggctcgtggacgaaaacctgctcttccacggggaggcctccgagcagctgcgcacacgcggagccttcgagacgcgcttcgtgtcgcaggtggagag

SEQ ID NO: 541 - DNA, 545 bp, Homo sapiens
gtatgagaagctcataggtggcaagtacatgggcgagctggtgcggcttgtgctgctcaggctcgtggacgaaaacctgctcttccacggggaggcctccgagcagctgcgcacacgcggagccttcgagacgcgcttcgtgtcgcaggtggagaggtgtgcggaggaggagggtgggtgcaaagggcaggggctggggacgcccgggcactgcagacttggtctcagggcgacgctgagtcccaggcccggggcgcagggatgggaaactagggcctggggcgggattccgggcgtgggcggggcccggggcggggcacagggggcgggggagtgggcggggcccgaggccgggcgctggaggcgagggcggggcagggacgggtccaagggcaggaggctgggacaggacggggatgcaaagggaggggcggggcccgagacggggaggagggggagggcccaaggggaggaggcggggtccggacggggatgccaagagcagggatgggagcgagcctgcgtccgggcactggtccccatcc

SEQ ID NO: 542 - DNA, 732 bp, Homo sapiens
gtgtgcggaggaggagggtgggtgcaaagggcaggggctggggacgcccgggcactgcagacttggtctcagggcgacgctgagtcccaggcccggggcgcagggatgggaaactagggcctggggcgggattccgggcgtgggcggggcccggggcggggcacagggggcgggggagtgggcggggcccgaggccgggcgctggaggcgagggcggggcagggacgggtccaagggcaggaggctgggacaggacggggatgcaaagggaggggcggggcccgagacggggaggagggggagggcccaaggggaggaggcggggtccggacggggatgccaagagcagggatgggagcgagcctgcgtccgggcactggtccccatccgtgagtcccctcggtgctccctgcccgccgtggccatcctctcacatcactcacaaccccaaggcgcggcatggttgacacccccacgttaggacggagaccctgggcttagttagagggggcagtactaaccagtccctggcggaaacgctttggctgggtgaggtgagcgggatcgcccccatttctccagagaggggtcccggctcagcgagggaaagaggccgccgctggggggacggctggccggggcccctccctggagaacgagaggccgccgctggagggggatggactgtcggagcgacactcagcgaccgccctacctcctcccgccccgcag

SEQ ID NO: 543 - DNA, 343 bp, Homo sapiens
gtgagtcccctcggtgctccctgcccgccgtggccatcctctcacatcactcacaaccccaaggcgcggcatggttgacacccccacgttaggacggagaccctgggcttagttagagggggcagtactaaccagtccctggcggaaacgctttggctgggtgaggtgagcgggatcgcccccatttctccagagaggggtcccggctcagcgagggaaagaggccgccgctggggggacggctggccggggcccctccctggagaacgagaggccgccgctggagggggatggactgtcggagcgacactcagcgaccgccctacctcctcccgccccgcag

SEQ ID NO: 544 - DNA, 179 bp, Homo sapiens
ctcgttggcctctctatggtgccgagcgcgcccgttcggacgttgcccctttaatcggcagagggcggtgcccaggaggtcccgcgagagctgcggggggcgggggggcggtgccgaggctgggggccggtggcggatggagcccgcgatggagccggagactctggaggcgcgaatca

SEQ ID NO: 545 - DNA, 70 bp, Homo sapiens
ggtgccgaggctgggggccggtggcggatggagcccgcgatggagccggagactctggaggcgcgaatca

SEQ ID NO: 546 - DNA, 69 bp, Homo sapiens
gtgccgaggctgggggccggtggcggatggagcccgcgatggagccggagactctggaggcgcgaatca

SEQ ID NO: 547 - DNA, 59 bp, Homo sapiens
tgggggccggtggcggatggagcccgcgatggagccggagactctggaggcgcgaatca

SEQ ID NO: 548 - DNA, 5286 bp, Homo sapiens
gtgagtgtccgggaggggcgcgggccggaccggaaccggaaccgggggcacgaggcgggccccttcccggcgggggcggggtacgggtcgccccctcctcacgccccgcccccggcccgggaggggcggtgtcctcagtcggcccctcagaccctggagcgatggaggaccccggccccggcgcggtccagcggtgggagcgggcgccgcccacctgtcggatccctgggccatgacccctgggacggcgagtgagctgcgccgggaacccccgggacggagagagcagcctccaacccccaaggctcacattgcttcacggagtagcggcccggggaaggagcacgcgagcggttccccggggttgcatctcacacccgggagggagggaccctactattttcaggccccgaatcctccactctctggccctgcatggcgttcctggagcccgcaagtagtcacatttgctcattaccccgtcctggaagggaggacccactgccccatttgattcctcccgccgctcctagtctctagccacatagtgagaaacccccgcaccctacaggcttgggagagtcttagactccagaagtattaataattccaagctccctgtcactcccttcagcctaacccctcagtctccaagatgcctttcccagctcttgctgaacttccttcaaaggcttctacacccctttttttcttgtttctcctcagacgtagcttcctattgcttaggcttcctagcccgcaaaccctccacctgagctccttaacccacagccctgatgatcccctgctctcacagccccgctcctggactctgcctctgaaagccgtggctggcttctccctggtctagtgagggttctctcccaaggctttaactgctgttgggaccccgtcgttgccagggcctcagggaaccctcttggacccgggcacaccggcaactgtctagcgtggtttggggtcatggccggccccttttaagccaggcttgagcagagttgaaccatgaggttggccccagaaccaaacctctagggatgtttcagagtcatcctagccaccagaggggcagggggtggaaaaggggcactcagcagcccttgaccgttgtgaacgccggaagtgtccgcctgggtctcagcagcaactgggctggggggatgggtgggcccctggctaactgatctcagacacaggtcttgagctgtgggtcatacaaaacattctcaggtttagaaacagtgggggttttctgagagtccagagagtctaaaaccaggcagaagttagagatacctgggtttggctgggccctgacacactggggctgggattttctcctttccttccccctttgtgtcctagcagaattgtaagatctttcctcttcccttgtggaggctggaggtaaaggatagcttcttctttttttttttgagacgggttttcactcttgtcacccaggctggagtgcagtggcacaatctcagctctctgcaacctccacctcccgggttcaagtgattctcctgtctcagcctcccgagtagctggaattacaggtgcgccaccacgcccagctatttttgtatttttagtacaggtgggctttcaccatgttggccaggctgatctcgaactcctgacctcaggtgatccgcctatataggcctctcaaagtgttgggattacaggcgttagccactcatccgcccacgtcggcctctcaaagtgttgggattacaggcgtgagccaccgcgcccggcctagtgaggtaaatgatgttattgtcagcactatagagtggcagggtggagtcttaccctgttgtgaaacacctccctccctctctaggtgttctccccaactgcctgctagggagggtactcccctcaggtagaattaagagggctgagggtcaggggccatgggccaaggaggtcagtcagatctccttggatctggaggccctggctttcagccagaggcagggggagaaagatgatgtctcatgatgccagcgcttcctcttcactggcgtctgacccaggagcagtccagaatcagcttctctgacctcactccaactcacgtgtctttgacactttaagggacttcctgttttagggtcttctggctgggtgtcattgaatgggcagtgattctctaactttagactgatgttccccagcctttgtttggggactcggaggcagagtagacagttacccttacccctgggttggggagggtcatattcctggtatccccaggaggtcaacaggggcttcatttttctgagggactagagggtcttgtggagctcctgggacagagatctagatccagagagaacattcgtccttccgatctcagctcagctctgagagccctcccagagagcagctcccgagggctccagagccctccgaaagccctcccagagagcagcccccacctcccaggctgtctgcacttctccttgctatgctttgctctgtaacattttgcaacagtctgcagtacacggggtttgttaatctgagtattcattgtttctcttgctgggcagtgaacttgaggagggcagggattttgtctgttcactgctggagccccagcacccagaatacttaaatctgagttggatgaatggcggccagccactgggattccagggctttgggccccctgccataacatatggcccagggcaggcgccacatgctgggtcagtccccagcctcctgtccacagatccttctctgttctacctcctgggctgtgtccttccacaccctcagctcggtgctcaggcgtgggcagaactggctgggaaggggtggtccttagaggtgggctgtggagaaatgaagatcgagctctggctgccgccatggccttcccatgcaaaaagtattttgtcatccaaaatcaatattttggtcaggcacagtggctcatgcctgtaatcccagcactttgggtggccgaggtgggtggatcatttgaggtcaggagtttgagaccagcctgaccaacatggtgaaattccatctctaccaaaaatacaaaaaaattagctgggcatggtggtggacgcctgtgatcccagctactctcaggaggctgaagcaggagaatcgtttgaacccaggaagctgagattgcagtgagccgagatctcgccactgcactccagcctgggcaacaaagcaagactctttctcaaaaaaaaataaaaataaaaaaatacaggccggacgcagtggctcacacctgtaattccagtactttgggaggccgaggcaggtggatcacgaggttaggagatcaagaccatcctggctaacacagtgaaaccccgtctctactaaaaatacaaaaaaaaaaaaaattagccgggcgtggtggcgggcacctgtagtcccagctactcgggaggctgaggcaggagaatggcgtgaacctgggaggcagagtttgcagtcagccgagatcacaccactgcactccagcctgggcgatagagcgagactccgtctcaaaaaaaaaaaaaaatacagccgggcacggtggctcacacctgtaatcccagcactttgggaggccaaggtgggcggatcacaaggtcaggagattgagaccatcctggctaacatggtgaaaccctgtctctactaaaaatacaaaaaaaaattagccgggcgtggtggcgggtgcctgtagtcccagctactcgggaggctgaggaaggagaatggcatgaacctgggaggcggagcttgcagtgagccgagatcgtgccactgcactccagcctgggcaacagcgtgagactcgtctcaaaaaaaaaaaaaaatccatatttcattccagctttacaagatggggaaatggaggttcagggaagcatgtaagctagattgttgtttaaccagtattgggggttaaaggggtagctgtctggtcgtgtttacaccacttcatgtagacctgttggccctctttccttgccactatccatttctggattcagtcttccccagaacctcaccctttgcctgccctcagctgactgctcattcatttgccaaggggagacaggtgtggacatgagtggctgggatgcagtgccgtagcaggctgggggacacaaaagagaactgacccagcactgctaccctgggcaggagtagaggattagagaaggggacaccggagccactcccaagggaatgaaggctttctgaacctggtgtgatggtaagactcacactccttactgaggcccctcattctctgcctcgtgtggttacccgcatctttcctgcccatacagccatgcgtgggtcagaggtgtaccagctccagcctgggtgactcctcctggtccctgcttgtgtgttgcctcttccaggcagcctcctcagccccaaactgaactgagtcccctcctctgtgtttcttttttgtttgtttgagacggagtcacccagagtcccagctctgtcacccaggctggagggcagtggcgagacctcggctcactccaagctccgcctcccgggttcacgccattctcctgcctcagcctcccaagtagctgggactacaggcacccaccaccaagcccggctaatttttgtatttttagtagagatggggtttcatcgtgttagctaggatggtcttgatctcctgacctcgtgatccacccacctcagcctcccaaagtgctgggattacaggcatgagccaccgtgcctggcccctcctctgtgtttctacagctccttggcttccctctgtcacacgttattgagaacctagcttcccttggcccacttcccggctacacagctccttgagggcgggactatgatttttttctcccttacttctggatctcctctgagcataaatttcatgagaattatggagacactgttctcagcagaatcagaggaggtggggctggcgtgatgggtccagctgcaggggtgggaggagtggggaggaggggaagggccctgaccatagtctctaaaagtggggccctttggagggcagctgtgctcatctgtctgtctacacccacaatcaggtcttgaggctgtctgggcaggaaggcagggggagagctttcccacgtgctcagtcacactcctctcccactcctgaccacacctttgccagggtcaggagtggaagagcaggaatcccactgccgggccacaatgaccccagctctcctcttccag

SEQ ID NO: 549 - DNA, 430 bp, Homo sapiens
ctcgttggcctctctatggtgccgagcgcgcccgttcggacgttgcccctttaatcggcagagggcggtgcccaggaggtcccgcgagagctgcggggggcgggggggcggtgccgaggctgggggccggtggcggatggagcccgcgatggagccggagactctggaggcgcgaatcagtgagtgtccgggaggggcgcgggccggaccggaaccggaaccgggggcacgaggcgggccccttcccggcgggggcggggtacgggtcgccccctcctcacgccccgcccccggcccgggaggggcggtgtcctcagtcggcccctcagaccctggagcgatggaggaccccggccccggcgcggtccagcggtgggagcgggcgccgcccacctgtcggatccctgggccatgacccctgggacggcga

SEQ ID NO: 550 - DNA, 321 bp, Homo sapiens
ggtgccgaggctgggggccggtggcggatggagcccgcgatggagccggagactctggaggcgcgaatcagtgagtgtccgggaggggcgcgggccggaccggaaccggaaccgggggcacgaggcgggccccttcccggcgggggcggggtacgggtcgccccctcctcacgccccgcccccggcccgggaggggcggtgtcctcagtcggcccctcagaccctggagcgatggaggaccccggccccggcgcggtccagcggtgggagcgggcgccgcccacctgtcggatccctgggccatgacccctgggacggcga

SEQ ID NO: 551 - DNA, 320 bp, Homo sapiens
gtgccgaggctgggggccggtggcggatggagcccgcgatggagccggagactctggaggcgcgaatcagtgagtgtccgggaggggcgcgggccggaccggaaccggaaccgggggcacgaggcgggccccttcccggcgggggcggggtacgggtcgccccctcctcacgccccgcccccggcccgggaggggcggtgtcctcagtcggcccctcagaccctggagcgatggaggaccccggccccggcgcggtccagcggtgggagcgggcgccgcccacctgtcggatccctgggccatgacccctgggacggcga

SEQ ID NO: 552 - DNA, 310 bp, Homo sapiens
tgggggccggtggcggatggagcccgcgatggagccggagactctggaggcgcgaatcagtgagtgtccgggaggggcgcgggccggaccggaaccggaaccgggggcacgaggcgggccccttcccggcgggggcggggtacgggtcgccccctcctcacgccccgcccccggcccgggaggggcggtgtcctcagtcggcccctcagaccctggagcgatggaggaccccggccccggcgcggtccagcggtgggagcgggcgccgcccacctgtcggatccctgggccatgacccctgggacggcga

SEQ ID NO: 553 - DNA, 5035 bp, Homo sapiens
gtgagctgcgccgggaacccccgggacggagagagcagcctccaacccccaaggctcacattgcttcacggagtagcggcccggggaaggagcacgcgagcggttccccggggttgcatctcacacccgggagggagggaccctactattttcaggccccgaatcctccactctctggccctgcatggcgttcctggagcccgcaagtagtcacatttgctcattaccccgtcctggaagggaggacccactgccccatttgattcctcccgccgctcctagtctctagccacatagtgagaaacccccgcaccctacaggcttgggagagtcttagactccagaagtattaataattccaagctccctgtcactcccttcagcctaacccctcagtctccaagatgcctttcccagctcttgctgaacttccttcaaaggcttctacacccctttttttcttgtttctcctcagacgtagcttcctattgcttaggcttcctagcccgcaaaccctccacctgagctccttaacccacagccctgatgatcccctgctctcacagccccgctcctggactctgcctctgaaagccgtggctggcttctccctggtctagtgagggttctctcccaaggctttaactgctgttgggaccccgtcgttgccagggcctcagggaaccctcttggacccgggcacaccggcaactgtctagcgtggtttggggtcatggccggccccttttaagccaggcttgagcagagttgaaccatgaggttggccccagaaccaaacctctagggatgtttcagagtcatcctagccaccagaggggcagggggtggaaaaggggcactcagcagcccttgaccgttgtgaacgccggaagtgtccgcctgggtctcagcagcaactgggctggggggatgggtgggcccctggctaactgatctcagacacaggtcttgagctgtgggtcatacaaaacattctcaggtttagaaacagtgggggttttctgagagtccagagagtctaaaaccaggcagaagttagagatacctgggtttggctgggccctgacacactggggctgggattttctcctttccttccccctttgtgtcctagcagaattgtaagatctttcctcttcccttgtggaggctggaggtaaaggatagcttcttctttttttttttgagacgggttttcactcttgtcacccaggctggagtgcagtggcacaatctcagctctctgcaacctccacctcccgggttcaagtgattctcctgtctcagcctcccgagtagctggaattacaggtgcgccaccacgcccagctatttttgtatttttagtacaggtgggctttcaccatgttggccaggctgatctcgaactcctgacctcaggtgatccgcctatataggcctctcaaagtgttgggattacaggcgttagccactcatccgcccacgtcggcctctcaaagtgttgggattacaggcgtgagccaccgcgcccggcctagtgaggtaaatgatgttattgtcagcactatagagtggcagggtggagtcttaccctgttgtgaaacacctccctccctctctaggtgttctccccaactgcctgctagggagggtactcccctcaggtagaattaagagggctgagggtcaggggccatgggccaaggaggtcagtcagatctccttggatctggaggccctggctttcagccagaggcagggggagaaagatgatgtctcatgatgccagcgcttcctcttcactggcgtctgacccaggagcagtccagaatcagcttctctgacctcactccaactcacgtgtctttgacactttaagggacttcctgttttagggtcttctggctgggtgtcattgaatgggcagtgattctctaactttagactgatgttccccagcctttgtttggggactcggaggcagagtagacagttacccttacccctgggttggggagggtcatattcctggtatccccaggaggtcaacaggggcttcatttttctgagggactagagggtcttgtggagctcctgggacagagatctagatccagagagaacattcgtccttccgatctcagctcagctctgagagccctcccagagagcagctcccgagggctccagagccctccgaaagccctcccagagagcagcccccacctcccaggctgtctgcacttctccttgctatgctttgctctgtaacattttgcaacagtctgcagtacacggggtttgttaatctgagtattcattgtttctcttgctgggcagtgaacttgaggagggcagggattttgtctgttcactgctggagccccagcacccagaatacttaaatctgagttggatgaatggcggccagccactgggattccagggctttgggccccctgccataacatatggcccagggcaggcgccacatgctgggtcagtccccagcctcctgtccacagatccttctctgttctacctcctgggctgtgtccttccacaccctcagctcggtgctcaggcgtgggcagaactggctgggaaggggtggtccttagaggtgggctgtggagaaatgaagatcgagctctggctgccgccatggccttcccatgcaaaaagtattttgtcatccaaaatcaatattttggtcaggcacagtggctcatgcctgtaatcccagcactttgggtggccgaggtgggtggatcatttgaggtcaggagtttgagaccagcctgaccaacatggtgaaattccatctctaccaaaaatacaaaaaaattagctgggcatggtggtggacgcctgtgatcccagctactctcaggaggctgaagcaggagaatcgtttgaacccaggaagctgagattgcagtgagccgagatctcgccactgcactccagcctgggcaacaaagcaagactctttctcaaaaaaaaataaaaataaaaaaatacaggccggacgcagtggctcacacctgtaattccagtactttgggaggccgaggcaggtggatcacgaggttaggagatcaagaccatcctggctaacacagtgaaaccccgtctctactaaaaatacaaaaaaaaaaaaaattagccgggcgtggtggcgggcacctgtagtcccagctactcgggaggctgaggcaggagaatggcgtgaacctgggaggcagagtttgcagtcagccgagatcacaccactgcactccagcctgggcgatagagcgagactccgtctcaaaaaaaaaaaaaaatacagccgggcacggtggctcacacctgtaatcccagcactttgggaggccaaggtgggcggatcacaaggtcaggagattgagaccatcctggctaacatggtgaaaccctgtctctactaaaaatacaaaaaaaaattagccgggcgtggtggcgggtgcctgtagtcccagctactcgggaggctgaggaaggagaatggcatgaacctgggaggcggagcttgcagtgagccgagatcgtgccactgcactccagcctgggcaacagcgtgagactcgtctcaaaaaaaaaaaaaaatccatatttcattccagctttacaagatggggaaatggaggttcagggaagcatgtaagctagattgttgtttaaccagtattgggggttaaaggggtagctgtctggtcgtgtttacaccacttcatgtagacctgttggccctctttccttgccactatccatttctggattcagtcttccccagaacctcaccctttgcctgccctcagctgactgctcattcatttgccaaggggagacaggtgtggacatgagtggctgggatgcagtgccgtagcaggctgggggacacaaaagagaactgacccagcactgctaccctgggcaggagtagaggattagagaaggggacaccggagccactcccaagggaatgaaggctttctgaacctggtgtgatggtaagactcacactccttactgaggcccctcattctctgcctcgtgtggttacccgcatctttcctgcccatacagccatgcgtgggtcagaggtgtaccagctccagcctgggtgactcctcctggtccctgcttgtgtgttgcctcttccaggcagcctcctcagccccaaactgaactgagtcccctcctctgtgtttcttttttgtttgtttgagacggagtcacccagagtcccagctctgtcacccaggctggagggcagtggcgagacctcggctcactccaagctccgcctcccgggttcacgccattctcctgcctcagcctcccaagtagctgggactacaggcacccaccaccaagcccggctaatttttgtatttttagtagagatggggtttcatcgtgttagctaggatggtcttgatctcctgacctcgtgatccacccacctcagcctcccaaagtgctgggattacaggcatgagccaccgtgcctggcccctcctctgtgtttctacagctccttggcttccctctgtcacacgttattgagaacctagcttcccttggcccacttcccggctacacagctccttgagggcgggactatgatttttttctcccttacttctggatctcctctgagcataaatttcatgagaattatggagacactgttctcagcagaatcagaggaggtggggctggcgtgatgggtccagctgcaggggtgggaggagtggggaggaggggaagggccctgaccatagtctctaaaagtggggccctttggagggcagctgtgctcatctgtctgtctacacccacaatcaggtcttgaggctgtctgggcaggaaggcagggggagagctttcccacgtgctcagtcacactcctctcccactcctgaccacacctttgccagggtcaggagtggaagagcaggaatcccactgccgggccacaatgaccccagctctcctcttccag

SEQ ID NO: 554 - DNA, 104 bp, Homo sapiens
gcatagtgcagtctgacccaccaattcctgtggataggacgctgatcccctctccaccacctcgtcccaaaaaccctgtttttgatgatgaggagaagtccaag

SEQ ID NO: 555 - DNA, 196 bp, Homo sapiens
gtcttgatcacagggacgtggcccttggtgtatgaggaggggtgacaaggcaaccacagcctgagtgcacgtgctgccatgtcccctttcaggcatagtgcagtctgacccaccaattcctgtggataggacgctgatcccctctccaccacctcgtcccaaaaaccctgtttttgatgatgaggagaagtccaag

SEQ ID NO: 556 - DNA, 280 bp, Homo sapiens
gtacgtgtctgcctgcccgcagcctccaggcagccctcgaaggctggcccaggcaaggagagaagggaaggtttgggatccccagagtccctcctgaagagaacagcatttgtccccaggcaaggctgagtcggagttggatgggataaggtgtagcagcctgccctccaccctgctaccctttgcaggtcttgatcacagggacgtggcccttggtgtatgaggaggggtgacaaggcaaccacagcctgagtgcacgtgctgccatgtcccctttcag

SEQ ID NO: 557 - DNA, 188 bp, Homo sapiens
gtacgtgtctgcctgcccgcagcctccaggcagccctcgaaggctggcccaggcaaggagagaagggaaggtttgggatccccagagtccctcctgaagagaacagcatttgtccccaggcaaggctgagtcggagttggatgggataaggtgtagcagcctgccctccaccctgctaccctttgcag

SEQ ID NO: 558 - DNA, 188 bp, Homo sapiens
gtggtccgcaacatgacctccgagttcttcgctgcccagctccgggcccagatctctgacgacaccactcacccgatctcctactacaagcccgagttctacacgccggatgacgggggcactgctcacctgtctgtcgtcgcagaggacggcagtgctgtgtccgccaccagcaccatcaacctcta

SEQ ID NO: 559 - DNA, 210 bp, Homo sapiens
gccagctctggggtctcggcaggtggtccgcaacatgacctccgagttcttcgctgcccagctccgggcccagatctctgacgacaccactcacccgatctcctactacaagcccgagttctacacgccggatgacgggggcactgctcacctgtctgtcgtcgcagaggacggcagtgctgtgtccgccaccagcaccatcaacctcta

SEQ ID NO: 560 - DNA, 3515 bp, Homo sapiens
gtaaggggcaggggctggcccactgtgggtgtggggcctgccatagaggcatcaggtgggctccccagggtggctacagcctcacatatgctttatgaatccattcctgccacagacttcgattgcgggcctactgtgtgctcggatggactcgtgggtgacccccagtcttggcttctgccgcacagaactgacagtgtggggaattagtggccaccctcctacctcaggtcctttgcacatgctgtggttctcgagtgctcagtgctgagatgaggaatgcatgggggcattgcagccctcgggcatggtgagatggatgggtgaaagggagagggccaggtgaacagagaccttggccacccactccctgtcactccaaactaacgcttcccagatgccaccctcagccctgcaccacctgacccactcactcagtagttgccccagctccacactgggtccctataagaccctgtcatatcccttcccgctgaggatcctcacatccctccttacctacttgggtccttggcattcctgggcggatctgcagacccccccacactgaccagtgacctcccaggaggggcgtcagctgcccaggtggtgtcttctctttccccgtgagcattctgcacctctgactcccgctgcagccagtgacctggtgtcttgtctctctgaggggacagagccactgcagtgtgtccctctgccctcctttttggctaaggccagctccttcatctactcgctggctcggggtgctgttcctacaatgctcctttctgcctctgatgatttacttctttatcacggcttattcccgaaagaaaggcagctgttgttgctctagaaacttctatctgctgcctccttctgtcctttgctcctcttagagcaaacatggctgggctatgtcctctctcccttcagggtatcccctcccctgctctatccccatgccaccagatcgccatgtccagcctcagtttccccatcaggccccactcagcagcatctcacacagctcaccacactctcctcgagttttcattttgcaaattttcgcacctacaaaaatgtaaaaaaaccccaaaactgcccaagcatcaatgctcccttttcctggagtctgcagtgtggatgtttctgtcggatttcctaactctctccgtctccacccacatctattgggattcgtgtttttctgagggattccacagtaggttactgatgtcgcacctcagggtgtgtctcaaaagtgagacttgaacatagcacagcaggatgtcggggtgacacaacctgttgtcccttctctttacctacagtaggctcccttggctgttttgtttttgttgtgtttttgtttgtacacagagtctctgtcatccaggttggagtgcagtggtgtgatcttggctcactgcagcctcaacctccagggctcaagcaatcctcccacttcagccccctgaacagctgggaccagaggcacgtgccaccaaacctggataatttttgtattttttttagagacagggtcttgcccagactggtctcaaactcccgggatcaaactatcttcccacctcagcctcccaaagcgctgggattacaggtgtgtttttttttttgagacagagtctcgctctgttgcccaggctggagtgcagtggcgctatctcggctcactgtaagctccgcctcctgggttcacgccattctcctgcctcagcctcccgagtagctgggattacaggcgcccgccacaccgcccagctaattttttgtatttttagtagagagggggtttcaccgtgatcgcgatctcctgacctcgtgatccgcctgcctcggcctcccaaagtgctgggattacaggcatgagccaccgtgcctggcctgttttgttgatttttaaagcccagggcagtagtcttggaaaatgtcccacatcgtggatttgcctttctgtttccttgagggcagattcagacagaacacctttccctgggattggtcaactaatccgtggggtgttgctgaaactttattttattttattttatttttgagacggagtctcgctctgtcccccaggctgtcccccaggctggagtgcagtggcgggatctccgctcactgcaagctccgcctcccaggttcacgccattctcctgcctcagccccccaagtagctgggactacatgtgcccaccaccgcgcccagctaattttttgtatttttagtagagacggggtttcactgtgttagccaggatggtctcgatctcctgacgtcgtgatccgccctcccaaagtgctgggattacaggcctcggcctcccaaagtgctgggattacaggcgtgagccaccgcgcccggtgttgaaactcccttgaggcattttcttcggccttcgggtccatcctctgtctcctccttgacctcctcatctcctcgccactgccttggggaccttggccaggctcatggcatccagcagccactcaatgtcaatacctccatgttcatctctcagcccgcccttgcccgtgaacccatgcttatttatttattttttttaatacgtgcacccatgctcttcaggtctgatgaagtatccaaaatcaagctcctgaccatccccaaacctgccccttctgcagggtttacctcgctagtcggcgccatccttgattcttctctttctcccacccaggccatcatctcttgcctggttgatacccacagcctcccctttgggctttatccttatccccatcatagctgccagagggatcctgtgaaaacactccccagcctgctcattcctctgccctaagcctgcatggcacagagcaaaagccagttgttatgggacctaggaagtcctgtgggatgggccccagcctgcatcttcatcctcttctccccaccccactccattcactctctgcctatcactcaccagcctataccacctgcctcagggcctttgcactgaccatttaggccacattccaggctcttttcacacgttgcctcctctgagaagccctccctgaccactctgcccatacctcatgcctcttgattccccttacctggcttgtggtttcagcactttccctgtgtgtgtttgtttttcttggcatgagagcaggacctaagtgtctgttccctgttgattccccagtgccaggcatgcagtgcaaactctagaaatattttttgcatgaaggaatgagtgattgaatgcagcaagggtctggaggctgaggaccaggcagacagacattcagagttgctggaacgcgacagagacagggagtcagactggtcatgcaaggtcctgggcctgcccttgggtcctggggagccacggaaggttgtgggtgccagagggttgcggtcagagtcacagtcaagggccttctgagacctgtgccccctccccaccctccctccccacctcctcaggccagctctggggtctcggcag

SEQ ID NO: 561 - DNA, 3493 bp, Homo sapiens
gtaaggggcaggggctggcccactgtgggtgtggggcctgccatagaggcatcaggtgggctccccagggtggctacagcctcacatatgctttatgaatccattcctgccacagacttcgattgcgggcctactgtgtgctcggatggactcgtgggtgacccccagtcttggcttctgccgcacagaactgacagtgtggggaattagtggccaccctcctacctcaggtcctttgcacatgctgtggttctcgagtgctcagtgctgagatgaggaatgcatgggggcattgcagccctcgggcatggtgagatggatgggtgaaagggagagggccaggtgaacagagaccttggccacccactccctgtcactccaaactaacgcttcccagatgccaccctcagccctgcaccacctgacccactcactcagtagttgccccagctccacactgggtccctataagaccctgtcatatcccttcccgctgaggatcctcacatccctccttacctacttgggtccttggcattcctgggcggatctgcagacccccccacactgaccagtgacctcccaggaggggcgtcagctgcccaggtggtgtcttctctttccccgtgagcattctgcacctctgactcccgctgcagccagtgacctggtgtcttgtctctctgaggggacagagccactgcagtgtgtccctctgccctcctttttggctaaggccagctccttcatctactcgctggctcggggtgctgttcctacaatgctcctttctgcctctgatgatttacttctttatcacggcttattcccgaaagaaaggcagctgttgttgctctagaaacttctatctgctgcctccttctgtcctttgctcctcttagagcaaacatggctgggctatgtcctctctcccttcagggtatcccctcccctgctctatccccatgccaccagatcgccatgtccagcctcagtttccccatcaggccccactcagcagcatctcacacagctcaccacactctcctcgagttttcattttgcaaattttcgcacctacaaaaatgtaaaaaaaccccaaaactgcccaagcatcaatgctcccttttcctggagtctgcagtgtggatgtttctgtcggatttcctaactctctccgtctccacccacatctattgggattcgtgtttttctgagggattccacagtaggttactgatgtcgcacctcagggtgtgtctcaaaagtgagacttgaacatagcacagcaggatgtcggggtgacacaacctgttgtcccttctctttacctacagtaggctcccttggctgttttgtttttgttgtgtttttgtttgtacacagagtctctgtcatccaggttggagtgcagtggtgtgatcttggctcactgcagcctcaacctccagggctcaagcaatcctcccacttcagccccctgaacagctgggaccagaggcacgtgccaccaaacctggataatttttgtattttttttagagacagggtcttgcccagactggtctcaaactcccgggatcaaactatcttcccacctcagcctcccaaagcgctgggattacaggtgtgtttttttttttgagacagagtctcgctctgttgcccaggctggagtgcagtggcgctatctcggctcactgtaagctccgcctcctgggttcacgccattctcctgcctcagcctcccgagtagctgggattacaggcgcccgccacaccgcccagctaattttttgtatttttagtagagagggggtttcaccgtgatcgcgatctcctgacctcgtgatccgcctgcctcggcctcccaaagtgctgggattacaggcatgagccaccgtgcctggcctgttttgttgatttttaaagcccagggcagtagtcttggaaaatgtcccacatcgtggatttgcctttctgtttccttgagggcagattcagacagaacacctttccctgggattggtcaactaatccgtggggtgttgctgaaactttattttattttattttatttttgagacggagtctcgctctgtcccccaggctgtcccccaggctggagtgcagtggcgggatctccgctcactgcaagctccgcctcccaggttcacgccattctcctgcctcagccccccaagtagctgggactacatgtgcccaccaccgcgcccagctaattttttgtatttttagtagagacggggtttcactgtgttagccaggatggtctcgatctcctgacgtcgtgatccgccctcccaaagtgctgggattacaggcctcggcctcccaaagtgctgggattacaggcgtgagccaccgcgcccggtgttgaaactcccttgaggcattttcttcggccttcgggtccatcctctgtctcctccttgacctcctcatctcctcgccactgccttggggaccttggccaggctcatggcatccagcagccactcaatgtcaatacctccatgttcatctctcagcccgcccttgcccgtgaacccatgcttatttatttattttttttaatacgtgcacccatgctcttcaggtctgatgaagtatccaaaatcaagctcctgaccatccccaaacctgccccttctgcagggtttacctcgctagtcggcgccatccttgattcttctctttctcccacccaggccatcatctcttgcctggttgatacccacagcctcccctttgggctttatccttatccccatcatagctgccagagggatcctgtgaaaacactccccagcctgctcattcctctgccctaagcctgcatggcacagagcaaaagccagttgttatgggacctaggaagtcctgtgggatgggccccagcctgcatcttcatcctcttctccccaccccactccattcactctctgcctatcactcaccagcctataccacctgcctcagggcctttgcactgaccatttaggccacattccaggctcttttcacacgttgcctcctctgagaagccctccctgaccactctgcccatacctcatgcctcttgattccccttacctggcttgtggtttcagcactttccctgtgtgtgtttgtttttcttggcatgagagcaggacctaagtgtctgttccctgttgattccccagtgccaggcatgcagtgcaaactctagaaatattttttgcatgaaggaatgagtgattgaatgcagcaagggtctggaggctgaggaccaggcagacagacattcagagttgctggaacgcgacagagacagggagtcagactggtcatgcaaggtcctgggcctgcccttgggtcctggggagccacggaaggttgtgggtgccagagggttgcggtcagagtcacagtcaagggccttctgagacctgtgccccctccccaccctccctccccacctcctcag

SEQ ID NO: 562 - DNA, 74 bp, Homo sapiens
aggaaaaagagtttagctatgcttcagctgtatattaacaagttggattcacaaggcaaatatacattatttag

SEQ ID NO: 563 - DNA, 109 bp, Homo sapiens
ttatgcaatccaaaggaattattgttgggtttgcttgaactgattgaagagccctctggaaaacagatatcccaaagtattcttcttttgcttcagccattacaaacag

SEQ ID NO: 564 - DNA, 175 bp, Homo sapiens
gaggtacaagtgtggatgtattacatgcataaaatggatagtgatgaagtctgggtaagctttattcattttatataataatattgtttgttccattttagaggaaaaagagtttagctatgcttcagctgtatattaacaagttggattcacaaggcaaatatacattatttag

SEQ ID NO: 565 - DNA, 133 bp, Homo sapiens
gttcaattgtgaatatttttatagttatgcaatccaaaggaattattgttgggtttgcttgaactgattgaagagccctctggaaaacagatatcccaaagtattcttcttttgcttcagccattacaaacag

SEQ ID NO: 566 - DNA, 207 bp, Homo sapiens
gtatgtaaatatttggtgactaaagaataatgagttacagtgagaaaatttgacaaataatttaattttctttttaaaaattttaatttgtgaaatttttatttaggaggtacaagtgtggatgtattacatgcataaaatggatagtgatgaagtctgggtaagctttattcattttatataataatattgtttgttccattttag

SEQ ID NO: 567 - DNA, 1111 bp, Homo sapiens
gtaagttaacaaaacaaggttctctttatcataacacacagcagtattttataattccctttaatgtttattgtttggtaagaaagcttttggttcatgaaagtacatgcagaaaggaactcgttggagaaaagacccagtcttattgattggataggcaattccatttcaggatttcccaaattttctggataaaagaattgtctaacctcatattaacctcatatcggacccattgattcagcatctccagggagagacctgggaagctatatcttaacaagtagccttatcgtatagatgtggaatacaagctttagagaggtagttcaaggtcacatttatcttttggcaacattggaactagattaaaatctcagtcctctttcctttgtggtatgttccctaaaagaaaatggaaggcctagaatacaagtgattaaaattgaagtaggaatagggtagaatacagatcagttgtgactaacaaccttagaaagcgaccctgggtaaaaggctagtagagtttacagtcaatatttgatggccaagaaagataaattctgagaaaaagtatattataagaaactgtttagtgatcagtgcaaatatacccaaatatatattggaaggagagctccatctgtatgagttattgactatgggagctgggagcttttaaaaaaccagtcaagtgagatgataagatatggccagtcagaaagcaatgcaaagttttacctgttcaaaaaatacaaaagagattccagactagtctaaataggcttgcagcatgggattgaaaggtcccacctgctggagcccctgagaatctgttaaggcaatttcagagtggacaggtgaagctcaaaggaaacctgagcctaaagatccattgacttcttgctttttagttttatagttacttgaccatcacagattctgtgttttgctcatgcatattttttcaacaattgtataaataattttaatgttaagcaaaaacataattgtataatattttgtcgatacatgccttcttaaaaatagtaataatgtggctttaaatacaacttgtattaaacaggttcaattgtgaatatttttatag

SEQ ID NO: 568 - DNA, 106 bp, Homo sapiens
gtatgtaaatatttggtgactaaagaataatgagttacagtgagaaaatttgacaaataatttaattttctttttaaaaattttaatttgtgaaatttttatttag

SEQ ID NO: 569 - DNA, 1087 bp, Homo sapiens
gtaagttaacaaaacaaggttctctttatcataacacacagcagtattttataattccctttaatgtttattgtttggtaagaaagcttttggttcatgaaagtacatgcagaaaggaactcgttggagaaaagacccagtcttattgattggataggcaattccatttcaggatttcccaaattttctggataaaagaattgtctaacctcatattaacctcatatcggacccattgattcagcatctccagggagagacctgggaagctatatcttaacaagtagccttatcgtatagatgtggaatacaagctttagagaggtagttcaaggtcacatttatcttttggcaacattggaactagattaaaatctcagtcctctttcctttgtggtatgttccctaaaagaaaatggaaggcctagaatacaagtgattaaaattgaagtaggaatagggtagaatacagatcagttgtgactaacaaccttagaaagcgaccctgggtaaaaggctagtagagtttacagtcaatatttgatggccaagaaagataaattctgagaaaaagtatattataagaaactgtttagtgatcagtgcaaatatacccaaatatatattggaaggagagctccatctgtatgagttattgactatgggagctgggagcttttaaaaaaccagtcaagtgagatgataagatatggccagtcagaaagcaatgcaaagttttacctgttcaaaaaatacaaaagagattccagactagtctaaataggcttgcagcatgggattgaaaggtcccacctgctggagcccctgagaatctgttaaggcaatttcagagtggacaggtgaagctcaaaggaaacctgagcctaaagatccattgacttcttgctttttagttttatagttacttgaccatcacagattctgtgttttgctcatgcatattttttcaacaattgtataaataattttaatgttaagcaaaaacataattgtataatattttgtcgatacatgccttcttaaaaatagtaataatgtggctttaaatacaacttgtattaaacag

SEQ ID NO: 570 - DNA, 172 bp, Homo sapiens
aaagagctgggaacctttgctcaaagctccatcgcccttcaccatcagtacaaccccaagtttcagaccctgttccaaccctgtaacttgatgggagctatgcagctgattgaagacttcagcacacatgtcagcattgactgcagccctcataaaactgtcaagaagactg

SEQ ID NO: 571 - DNA, 211 bp, Homo sapiens
aaagagctgggaacctttgctcaaagctccatcgcccttcaccatcagtacaaccccaagtttcagaccctgttccaaccctgtaacttgatgggagctatgcagctgattgaagacttcagcacacatgtcagcattgactgcagccctcataaaactgtcaagaagactggtaggagacagatgtgtcagctttaagtttttacttgcg

SEQ ID NO: 572 - DNA, 1791 bp, Homo sapiens
gtaggagacagatgtgtcagctttaagtttttacttgcggtgagaggtggtgggaatcttatcccatagataactaaggatacttgcctaggaatggaggacacaggacatttgtaatttcttccttctctcttttatcctccctttgtactcattatccaagttctagaattacatgataatctctgggcctgggtaaagtgtggaggcagtggacagtataggaatatgggaggtagagatctgaggctcagtgctaagaattggactacagcaatatgaggggtaagtattaggagtcagatcgagataaactggggcctggtaaagatgaaagtcaggtggtaaagtttggtcatgtttagctttttactgtcttcattaagatcaactaaggccaggcgcggtggctcacgcctgtaatcccagtactttgggaggccgaggcacggggaacacaatgtcaggagatggagaccatcctggcgaacacagtgaaaccccgtctctactaaaaatacagaaattagccaggcatgggggcacgcgcctgtagtcccagctactcgggaggctgaggcaggagaatcgcttgaacccaggaggcagagtttgcagtgagccaagatagcatcattgcactccagcctgggcgacagagcgagactcagtctcaaaaaaaaaaaaaaaaaaatcaactaactttatttaccatactgactgcagcataagtgatatctccattctgaatgaaatattgacttgcaagttaggcataagttagagattatacatttgccatgttcagtattttaaagaaatttgcaagtttagattctaccttgcattagtttagtattttttagaaaatacttgctatttacttaagccaaatatttgcttctgatttgtttcttgatttagcaaattagttgtggtttgttctggatttgggtttgtctttggattctattttaaatccctgagtcttatcgttaagttgaaaatagttgtatttaagtgtattatatcatagacacggatcccaaactgctttaacagctatattaaatgatatgaaatggtaatgaaaacttgatttaacaccaaattataataatatcttacacatctgttgacctgttgctttcttctggggatataaaaataacacttatggaaggagaaatatggatatagtagttttgtctctagaaatgcagaggtgcctgaaagtgagaggctgagagagggagagagaaatgaatgagactgaattgtctccttccttttatggttcttttgttcccagcctcaggaggaatctgggagaacttaagtaagaatcaaataaaagtaaaatttggaataccagatttgtgagggagattaaagaagttggaatcttattctggaagaaagaaagcattgttgaaggtctcttatccttcaagtatttaaggggggaaggaggtaaaacatttttgagcatacgctattgttagcaccttattttactaggtgctttttaagtgtttgttttacttagtgaataaagtgttccacataagaaagaatgagtcaacttttattgccattgaatgggactccctttagatataatgttagcttaagaaagactggaaacttttggggggatggtgggcagatgggagggaatcaagttaggtaaggatagctcctacctaaatgcaaaaatgcattcacaggcttttatgaagccctcttttgtcctagaagttgatttatccgagatttattttcttatag

SEQ ID NO: 573 - DNA, 1752 bp, Homo sapiens
gtgagaggtggtgggaatcttatcccatagataactaaggatacttgcctaggaatggaggacacaggacatttgtaatttcttccttctctcttttatcctccctttgtactcattatccaagttctagaattacatgataatctctgggcctgggtaaagtgtggaggcagtggacagtataggaatatgggaggtagagatctgaggctcagtgctaagaattggactacagcaatatgaggggtaagtattaggagtcagatcgagataaactggggcctggtaaagatgaaagtcaggtggtaaagtttggtcatgtttagctttttactgtcttcattaagatcaactaaggccaggcgcggtggctcacgcctgtaatcccagtactttgggaggccgaggcacggggaacacaatgtcaggagatggagaccatcctggcgaacacagtgaaaccccgtctctactaaaaatacagaaattagccaggcatgggggcacgcgcctgtagtcccagctactcgggaggctgaggcaggagaatcgcttgaacccaggaggcagagtttgcagtgagccaagatagcatcattgcactccagcctgggcgacagagcgagactcagtctcaaaaaaaaaaaaaaaaaaatcaactaactttatttaccatactgactgcagcataagtgatatctccattctgaatgaaatattgacttgcaagttaggcataagttagagattatacatttgccatgttcagtattttaaagaaatttgcaagtttagattctaccttgcattagtttagtattttttagaaaatacttgctatttacttaagccaaatatttgcttctgatttgtttcttgatttagcaaattagttgtggtttgttctggatttgggtttgtctttggattctattttaaatccctgagtcttatcgttaagttgaaaatagttgtatttaagtgtattatatcatagacacggatcccaaactgctttaacagctatattaaatgatatgaaatggtaatgaaaacttgatttaacaccaaattataataatatcttacacatctgttgacctgttgctttcttctggggatataaaaataacacttatggaaggagaaatatggatatagtagttttgtctctagaaatgcagaggtgcctgaaagtgagaggctgagagagggagagagaaatgaatgagactgaattgtctccttccttttatggttcttttgttcccagcctcaggaggaatctgggagaacttaagtaagaatcaaataaaagtaaaatttggaataccagatttgtgagggagattaaagaagttggaatcttattctggaagaaagaaagcattgttgaaggtctcttatccttcaagtatttaaggggggaaggaggtaaaacatttttgagcatacgctattgttagcaccttattttactaggtgctttttaagtgtttgttttacttagtgaataaagtgttccacataagaaagaatgagtcaacttttattgccattgaatgggactccctttagatataatgttagcttaagaaagactggaaacttttggggggatggtgggcagatgggagggaatcaagttaggtaaggatagctcctacctaaatgcaaaaatgcattcacaggcttttatgaagccctcttttgtcctagaagttgatttatccgagatttattttcttatag

SEQ ID NO: 574 - DNA, 96 bp, Homo sapiens
cctaacaaagcgggagggccccgagacctgaaaatgctctgtgcagaagaagagcagagtaggacgtgctgggtgaccgcgattagattgcttaag

SEQ ID NO: 575 - DNA, 149 bp, Homo sapiens
gtgttaccttcaagatatgcattaacgataaacaatgtgctgtggccttctagcctaacaaagcgggagggccccgagacctgaaaatgctctgtgcagaagaagagcagagtaggacgtgctgggtgaccgcgattagattgcttaag

SEQ ID NO: 576 - DNA, 191 bp, Homo sapiens
gtacaggcttaatattttgatagatgaataaagcaagcctcagccttttaggtaagcttgagtttcctttaattgcttttgaaaagagacagctttctcttatatataggagaattttagtggcttttatttcaacaggtgttaccttcaagatatgcattaacgataaacaatgtgctgtggccttctag

SEQ ID NO: 577 - DNA, 138 bp, Homo sapiens
gtacaggcttaatattttgatagatgaataaagcaagcctcagccttttaggtaagcttgagtttcctttaattgcttttgaaaagagacagctttctcttatatataggagaattttagtggcttttatttcaacag

SEQ ID NO: 578 - DNA, 74 bp, Homo sapiens
gttacaagcaccttttccagccggttatcaaccaggtagtggacttctaccaacccacgtgcattgtgctccag

SEQ ID NO: 579 - DNA, 99 bp, Homo sapiens
gtgcccatctttggccctctcccaggttacaagcaccttttccagccggttatcaaccaggtagtggacttctaccaacccacgtgcattgtgctccag

SEQ ID NO: 580 - DNA, 371 bp, Homo sapiens
gtaagtaccgaagtcttccctctgttccctaggccccttctttttctccttgaaataacctcttctgcctggtattgtctgctgttgggccagttgtccttaaggatgaatggccttcagagggaccatgaatctctggaaattgtatgcaacatatcatgtgtatgtgcatttttctgggaaaagtcattggctttcatcagtcactcatagcagtctgggatcccttccagaagtttcagaccagtgatttgattcttttgggtggcccctttcctgggctacatgctcgctcaaccccctttttccttttgttccctgtctccccatccccttggggtgccaggtgcccatctttggccctctcccag

SEQ ID NO: 581 - DNA, 346 bp, Homo sapiens
gtaagtaccgaagtcttccctctgttccctaggccccttctttttctccttgaaataacctcttctgcctggtattgtctgctgttgggccagttgtccttaaggatgaatggccttcagagggaccatgaatctctggaaattgtatgcaacatatcatgtgtatgtgcatttttctgggaaaagtcattggctttcatcagtcactcatagcagtctgggatcccttccagaagtttcagaccagtgatttgattcttttgggtggcccctttcctgggctacatgctcgctcaaccccctttttccttttgttccctgtctccccatccccttggggtgccag

SEQ ID NO: 582 - DNA, 427 bp, Homo sapiens
gagagctaacttggggtcttttcccaaggtggatgtagaagcgggctccggcgtcccactctcccttccatatgggcttagcgtctgggtcactgagaacgacgtctgaatagggccctgggtccttgccatggatgaatgtggttcccgcatccgccggcgggtgtctctccccaaaaggaaccgtccaagcttggggtgtatttttggcgctcccaccgcggccgagctcgtgcccggagatgaggggaaagaggaggaggaaatggtggctgagaacaggaggcggaaaaccgcgggcgtactgccggttgaggtacagccccttctactctcagattccccggaatgtctcgtccttggaggtggtgatacaaacccggacctcctacgtcacatgcccactgacagaggggtgggagaccag

SEQ ID NO: 583 - DNA, 1451 bp, Homo sapiens
gtacggaggacttggaacttgaaactgcaaacttttggcatccttcccagatgcaaagagttgaccagttttatcgccttcgtttacttctctcgtcttcgttaccactgttaatcggcacttaggaggtattgattgccttgttatttacatttctatataaatatgaaatgtaaaccccgagacataaaagttgtgcacgcagcagttaagtggcatgactgagacacaaatctaggcttccagataactgcagctcctactgtacaaataaaatctgctgtttattgaagacccgttatgttaagctagttatattatctagattttacgacagtaatcaggccctgaaaagttgagatagtacagttcttgctccaaatcctgttgtcttaatcactttactatattgctgcctccaggtttgtgtgtcttctgtgtagcagaccactccaagtcagtattcagtttctcagtctcaattccaaattcctaggaactccttggagtgtctagtggtacaaccatgtttctgttagaggccagtcactgtagattgtagtctgggagggaagcgctgcagttatcagaaacttcgaatgcgctgacatttcagtagacgtctaccagtcttcctgctgttttagtacagctttaagaattacaatctggccgtgtgcagtggctcatgcctataatcccagtgctttaggaggcagagatgggaggatcacttaagcccagaagttcgcgttcaaaaccagcctaggcaacagagacccagtctctacaaaaaaaaaaaaaaatttttttttcttaattagccgggtgtggtggcctgcacctgtagtcctagctacttgggaggctgaggcaggaggatcgcttgagcccaggatgtcaagactgcagtgagctgtgatcgtgcagtggctggagccactgtgctccagcctgggtgacagagccagaccctgtctcaaaaattagaatctcagtatcatcgtaacactcctgaacctgctgtttaggcaagtaatttaacctctttgggcctccatttcttcagctgtaagatatctatttacatataggtctgtgatccatatgtgaccatataattatatacttggtacagccctaggctgaagtgttttttgggggttttgtttgtttgtttgttttggtttttttgagacagagtcccactctgttgcccaggttggagtgcaatggcgcgatctgggcttaccgcaacctgcgcttcccaggttcaagcaattctcctgcctgagcctccgagtagctgggattacaggagcatgccactatgcccggctaatttttgtattttctgtagacacggggtttgaccatgttggccaggctggtgaagcttttattcttaatgaaactggaattgaccataagcgtttttgttctctttgcag

SEQ ID NO: 584 - DNA, 555 bp, Homo sapiens
gagagctaacttggggtcttttcccaaggtggatgtagaagcgggctccggcgtcccactctcccttccatatgggcttagcgtctgggtcactgagaacgacgtctgaatagggccctgggtccttgccatggatgaatgtggttcccgcatccgccggcgggtgtctctccccaaaaggaaccgtccaagcttggggtgtatttttggcgctcccaccgcggccgagctcgtgcccggagatgaggggaaagaggaggaggaaatggtggctgagaacaggaggcggaaaaccgcgggcgtactgccggttgaggtacagccccttctactctcagattccccggaatgtctcgtccttggaggtggtgatacaaacccggacctcctacgtcacatgcccactgacagaggggtgggagaccaggtacggaggacttggaacttgaaactgcaaacttttggcatccttcccagatgcaaagagttgaccagttttatcgccttcgtttacttctctcgtcttcgttaccactgttaatcggcacttaggag

SEQ ID NO: 585 - DNA, 1323 bp, Homo sapiens
gtattgattgccttgttatttacatttctatataaatatgaaatgtaaaccccgagacataaaagttgtgcacgcagcagttaagtggcatgactgagacacaaatctaggcttccagataactgcagctcctactgtacaaataaaatctgctgtttattgaagacccgttatgttaagctagttatattatctagattttacgacagtaatcaggccctgaaaagttgagatagtacagttcttgctccaaatcctgttgtcttaatcactttactatattgctgcctccaggtttgtgtgtcttctgtgtagcagaccactccaagtcagtattcagtttctcagtctcaattccaaattcctaggaactccttggagtgtctagtggtacaaccatgtttctgttagaggccagtcactgtagattgtagtctgggagggaagcgctgcagttatcagaaacttcgaatgcgctgacatttcagtagacgtctaccagtcttcctgctgttttagtacagctttaagaattacaatctggccgtgtgcagtggctcatgcctataatcccagtgctttaggaggcagagatgggaggatcacttaagcccagaagttcgcgttcaaaaccagcctaggcaacagagacccagtctctacaaaaaaaaaaaaaaatttttttttcttaattagccgggtgtggtggcctgcacctgtagtcctagctacttgggaggctgaggcaggaggatcgcttgagcccaggatgtcaagactgcagtgagctgtgatcgtgcagtggctggagccactgtgctccagcctgggtgacagagccagaccctgtctcaaaaattagaatctcagtatcatcgtaacactcctgaacctgctgtttaggcaagtaatttaacctctttgggcctccatttcttcagctgtaagatatctatttacatataggtctgtgatccatatgtgaccatataattatatacttggtacagccctaggctgaagtgttttttgggggttttgtttgtttgtttgttttggtttttttgagacagagtcccactctgttgcccaggttggagtgcaatggcgcgatctgggcttaccgcaacctgcgcttcccaggttcaagcaattctcctgcctgagcctccgagtagctgggattacaggagcatgccactatgcccggctaatttttgtattttctgtagacacggggtttgaccatgttggccaggctggtgaagcttttattcttaatgaaactggaattgaccataagcgtttttgttctctttgcag

SEQ ID NO: 586 - DNA, 160 bp, Homo sapiens
ctgaagaaatcaggggagaaacccctgcttggtggaagcctgatggaatatgcaatcttgtctgccattgctgccatgaatgagccgaagacctgctctaccactgctctgaagaagtatgtcctagagaatcacccaggaaccaattctaactatcaaa

SEQ ID NO: 587 - DNA, 253 bp, Homo sapiens
gaactccgacccacctggtgcagaggagtcttgtcttgacctgctttgggagagtgttgtcttgatgcttttctcttcctccttggaaaacagctgaagaaatcaggggagaaacccctgcttggtggaagcctgatggaatatgcaatcttgtctgccattgctgccatgaatgagccgaagacctgctctaccactgctctgaagaagtatgtcctagagaatcacccaggaaccaattctaactatcaaa

SEQ ID NO: 588 - DNA, 7283 bp, Homo sapiens
gttagagatcagaggcctggttgtggagaagtgcttcttaaagtttttggtttcaggacctccttatactgtaaaaatttattgaggacctcaaagaacttttgtttatgtgggttatatctgtcaacatttactatgttagaaattaacattgaggtctgggtgcggtggctcacacctgtaatcccagcactttgggaggctaaggcaggtggatcacctgcggttgggagttcgagaccagcctggtgaaaccctgtcgtctccactaaaaatacaaaaatgagctgggcgtgggggcacatgcctgtggtcccaactacttgggaggctgaggcaggagaatcacttgaacgcgggaggtggaggttgcattgagccaagattgcaccactgtgctctaggctaggtgacagagcgagatgccatctcaaacaaacaaaaaaacacaaagaaattaacactgaggaaaaatttaaatatttattgatttactttaaaatactagtagaaaacccattacatattaacataaatgacatattttttagtgaaaaatagctgtcctccccctgccacctcccggccttttttttgagacagtgtttctctctgtttcccaggctggagtgcagtggcacaatcacagctcactgtagcctctatctcccaggttcaaggggtcctccagcgtcagcctcccaaagtgctgggattgtaggtgtgagcctataatccgtcttccccaattttttttttttaatgagaagtcgtcaggcactgtttacatttttgcaaacatctttaacatctagcataacagaagacagctagtatctgttccagtttattttgggttacttatttgaagaaaatctaaccttacacagaaatacaattagaaaaggatggaatattttaagataactttgagatagttgtagaaattattctttgatactacaccaaaactcaacaaatcgttatttttttaacagctttattgaggttgatttgcataccttatacaatttaatttatataattacagtttataactcagtgattttcagtaactttatagaattgtacaactatcacagtccaattttcggacatttctgtcacccaaaaaagatcccttgtagccatttgcagtcactccctattccaccagcagcctcaggcaacctctagtctgttctgtctctctgcagatttgcattttgttcacatttcatatggatagaatctagaatcatgtactatatgatcttttgtgtctggcttcttttggcatgatgtttttgaattttatccacgttgcagcatgtaccagtgctttcattcttttttattgtccaatagtatttcattctatggatgtcacattttgtttatccattcatgagatgatgatggacatttggattatttctacttttcagctaattatgaataatactgcctatgaacatttatgttcaagtctgcgtggatatgtttttaggacttgctgggccatatggtaaatttatgttctaagaaactggcagtgtttataagggctcaagtcgttttgttttgttttgagatagggtctcactctgtcacccaggctagagtgcagtggtgtgatcttggctcactgcaacctccacctccctggctcaagcaatcctcccatcttagcctccctaatagctgggattataggcgtgcaccaccaccatgcctgattaatttttgtattttttgtagaaatggggtttcgccgtgttgcccaggctactcttgaactcctgggttcagtgaagtagtctgcctgcctcagcttcccaaagtgttggaattacaggtgtgatccaccacacctgaccagggctcgagtttctccatatcctcctcaacgtttgttactcttttttattatagccatactagtggatatagggtatctcgttgtagttttgattggcatttccctaataattactgatgttgagcatctcttgtgcttaaggccatttgtttattgtctgtagtgaaatgtttattcaaatcttttgcccatttttaaaagggggttggttattcgttaacaagaattcattactctagacataaagtctcatcagattttttctcctattctgtgactttctcagtagtatcttttgaagcgtttactttttgatgaagtcctatttatcatttttaaaaattgcttttgcagttttatggttatctaagaaacattgcctaattaaaggtaatgaaaatttactcgtacgttttaagagttttataattttggctcctacatttaggtctgtgatctatattgttttgtttatagtgagaggtaagggtataatttatctttttgcatgtgggtgtgtgattattccagcaccttttattgaaaagactgtcccttccctattgaattgccgtagcatcttatgaaaatcaattgaccataaatataagggtttatttccggattctgagttctcttttgttctgtaggtgtatccttcatgctaatactgcactgtcttactgactgtagctttatagtgaattttgaaatttggaattataagccctctaactttttcaggaatgttttgactatgccgggtcctgtacagttccatacaaattgtccatttctgccaaaaaaaaaaaaccaaaaaaacagctggagttttggtaggaattgccttgaacctatagatcaatttggggagactcactgtcaacaacgttgagttttccaatccatgacacagaggtctctttatttaatttctctcagcagtgttttgtagttgttcggtgtacgagtcttgaattttttttgttaaatttattgccaagtattttattctttttccatgctgtcttgaatggtggaagtgttttctaattttcgttttcaggttgttaacgctaacctgtagaaatacaatcgatttgtccattgctcttgtatccttcgcccttgctgaactcaccagttgtagtagtttctttgtgaattccttacagttttctacatacaggatctgttatctgcaaataaagagcattttacttctttgtttctagtctggatgtcttttacttcttctgattgcctgattgctctagattaacctccattacagtgttgagtagaagtggtaacagcagacatcttcgccttgttccacatcctggagagaaagcattcagtccttcacaagttagctataggtttttcatagatgcctattgtcaggttgagcaagttcccttctatatatactactagtttcctgggagtttttatcatgaatggctattggatttgtcaagtggtttttcagtgtctgttgagatgattgtgtggtttgtgtcctttgttcgtgtggtctgttaacattatttgttttgtggtaaattctttaaagtttagttgccatgtgaaacctgaaaccctaatcagtgaatttcttggactgtgttaccttaaaattcattgaactttgaataggtattttaatccttcataattttgtagcacgatacattggtcatttgaaaaatagtggcacagagttacatagattttccaaatgttggcatttcattatatacgacaacaaaaattacaatcattggtgttggccactgatcttataagaacagtatttaagtattgggaagataacagactcacagtgatggacacaagtttttcaggatttaaattttctcttgaaaggttgaattttatcattggcaacaaatactattatttttttacatgacaggctcttttagttcatttgcaagatactgtctacctcataaccaagtctgaataatgataggttagctgtcagttatttctttaagtaaaaaagtattacaggtcaggcgcggtggctcatgcctgtaatcccagcactttggggaggccgaggtgggcgaatcacgaggtcaggagatccagaccatcctggctaacatggtgaaacccaatctctagtaaaaatacaagaaattagccgggcatggtggcacatgcctgcaatcccagctactcgggaggctgaggcaggagaatcccttgaacccaggaggcagaggttgcagtaagccaagatcacgccactgcactccagcctgggtgacagaatgagactccgtctcaaaaaaaaaaaacgtgttccaagaaaaatgcagctaattcagctcataactttaacaattacacaagtgcttttcctggataccatcatgtctacatatgtagcagatacggattatgtggttcttcctgtttcatcccataaaatattctaaagacattcaaaagttgagatttaataaaataatttttagtactttatcaagggcattctaagtgaattcgtgctcttttttttaaaccataagtacatagcagtaaagaagacaataaccacatttttgtgtctctgcctttatctgtggtaagctgacagcagttttacccaccattgcttctgcaccatcagtgcaaatgtcaaaatagtgaaaaggccaggtgcagtggctcacacctgtaatcctagcaatttgggatgctgaggcgggtggtttacctggtcaggagtttgaggccagcctggccaacatggtgaaaccccatctctactgaaaatacaaaaattagccaggtgtggtgggcgcctgtagtcccagctactcgggaggtagacgcaggagaatcgctggaatccgggaggcggaggttgcagtgagccgagaccgcgccattacactccagcctgggcaacacagcgaaactctgtctccaaaaaaaaaaagacagtgaaaaagcaaatcgcatcttaggtttttgtttgtttgttttttgagatggagtcttgttgcagtgagtacagtggcttgatctcggcttactgcaacctccacctcccgggttcaagcgattctcctgccccagccttgcccaagtagctgggattacaggcatgcaccaccatgcccggctaatttttgtatttttagtagagatggggtttcaccatgttggccaggctggtcttgagctcctgacctcagctgatccacccgcctcagcctcccaaagtgctgggattacaggcatgagccactgcgtctggcatatcttagttttattatgcaaatagttttgaccttgcagatcctctgaaagggtctcaggaacccagacaattgtaaccagaccattctttaagaaccactaaacagttttgtagagcatttctggttttctccttttccctttttgcatattatttgctaacctttgttaccacacctttcattttcaaagtatgctatgtaattttcttttgtatgatacttttttttttttttagtttattatttatttttagagacagagtcttggtctgtcactcaggctggagtatagtgatgtaatcatagctcactaatagcctcaacttcctgggcttaagccatcctcccccctcaccctttcatgtaggtaggctacaggcatgccgccattcatagctagtttttttatttttagtagagagagagtctcactatgttgccgaggttggtcttgaactcttggcctcaagcagtcctcccccattagcctcccaaagtactgggattacagatatgaactaccgtgctccctgataccctaaatatttatcaaaatttttcactgctattttcctcataggattaaaagggctatttattattttttataactacagctgacccttgaacaacataggggttaaaggtgcagatcccccgtgcagtaaaaaaaaaaaatcataaaaaactttagattcccagaaaacttgactattaatagcctactgttgaccggaagccttacaaacagttaatacacattttgtatgttgtatgtattatataatgtactcttataataaagcaagctagagaaaagaaaatgttattgagaaaatcttaagaaagaggaaataatggccggccacagtgggtcacacctataatcccagcacgtcaggaggccgaggcaggcagatctcctgaggtctggagttcgagactagcctggccaacatggtgaaaccgtgtctctactaaaaataaaaaattagcgagacctggtggtgggcgcctgtaatcccagctactcgggaagttgaggcaggagaattgcttaaacccaggagaccgaggttgcagtgagctgaaaccacgtcattgcaatccagcctgggcaacagagcgagactctgtctcaaaaaaaaaaaaaaaaaaagagagaaaatatatttattgttcattaagtggaagtggatgatcgtacatgtctttatccttgtcatctttgagttgagtaggctgaggaggacaaggaggtgttggtcttgctgtcttggggtggcgggcagaggcagaagaaaatccacatataagtggaccagcacagataaaattgtgttgtgttcaagggtcagctatacttcatttttcagattcagaaaagtgaagtattctcaaataaaataatctttttttttttaaatttattttatttatttatttttttagacagaatcttactctgtcgccgaggctggagttcagtggcatgatttcggcacactgcaaccccgcgtcttgggttcaagtgactctcctgcctcagcctcccaagtagctgagaccacaggcacctgccacacctggctattttgtgtgtgtgtgtgtgtgtgtgtgtgtgtgtgtgtgtgtgtgtgtgtgtgtgtgtgtttttagtagagacaggtttcgccatgttggccaggctggtctcgaactcctggccttaagtgatctgcctgcctctgcctcccaaagtgctggggctataggtgtgagcacccagccaaaagaatcttaatttttagggacataactggttaacctgcttattgggtacagttgtcagtatctttgggttaggttggctattattttagggtggatggagggtagatggaaggagaaaatatccataggagggttgggacttctcagttagattgaatacctgttgaatgggaagagaaagtccctaagctgacaatttattgtaaaacatatctgtgctaatgcaggaactccgacccacctggtgcagaggagtcttgtcttgacctgctttgggagagtgttgtcttgatgcttttctcttcctccttggaaaacag

SEQ ID NO: 589 - DNA, 7190 bp, Homo sapiens
gttagagatcagaggcctggttgtggagaagtgcttcttaaagtttttggtttcaggacctccttatactgtaaaaatttattgaggacctcaaagaacttttgtttatgtgggttatatctgtcaacatttactatgttagaaattaacattgaggtctgggtgcggtggctcacacctgtaatcccagcactttgggaggctaaggcaggtggatcacctgcggttgggagttcgagaccagcctggtgaaaccctgtcgtctccactaaaaatacaaaaatgagctgggcgtgggggcacatgcctgtggtcccaactacttgggaggctgaggcaggagaatcacttgaacgcgggaggtggaggttgcattgagccaagattgcaccactgtgctctaggctaggtgacagagcgagatgccatctcaaacaaacaaaaaaacacaaagaaattaacactgaggaaaaatttaaatatttattgatttactttaaaatactagtagaaaacccattacatattaacataaatgacatattttttagtgaaaaatagctgtcctccccctgccacctcccggccttttttttgagacagtgtttctctctgtttcccaggctggagtgcagtggcacaatcacagctcactgtagcctctatctcccaggttcaaggggtcctccagcgtcagcctcccaaagtgctgggattgtaggtgtgagcctataatccgtcttccccaattttttttttttaatgagaagtcgtcaggcactgtttacatttttgcaaacatctttaacatctagcataacagaagacagctagtatctgttccagtttattttgggttacttatttgaagaaaatctaaccttacacagaaatacaattagaaaaggatggaatattttaagataactttgagatagttgtagaaattattctttgatactacaccaaaactcaacaaatcgttatttttttaacagctttattgaggttgatttgcataccttatacaatttaatttatataattacagtttataactcagtgattttcagtaactttatagaattgtacaactatcacagtccaattttcggacatttctgtcacccaaaaaagatcccttgtagccatttgcagtcactccctattccaccagcagcctcaggcaacctctagtctgttctgtctctctgcagatttgcattttgttcacatttcatatggatagaatctagaatcatgtactatatgatcttttgtgtctggcttcttttggcatgatgtttttgaattttatccacgttgcagcatgtaccagtgctttcattcttttttattgtccaatagtatttcattctatggatgtcacattttgtttatccattcatgagatgatgatggacatttggattatttctacttttcagctaattatgaataatactgcctatgaacatttatgttcaagtctgcgtggatatgtttttaggacttgctgggccatatggtaaatttatgttctaagaaactggcagtgtttataagggctcaagtcgttttgttttgttttgagatagggtctcactctgtcacccaggctagagtgcagtggtgtgatcttggctcactgcaacctccacctccctggctcaagcaatcctcccatcttagcctccctaatagctgggattataggcgtgcaccaccaccatgcctgattaatttttgtattttttgtagaaatggggtttcgccgtgttgcccaggctactcttgaactcctgggttcagtgaagtagtctgcctgcctcagcttcccaaagtgttggaattacaggtgtgatccaccacacctgaccagggctcgagtttctccatatcctcctcaacgtttgttactcttttttattatagccatactagtggatatagggtatctcgttgtagttttgattggcatttccctaataattactgatgttgagcatctcttgtgcttaaggccatttgtttattgtctgtagtgaaatgtttattcaaatcttttgcccatttttaaaagggggttggttattcgttaacaagaattcattactctagacataaagtctcatcagattttttctcctattctgtgactttctcagtagtatcttttgaagcgtttactttttgatgaagtcctatttatcatttttaaaaattgcttttgcagttttatggttatctaagaaacattgcctaattaaaggtaatgaaaatttactcgtacgttttaagagttttataattttggctcctacatttaggtctgtgatctatattgttttgtttatagtgagaggtaagggtataatttatctttttgcatgtgggtgtgtgattattccagcaccttttattgaaaagactgtcccttccctattgaattgccgtagcatcttatgaaaatcaattgaccataaatataagggtttatttccggattctgagttctcttttgttctgtaggtgtatccttcatgctaatactgcactgtcttactgactgtagctttatagtgaattttgaaatttggaattataagccctctaactttttcaggaatgttttgactatgccgggtcctgtacagttccatacaaattgtccatttctgccaaaaaaaaaaaaccaaaaaaacagctggagttttggtaggaattgccttgaacctatagatcaatttggggagactcactgtcaacaacgttgagttttccaatccatgacacagaggtctctttatttaatttctctcagcagtgttttgtagttgttcggtgtacgagtcttgaattttttttgttaaatttattgccaagtattttattctttttccatgctgtcttgaatggtggaagtgttttctaattttcgttttcaggttgttaacgctaacctgtagaaatacaatcgatttgtccattgctcttgtatccttcgcccttgctgaactcaccagttgtagtagtttctttgtgaattccttacagttttctacatacaggatctgttatctgcaaataaagagcattttacttctttgtttctagtctggatgtcttttacttcttctgattgcctgattgctctagattaacctccattacagtgttgagtagaagtggtaacagcagacatcttcgccttgttccacatcctggagagaaagcattcagtccttcacaagttagctataggtttttcatagatgcctattgtcaggttgagcaagttcccttctatatatactactagtttcctgggagtttttatcatgaatggctattggatttgtcaagtggtttttcagtgtctgttgagatgattgtgtggtttgtgtcctttgttcgtgtggtctgttaacattatttgttttgtggtaaattctttaaagtttagttgccatgtgaaacctgaaaccctaatcagtgaatttcttggactgtgttaccttaaaattcattgaactttgaataggtattttaatccttcataattttgtagcacgatacattggtcatttgaaaaatagtggcacagagttacatagattttccaaatgttggcatttcattatatacgacaacaaaaattacaatcattggtgttggccactgatcttataagaacagtatttaagtattgggaagataacagactcacagtgatggacacaagtttttcaggatttaaattttctcttgaaaggttgaattttatcattggcaacaaatactattatttttttacatgacaggctcttttagttcatttgcaagatactgtctacctcataaccaagtctgaataatgataggttagctgtcagttatttctttaagtaaaaaagtattacaggtcaggcgcggtggctcatgcctgtaatcccagcactttggggaggccgaggtgggcgaatcacgaggtcaggagatccagaccatcctggctaacatggtgaaacccaatctctagtaaaaatacaagaaattagccgggcatggtggcacatgcctgcaatcccagctactcgggaggctgaggcaggagaatcccttgaacccaggaggcagaggttgcagtaagccaagatcacgccactgcactccagcctgggtgacagaatgagactccgtctcaaaaaaaaaaaacgtgttccaagaaaaatgcagctaattcagctcataactttaacaattacacaagtgcttttcctggataccatcatgtctacatatgtagcagatacggattatgtggttcttcctgtttcatcccataaaatattctaaagacattcaaaagttgagatttaataaaataatttttagtactttatcaagggcattctaagtgaattcgtgctcttttttttaaaccataagtacatagcagtaaagaagacaataaccacatttttgtgtctctgcctttatctgtggtaagctgacagcagttttacccaccattgcttctgcaccatcagtgcaaatgtcaaaatagtgaaaaggccaggtgcagtggctcacacctgtaatcctagcaatttgggatgctgaggcgggtggtttacctggtcaggagtttgaggccagcctggccaacatggtgaaaccccatctctactgaaaatacaaaaattagccaggtgtggtgggcgcctgtagtcccagctactcgggaggtagacgcaggagaatcgctggaatccgggaggcggaggttgcagtgagccgagaccgcgccattacactccagcctgggcaacacagcgaaactctgtctccaaaaaaaaaaagacagtgaaaaagcaaatcgcatcttaggtttttgtttgtttgttttttgagatggagtcttgttgcagtgagtacagtggcttgatctcggcttactgcaacctccacctcccgggttcaagcgattctcctgccccagccttgcccaagtagctgggattacaggcatgcaccaccatgcccggctaatttttgtatttttagtagagatggggtttcaccatgttggccaggctggtcttgagctcctgacctcagctgatccacccgcctcagcctcccaaagtgctgggattacaggcatgagccactgcgtctggcatatcttagttttattatgcaaatagttttgaccttgcagatcctctgaaagggtctcaggaacccagacaattgtaaccagaccattctttaagaaccactaaacagttttgtagagcatttctggttttctccttttccctttttgcatattatttgctaacctttgttaccacacctttcattttcaaagtatgctatgtaattttcttttgtatgatacttttttttttttttagtttattatttatttttagagacagagtcttggtctgtcactcaggctggagtatagtgatgtaatcatagctcactaatagcctcaacttcctgggcttaagccatcctcccccctcaccctttcatgtaggtaggctacaggcatgccgccattcatagctagtttttttatttttagtagagagagagtctcactatgttgccgaggttggtcttgaactcttggcctcaagcagtcctcccccattagcctcccaaagtactgggattacagatatgaactaccgtgctccctgataccctaaatatttatcaaaatttttcactgctattttcctcataggattaaaagggctatttattattttttataactacagctgacccttgaacaacataggggttaaaggtgcagatcccccgtgcagtaaaaaaaaaaaatcataaaaaactttagattcccagaaaacttgactattaatagcctactgttgaccggaagccttacaaacagttaatacacattttgtatgttgtatgtattatataatgtactcttataataaagcaagctagagaaaagaaaatgttattgagaaaatcttaagaaagaggaaataatggccggccacagtgggtcacacctataatcccagcacgtcaggaggccgaggcaggcagatctcctgaggtctggagttcgagactagcctggccaacatggtgaaaccgtgtctctactaaaaataaaaaattagcgagacctggtggtgggcgcctgtaatcccagctactcgggaagttgaggcaggagaattgcttaaacccaggagaccgaggttgcagtgagctgaaaccacgtcattgcaatccagcctgggcaacagagcgagactctgtctcaaaaaaaaaaaaaaaaaaagagagaaaatatatttattgttcattaagtggaagtggatgatcgtacatgtctttatccttgtcatctttgagttgagtaggctgaggaggacaaggaggtgttggtcttgctgtcttggggtggcgggcagaggcagaagaaaatccacatataagtggaccagcacagataaaattgtgttgtgttcaagggtcagctatacttcatttttcagattcagaaaagtgaagtattctcaaataaaataatctttttttttttaaatttattttatttatttatttttttagacagaatcttactctgtcgccgaggctggagttcagtggcatgatttcggcacactgcaaccccgcgtcttgggttcaagtgactctcctgcctcagcctcccaagtagctgagaccacaggcacctgccacacctggctattttgtgtgtgtgtgtgtgtgtgtgtgtgtgtgtgtgtgtgtgtgtgtgtgtgtgtgtgtttttagtagagacaggtttcgccatgttggccaggctggtctcgaactcctggccttaagtgatctgcctgcctctgcctcccaaagtgctggggctataggtgtgagcacccagccaaaagaatcttaatttttagggacataactggttaacctgcttattgggtacagttgtcagtatctttgggttaggttggctattattttagggtggatggagggtagatggaaggagaaaatatccataggagggttgggacttctcagttagattgaatacctgttgaatgggaagagaaagtccctaagctgacaatttattgtaaaacatatctgtgctaatgcag

SEQ ID NO: 590 - DNA, 109 bp, Homo sapiens
gctgcggcccccagacctggcgcagcgtgtccagctgtgggagcacttccagagcctgctgtggacctacagccgcctgcgggagcaggagcagtgcttcgccgtggag

SEQ ID NO: 591 - DNA, 152 bp, Homo sapiens
gctgcggcccccagacctggcgcagcgtgtccagctgtgggagcacttccagagcctgctgtggacctacagccgcctgcgggagcaggagcagtgcttcgccgtggaggtgactactgggcgcgggagtcctcaggacttgaagctgtcag

SEQ ID NO: 592 - DNA, 2691 bp, Homo sapiens
gtgactactgggcgcgggagtcctcaggacttgaagctgtcaggtcagagggggcgtccacctttaagaccatgttttaaccctaatgaatgaaggcacaagcagcccctgaaactcgtgtattcagagagagttgttctttctggccatatggagggttgggtaccctgatgggctttcccatggtaaaacagctcgatcctggataacacatacttttaatgcaatttttgggttcactgtaaattacaggaatctttgaagacagttccttcaaccctcccctccttttcccacaaaattatattgagctggaactggaggggaaagcagtggagaaaaacacagcgctaaaggcaagattccctgagtgcaaatgataccagcactacagccagtaaatagccttaggccagcagcagcataggagagctgagcctgcaactctaggttaagcccagccccaaaaagttaaagtggctactggtccttttataaagccctagtaaataaaaaactaaaaaattaaaaataaaaactaaagtggctgctggtcagtagcactccttgccttcctaaagaggtaaaccaaattctctttcaagcagtggttttcatactccagtgtgtgtcagaatcctctgtagggcttgttaaatacaggttactgggcctcactttcagcttttctcatttagcgagtctgggatgggggctctagaacttgcatttcttttttttttttttttttgagatggagtctcgctctgttgcccaggctggagtgcagtggagcaatcttggctcactgtgacctctgcttcccgggttcaagcaattctcctgcctcagcctcctgagtagctgggattacaggcacgtgccaccacgcctggctaatttttgtatttttagtagagacggggtttcactatgttggtcaggctggtctcgaactcctgacctcatgatctgcccactcggcctcccaaagtgctgggattacaggcatgagccacagtgcccggccctagaacttccatttctaaaaaattcccaggtgctgtttattgtgcttgtccaggaaccacactttgaaaaccactgctagagcaggaaaggtaaagatcaaacaaacgtgaactcacaactgaagaaaatcagatatggaagaaaataagccaccacgagtgagagtcaggaaaatcaatcaccaacagatttagatcccaaggcacttgatacattggaactattaggtatagaatataaaataactatgaaatatttaaaaatatgaaatgtagaatcacaaaatgagataagaagaaactctaaattgaccaggcaaatttgaaaaagaacacgtacagatattttagaaaagaaaacatagttgttaaaatgaaaaactcaagggatgtgttaaatagcagatgagacatagctagagggagaattaatgagctggaaaatagatctgaaggaattcattctcatacccccactcattcactcttccaataaacatatagtacctattatatgctaagaggtgtgccaggccatgggaataaagagatgaataaagacatattcactgcccttgaggggaaatcagccatgtatatactaaaagatataataaagaatcctggtgccatattaggtttttcatcaaaagctatggtggcacaagagatggagtggtaaactctttctgggacattaggaaagacttcttttaggaggtgacctaatgccattagcataaaatccaaactcttcccaagcctaccaggccctgtgtgatctatcgctgcctatttcactctagcttcatcttatgcctctcttgtccacgcttactgagtgctagtcacatgaaacttctttaagtttcaggaaaactctatatttagatctgtccaatatgatagtcattagctgcatgtggctgttgaacatttgaaatataactagtgcaaattgagttatgctatgcatgtgaaatatataccagattttggtaacttagcacaaaaaagaatgtaaaacattccattaataaggcttttatatcatatggtgataatattttggatatattcagtaaaatgaaatatatcattaaaattaatgtcaactgtttctttttacttttttaatgtggtcactggaaacatttaaattatgcatagggcctttcttttatttctgttggacagcaccattgcaaactctgtccccatctcatggcctctgaatatgcagtctccttgacttgcagtgttctctctctccctctttctctggtgggccatctggttgtttagatattagtttaaaggtgacctaattcagggacatttctttggacaccctacccaaggaggtctctgctatttctctctagcctagtgctgtgtattttgtacttggtgcttacttacaaatggcacttactttatttccttgtgtattgccttgcctcatccactggagtctagtgaccagacagtaagcctcaggaaggctgggacctggtgggtcttagtccccctgtttccaagtatctggtgcagagtccaagctcactgtggacagagtgaatgtccccactagcccagggcttggagtggggcaaggttgttggtgatatggcttcctctcccttcctgccctggctag

SEQ ID NO: 593 - DNA, 2648 bp, Homo sapiens
gtcagagggggcgtccacctttaagaccatgttttaaccctaatgaatgaaggcacaagcagcccctgaaactcgtgtattcagagagagttgttctttctggccatatggagggttgggtaccctgatgggctttcccatggtaaaacagctcgatcctggataacacatacttttaatgcaatttttgggttcactgtaaattacaggaatctttgaagacagttccttcaaccctcccctccttttcccacaaaattatattgagctggaactggaggggaaagcagtggagaaaaacacagcgctaaaggcaagattccctgagtgcaaatgataccagcactacagccagtaaatagccttaggccagcagcagcataggagagctgagcctgcaactctaggttaagcccagccccaaaaagttaaagtggctactggtccttttataaagccctagtaaataaaaaactaaaaaattaaaaataaaaactaaagtggctgctggtcagtagcactccttgccttcctaaagaggtaaaccaaattctctttcaagcagtggttttcatactccagtgtgtgtcagaatcctctgtagggcttgttaaatacaggttactgggcctcactttcagcttttctcatttagcgagtctgggatgggggctctagaacttgcatttcttttttttttttttttttgagatggagtctcgctctgttgcccaggctggagtgcagtggagcaatcttggctcactgtgacctctgcttcccgggttcaagcaattctcctgcctcagcctcctgagtagctgggattacaggcacgtgccaccacgcctggctaatttttgtatttttagtagagacggggtttcactatgttggtcaggctggtctcgaactcctgacctcatgatctgcccactcggcctcccaaagtgctgggattacaggcatgagccacagtgcccggccctagaacttccatttctaaaaaattcccaggtgctgtttattgtgcttgtccaggaaccacactttgaaaaccactgctagagcaggaaaggtaaagatcaaacaaacgtgaactcacaactgaagaaaatcagatatggaagaaaataagccaccacgagtgagagtcaggaaaatcaatcaccaacagatttagatcccaaggcacttgatacattggaactattaggtatagaatataaaataactatgaaatatttaaaaatatgaaatgtagaatcacaaaatgagataagaagaaactctaaattgaccaggcaaatttgaaaaagaacacgtacagatattttagaaaagaaaacatagttgttaaaatgaaaaactcaagggatgtgttaaatagcagatgagacatagctagagggagaattaatgagctggaaaatagatctgaaggaattcattctcatacccccactcattcactcttccaataaacatatagtacctattatatgctaagaggtgtgccaggccatgggaataaagagatgaataaagacatattcactgcccttgaggggaaatcagccatgtatatactaaaagatataataaagaatcctggtgccatattaggtttttcatcaaaagctatggtggcacaagagatggagtggtaaactctttctgggacattaggaaagacttcttttaggaggtgacctaatgccattagcataaaatccaaactcttcccaagcctaccaggccctgtgtgatctatcgctgcctatttcactctagcttcatcttatgcctctcttgtccacgcttactgagtgctagtcacatgaaacttctttaagtttcaggaaaactctatatttagatctgtccaatatgatagtcattagctgcatgtggctgttgaacatttgaaatataactagtgcaaattgagttatgctatgcatgtgaaatatataccagattttggtaacttagcacaaaaaagaatgtaaaacattccattaataaggcttttatatcatatggtgataatattttggatatattcagtaaaatgaaatatatcattaaaattaatgtcaactgtttctttttacttttttaatgtggtcactggaaacatttaaattatgcatagggcctttcttttatttctgttggacagcaccattgcaaactctgtccccatctcatggcctctgaatatgcagtctccttgacttgcagtgttctctctctccctctttctctggtgggccatctggttgtttagatattagtttaaaggtgacctaattcagggacatttctttggacaccctacccaaggaggtctctgctatttctctctagcctagtgctgtgtattttgtacttggtgcttacttacaaatggcacttactttatttccttgtgtattgccttgcctcatccactggagtctagtgaccagacagtaagcctcaggaaggctgggacctggtgggtcttagtccccctgtttccaagtatctggtgcagagtccaagctcactgtggacagagtgaatgtccccactagcccagggcttggagtggggcaaggttgttggtgatatggcttcctctcccttcctgccctggctag

SEQ ID NO: 594 - DNA, 95 bp, Homo sapiens
gtggagcccctgttgttgctgaaggcagcccgcattctgcagacctgccagcgctcgcctcacattctcgctggctgcatcctctataaaggact

SEQ ID NO: 595 - DNA, 204 bp, Homo sapiens
gctttgagctacaccctgtccagctgttctgtacaaccctttccccttttctcccttcctgattgtgagcatgctgatgggtgggcatgatgcctcttgccctgcacaggtggagcccctgttgttgctgaaggcagcccgcattctgcagacctgccagcgctcgcctcacattctcgctggctgcatcctctataaaggact

SEQ ID NO: 596 - DNA, 1488 bp, Homo sapiens
gtaacattttcatcctccttattcattttatatgtaagactagggcttctggatacttttttaatattcctgaagtgaactatatctggaaaagtgagtagaatgtcacttctcaggcagggccatgacacggcaggtcacctctcagcctcatttcccttatccaaagaatggtgtcagcatacctgccttcttgaactgttttgatgatcaagtgaagcagtacctcaaatgacaccaagtaaatgctcagtaaagggaattagtattttgttcatgcctcagaagtgttgaactcagtaatctgaaggccgcctctcttgatattcatatcatatgatctagttattctcagcatcaaaaatgcccagcatgaacatttcaaaaacaaggttgctgtctttgagagagaatggttgggaactgtttttgtatctctgagccgctccgtttgcggttggcactcagtgaaacctaggctgcttgtgtggctggcctgaccacctgtgctgccccattaagagccagctacctgagccctgactcacagccctctcctgtgtctcactgcgatagtaaataatgtccctgtagcaggggtgtagcactgtggctcagccttcacagagcatgactccaccagacatggggaagggttttccctgctccagtctggaaaacttcctgtagctggccccagagctttatagaatggctggctgggatggcacagtcttgaggctatgaagaataaacttcttaatgtgtcagcagctccggaggctccattaacactagttctaacagctggtggatacttgctggttctagctggcaggtggaagtctgaggaggctgctggttattgctggctcttcctgaccaggtccagatgcttttcttgtatttttagggacttctaggcccctgactccatacaaggaatgtggaactgaggcatatttccccgagtgaaagagcatgatgttttcattttatgtgatggaatagagtcatggaacctggtcagacatcaagccacctgtatcaccatggggattgtgcttcagaaggaaagtggaggatagggtaggtgggtttcacctggtaccatgacatgtatttataggatacaccctcctcttctgctgccgtgaggtcttagcattgtcagggtagacagtcggtctcccaggccatctactttgacccctttgaatagccatatgccatatttgctgcaccttctagcttctggacaggcctccttgttctaagaatttggcatttagtggtgtcagcagttctgagtatagagaggtagaatagtcccaagccatggcacagctttcactgtgtgacacattctccttttccaggctttgagctacaccctgtccagctgttctgtacaaccctttccccttttctcccttcctgattgtgagcatgctgatgggtgggcatgatgcctcttgccctgcacag

SEQ ID NO: 597 - DNA, 1379 bp, Homo sapiens
gtaacattttcatcctccttattcattttatatgtaagactagggcttctggatacttttttaatattcctgaagtgaactatatctggaaaagtgagtagaatgtcacttctcaggcagggccatgacacggcaggtcacctctcagcctcatttcccttatccaaagaatggtgtcagcatacctgccttcttgaactgttttgatgatcaagtgaagcagtacctcaaatgacaccaagtaaatgctcagtaaagggaattagtattttgttcatgcctcagaagtgttgaactcagtaatctgaaggccgcctctcttgatattcatatcatatgatctagttattctcagcatcaaaaatgcccagcatgaacatttcaaaaacaaggttgctgtctttgagagagaatggttgggaactgtttttgtatctctgagccgctccgtttgcggttggcactcagtgaaacctaggctgcttgtgtggctggcctgaccacctgtgctgccccattaagagccagctacctgagccctgactcacagccctctcctgtgtctcactgcgatagtaaataatgtccctgtagcaggggtgtagcactgtggctcagccttcacagagcatgactccaccagacatggggaagggttttccctgctccagtctggaaaacttcctgtagctggccccagagctttatagaatggctggctgggatggcacagtcttgaggctatgaagaataaacttcttaatgtgtcagcagctccggaggctccattaacactagttctaacagctggtggatacttgctggttctagctggcaggtggaagtctgaggaggctgctggttattgctggctcttcctgaccaggtccagatgcttttcttgtatttttagggacttctaggcccctgactccatacaaggaatgtggaactgaggcatatttccccgagtgaaagagcatgatgttttcattttatgtgatggaatagagtcatggaacctggtcagacatcaagccacctgtatcaccatggggattgtgcttcagaaggaaagtggaggatagggtaggtgggtttcacctggtaccatgacatgtatttataggatacaccctcctcttctgctgccgtgaggtcttagcattgtcagggtagacagtcggtctcccaggccatctactttgacccctttgaatagccatatgccatatttgctgcaccttctagcttctggacaggcctccttgttctaagaatttggcatttagtggtgtcagcagttctgagtatagagaggtagaatagtcccaagccatggcacagctttcactgtgtgacacattctccttttccag

SEQ ID NO: 598 - DNA, 37 bp, Homo sapiens
gcttcctgaactactacgatgcctgctcggagggtct

SEQ ID NO: 599 - DNA, 203 bp, Homo sapiens
gcttcctgaactactacgatgcctgctcggagggtctgcgcgccgccagccccgccctgcggctgggaggccccggcgactccttccacaccccaccgcgatccccgctgagctggggcctcctgcgccactgccacgacggtaccaacttcttcactggggaggcgggcgtgcggctggactacatctccctccacaggaag

SEQ ID NO: 600 - DNA, 65 bp, Homo sapiens
gtgtagacgcagtgctcccccggcccaggcttcctgaactactacgatgcctgctcggagggtct

SEQ ID NO: 601 - DNA, 231 bp, Homo sapiens
gtgtagacgcagtgctcccccggcccaggcttcctgaactactacgatgcctgctcggagggtctgcgcgccgccagccccgccctgcggctgggaggccccggcgactccttccacaccccaccgcgatccccgctgagctggggcctcctgcgccactgccacgacggtaccaacttcttcactggggaggcgggcgtgcggctggactacatctccctccacaggaag

SEQ ID NO: 602 - DNA, 115 bp, Homo sapiens
gtgtgcaccgcttcctggggtcctgcccggctgaaagggggcagaggaaggcaggagcagaggctaagccgctcatccccagggcaggtgtagacgcagtgctcccccggcccag

SEQ ID NO: 603 - DNA, 87 bp, Homo sapiens
gtgtgcaccgcttcctggggtcctgcccggctgaaagggggcagaggaaggcaggagcagaggctaagccgctcatccccagggcag

SEQ ID NO: 604 - DNA, 112 bp, Homo sapiens
gagttggtgcccttgtgctaccgctgctccaccaacaacccgctgctcaacaacctgggcaacgtctgcatcaactgccgccagcccttcatcttctccgcctcttcctacg

SEQ ID NO: 605 - DNA, 200 bp, Homo sapiens
ccaggccccaggggcctgaagccagagtccagggggaggaggacacgtgcctgccccggcccctcgggagtccgtggctgttttgtaggagttggtgcccttgtgctaccgctgctccaccaacaacccgctgctcaacaacctgggcaacgtctgcatcaactgccgccagcccttcatcttctccgcctcttcctacg

SEQ ID NO: 606 - DNA, 933 bp, Homo sapiens
gtgaggatgcagcacccttgggcaggtggcttctcctctcccttgaggccatctcatgccttcttgcctggcctgggttccgtttgaagagagacagctgcagctccctctaggctctgtgccccctgctcaagcctggccatgccagctcccctgtgcttccctgtccacctcctgttctccccgcagtccacctggcgcccgctcacagcccccggccccggcctcagccctcagcctggcctcccttgctccttgccctcccctaggcaagccccacacctctgtgcccaggtggctctgcctttaccccaggcctggccccagagctgactcttactctagaaacctctgccctttctggaaccaggctgtagttctccagcaaatctaccccacactcccaacccacattccttcaacccagccagcttccttctttcacacatcctccctcaagctcagagcaaggacttggttcagacagacctgggttcacatcccggctccaccctctcctagctctgtctccatctttctgcaccttgggttccccctttcccacaggtagttgtgaggctaaatgagccagtatagtccacgtgctccgcacggtgcccggagcatggtaaatggctggctaatggtggcagcggccactgtcattcctgccaggggaaaagtgccgttgagcgctgcctgtgcaggtgtcttgggcacggggacccaagtgacagggcttgggtatttcggcaggcctttatcctgcttccccatggcatggagctcctgggcccggcgccccttccctgcctgcccacccgggtggcctttcctcttggcagccaggccccaggggcctgaagccagagtccagggggaggaggacacgtgcctgccccggcccctcgggagtccgtggctgttttgtag

SEQ ID NO: 607 - DNA, 845 bp, Homo sapiens
gtgaggatgcagcacccttgggcaggtggcttctcctctcccttgaggccatctcatgccttcttgcctggcctgggttccgtttgaagagagacagctgcagctccctctaggctctgtgccccctgctcaagcctggccatgccagctcccctgtgcttccctgtccacctcctgttctccccgcagtccacctggcgcccgctcacagcccccggccccggcctcagccctcagcctggcctcccttgctccttgccctcccctaggcaagccccacacctctgtgcccaggtggctctgcctttaccccaggcctggccccagagctgactcttactctagaaacctctgccctttctggaaccaggctgtagttctccagcaaatctaccccacactcccaacccacattccttcaacccagccagcttccttctttcacacatcctccctcaagctcagagcaaggacttggttcagacagacctgggttcacatcccggctccaccctctcctagctctgtctccatctttctgcaccttgggttccccctttcccacaggtagttgtgaggctaaatgagccagtatagtccacgtgctccgcacggtgcccggagcatggtaaatggctggctaatggtggcagcggccactgtcattcctgccaggggaaaagtgccgttgagcgctgcctgtgcaggtgtcttgggcacggggacccaagtgacagggcttgggtatttcggcaggcctttatcctgcttccccatggcatggagctcctgggcccggcgccccttccctgcctgcccacccgggtggcctttcctcttggcag

SEQ ID NO: 608 - DNA, 140 bp, Homo sapiens
ccctgccctggctcaacgtgtcagcagatggtgacaacgtgcatctggttctgaatgtctctgaggagcagcacttcggcctctccctgtactggaatcaggtccagggccccccaaaaccccggtggcacaaaaacctg

SEQ ID NO: 609 - DNA, 257 bp, Homo sapiens
ccctgccctggctcaacgtgtcagcagatggtgacaacgtgcatctggttctgaatgtctctgaggagcagcacttcggcctctccctgtactggaatcaggtccagggccccccaaaaccccggtggcacaaaaacctggtgaggcctcccccttcccaagtccattcccactgtaggccgatgcctgtgcaaaggacgcagtgccatatcagagaggatccttgaagaggactcaccccaagcaagggaaaattg

SEQ ID NO: 610 - DNA, 211 bp, Homo sapiens
gtgaggcctcccccttcccaagtccattcccactgtaggccgatgcctgtgcaaaggacgcagtgccatatcagagaggatccttgaagaggactcaccccaagcaagggaaaattggtgggggaacttctgccttcctggtttccttgactttggcctcctcctcttcctccttatcttctccaacctccttcctttatttgttccacag

SEQ ID NO: 611 - DNA, 94 bp, Homo sapiens
gtgggggaacttctgccttcctggtttccttgactttggcctcctcctcttcctccttatcttctccaacctccttcctttatttgttccacag

SEQ ID NO: 612 - DNA, 88 bp, Homo sapiens
gtgatgacgccaaggattgaactggtggtggctccagcaggtgtgacgttgaaagaggcaaatgagatcctgcagcgtagcaagaaag

SEQ ID NO: 613 - DNA, 48 bp, Homo sapiens
gtgatgacgccaaggattgaactggtggtggctccagcaggtgtgacg

SEQ ID NO: 614 - DNA, 110 bp, Homo sapiens
gcaaatgttcctggccccacaggtgatgacgccaaggattgaactggtggtggctccagcaggtgtgacgttgaaagaggcaaatgagatcctgcagcgtagcaagaaag

SEQ ID NO: 615 - DNA, 70 bp, Homo sapiens
gcaaatgttcctggccccacaggtgatgacgccaaggattgaactggtggtggctccagcaggtgtgacg

SEQ ID NO: 616 - DNA, 150 bp, Homo sapiens
gtacctgcagggcaggggaagcagggctgggtgtagagaggaccctcacgctggggcctcagactggtgcctgtgaccagggaccagagggaggcctggctccttctctctcacctgccaacctgcaggcaaatgttcctggccccacag

SEQ ID NO: 617 - DNA, 128 bp, Homo sapiens
gtacctgcagggcaggggaagcagggctgggtgtagagaggaccctcacgctggggcctcagactggtgcctgtgaccagggaccagagggaggcctggctccttctctctcacctgccaacctgcag

SEQ ID NO: 618 - DNA, 111 bp, Homo sapiens
aaacagccagagaacattctaaaggccaatctgcttgtgtccacttcagacccaatgaaggcagtgatggaagcaggcatccaggagttccctctgttgagaagtccagag

SEQ ID NO: 619 - DNA, 548 bp, Homo sapiens
aaacagccagagaacattctaaaggccaatctgcttgtgtccacttcagacccaatgaaggcagtgatggaagcaggcatccaggagttccctctgttgagaagtccagaggtgagacagctggcgatgagcggtgtgcaaaggggaaaggcttcgtgaagcagccctcctgtatcagggtggctgggcctgatgagaaaggagaggactccaggcgggcagctgcaagccttccaccgcacgatagccactggaagcccagcaggcggcatgacacagaacccaaggccaaatgtgccccccagaaaaggcgcactcaagagctcagaggaggaaggtgctctccggctggttctagccgccctggcagtgcccggggggaggcggtccatgctgggcagaatcctccccaccatcgtacaccaagaaacaaagtgacacaagccaagctcacaggagggctctattcacatttgccacagagcacagaggagttgaggtcaggagctaggaggctggagacatctaccctgtccgaggactttcag

SEQ ID NO: 620 - DNA, 510 bp, Homo sapiens
gtgagacagctggcgatgagcggtgtgcaaaggggaaaggcttcgtgaagcagccctcctgtatcagggtggctgggcctgatgagaaaggagaggactccaggcgggcagctgcaagccttccaccgcacgatagccactggaagcccagcaggcggcatgacacagaacccaaggccaaatgtgccccccagaaaaggcgcactcaagagctcagaggaggaaggtgctctccggctggttctagccgccctggcagtgcccggggggaggcggtccatgctgggcagaatcctccccaccatcgtacaccaagaaacaaagtgacacaagccaagctcacaggagggctctattcacatttgccacagagcacagaggagttgaggtcaggagctaggaggctggagacatctaccctgtccgaggactttcaggtatctaaggagactgatccagcacctggtcccctctctgggcagagtgtgaatattgaccttctccccgtag

SEQ ID NO: 621 - DNA, 73 bp, Homo sapiens
gtatctaaggagactgatccagcacctggtcccctctctgggcagagtgtgaatattgaccttctccccgtag

SEQ ID NO: 622 - DNA, 381 bp, Homo sapiens
agtgggagttcgaggtgacagccttctaccggggccgccaagtcttccagcagaccatctcctgcccggagggcctgcggctggtggggtccgaagtgggagacaggacgctgcctggatggccagtcacactgccagaccctggcatgtccctgacagacaggggagtgatgagctacgtgaggcatgtgctgagctgcctgggtgggggactggctctctggcgggccgggcagtggctctgggcccagcggctggggcactgccacacatactgggcagtgagcgaggagctgctccccaacagcgggcatgggcctgatggcgaggtccccaaggacaaggaaggaggcgtgtttgacctggggcccttcattgtag

SEQ ID NO: 623 - DNA, 879 bp, Homo sapiens
agtgggagttcgaggtgacagccttctaccggggccgccaagtcttccagcagaccatctcctgcccggagggcctgcggctggtggggtccgaagtgggagacaggacgctgcctggatggccagtcacactgccagaccctggcatgtccctgacagacaggggagtgatgagctacgtgaggcatgtgctgagctgcctgggtgggggactggctctctggcgggccgggcagtggctctgggcccagcggctggggcactgccacacatactgggcagtgagcgaggagctgctccccaacagcgggcatgggcctgatggcgaggtccccaaggacaaggaaggaggcgtgtttgacctggggcccttcattgtaggtgagtgagacaggggcttcgacctggccagtacaaagcagcctgcacagtggttaacaactcaggattggccgggcacggtggctcacgcctgtagtcccagcactttgggaggctgaggtgggcagatgacaagttcaggagttcgagaccagcctggtcaacatagtgaaaccccatctctactaaagatacaaaaaaatagtcgggcgtggtggcacgtgcctgtaatcccagctactcgggaggctgaggcaggagaattgcttgaacccaggaggcggagattgcagtgagctgagatcgcaccactgcactctagcctggtgacagagtaagactccatctcgaacaacaaaaaaaaaagaactcatgattaggactgaattcagacgctggctgcccttggcccgctgtataaccgaggcaaaggactttgccctgagcccgtggaatccaaggatggtctcctctctctacctgcctgccagcgctggg

SEQ ID NO: 624 - DNA, 1119 bp, Homo sapiens
gtgagtgagacaggggcttcgacctggccagtacaaagcagcctgcacagtggttaacaactcaggattggccgggcacggtggctcacgcctgtagtcccagcactttgggaggctgaggtgggcagatgacaagttcaggagttcgagaccagcctggtcaacatagtgaaaccccatctctactaaagatacaaaaaaatagtcgggcgtggtggcacgtgcctgtaatcccagctactcgggaggctgaggcaggagaattgcttgaacccaggaggcggagattgcagtgagctgagatcgcaccactgcactctagcctggtgacagagtaagactccatctcgaacaacaaaaaaaaaagaactcatgattaggactgaattcagacgctggctgcccttggcccgctgtataaccgaggcaaaggactttgccctgagcccgtggaatccaaggatggtctcctctctctacctgcctgccagcgctggggtgagacacaggcccagtacacagagcctgctcagggaattagctgccactgtcatcatcatcgtaactaatgatggtgaacagaccaatagcaggaaagctacatcccttagggtttcgctgtgcagtggcactttctgccatgatggaaatgacagtcacctgcactgtccggtgcagcagccactagccacaggggccaagcactcaggtgaggcgagtgcaaccaggacgtgattcgttttaattggttacaatttaaactgaaataaccttacatgactaatggctgcaattggacaatgcagcctcagacaggactgaatgccaaccagcttctccagattcactgagcatccttgggagcatgggccccctactctgggcctgttatgaatgctgaggcttgggggcttgggggtgtggccttccaacaaccccaccctgatgggagggagggagggagggaaggaggggactttccccaaacaagcagtcccctggtcgaggcagcagagggccttaggtcaggggaggtggtgggggttatcattcaagtttacggggaagggtgggtagagggtcctcttctcatccctgactaggctcctgggcccccag

SEQ ID NO: 625 - DNA, 1103 bp, Homo sapiens
gtgagtgagacaggggcttcgacctggccagtacaaagcagcctgcacagtggttaacaactcaggattggccgggcacggtggctcacgcctgtagtcccagcactttgggaggctgaggtgggcagatgacaagttcaggagttcgagaccagcctggtcaacatagtgaaaccccatctctactaaagatacaaaaaaatagtcgggcgtggtggcacgtgcctgtaatcccagctactcgggaggctgaggcaggagaattgcttgaacccaggaggcggagattgcagtgagctgagatcgcaccactgcactctagcctggtgacagagtaagactccatctcgaacaacaaaaaaaaaagaactcatgattaggactgaattcagacgctggctgcccttggcccgctgtataaccgaggcaaaggactttgccctgagcccgtggaatccaaggatggtctcctctctctacctgcctgccagcgctggggtgagacacaggcccagtacacagagcctgctcagggaattagctgccactgtcatcatcatcgtaactaatgatggtgaacagaccaatagcaggaaagctacatcccttagggtttcgctgtgcagtggcactttctgccatgatggaaatgacagtcacctgcactgtccggtgcagcagccactagccacaggggccaagcactcaggtgaggcgagtgcaaccaggacgtgattcgttttaattggttacaatttaaactgaaataaccttacatgactaatggctgcaattggacaatgcagcctcagacaggactgaatgccaaccagcttctccagattcactgagcatccttgggagcatgggccccctactctgggcctgttatgaatgctgaggcttgggggcttgggggtgtggccttccaacaaccccaccctgatgggagggagggagggagggaaggaggggactttccccaaacaagcagtcccctggtcgaggcagcagagggccttaggtcaggggaggtggtgggggttatcattcaagtttacggggaagggtgggtagagggtcctcttctcatccctgactag

SEQ ID NO: 626 - DNA, 621 bp, Homo sapiens
gtgagacacaggcccagtacacagagcctgctcagggaattagctgccactgtcatcatcatcgtaactaatgatggtgaacagaccaatagcaggaaagctacatcccttagggtttcgctgtgcagtggcactttctgccatgatggaaatgacagtcacctgcactgtccggtgcagcagccactagccacaggggccaagcactcaggtgaggcgagtgcaaccaggacgtgattcgttttaattggttacaatttaaactgaaataaccttacatgactaatggctgcaattggacaatgcagcctcagacaggactgaatgccaaccagcttctccagattcactgagcatccttgggagcatgggccccctactctgggcctgttatgaatgctgaggcttgggggcttgggggtgtggccttccaacaaccccaccctgatgggagggagggagggagggaaggaggggactttccccaaacaagcagtcccctggtcgaggcagcagagggccttaggtcaggggaggtggtgggggttatcattcaagtttacggggaagggtgggtagagggtcctcttctcatccctgactaggctcctgggcccccag

SEQ ID NO: 627 - DNA, 605 bp, Homo sapiens
gtgagacacaggcccagtacacagagcctgctcagggaattagctgccactgtcatcatcatcgtaactaatgatggtgaacagaccaatagcaggaaagctacatcccttagggtttcgctgtgcagtggcactttctgccatgatggaaatgacagtcacctgcactgtccggtgcagcagccactagccacaggggccaagcactcaggtgaggcgagtgcaaccaggacgtgattcgttttaattggttacaatttaaactgaaataaccttacatgactaatggctgcaattggacaatgcagcctcagacaggactgaatgccaaccagcttctccagattcactgagcatccttgggagcatgggccccctactctgggcctgttatgaatgctgaggcttgggggcttgggggtgtggccttccaacaaccccaccctgatgggagggagggagggagggaaggaggggactttccccaaacaagcagtcccctggtcgaggcagcagagggccttaggtcaggggaggtggtgggggttatcattcaagtttacggggaagggtgggtagagggtcctcttctcatccctgactag

SEQ ID NO: 628 - DNA, 81 bp, Homo sapiens
taagaaggcttctcttatgtgaagaattggagcgttcctcttgtggcagtgtcctttttcatggttacttgcccccaccag

SEQ ID NO: 629 - DNA, 153 bp, Homo sapiens
agaaaataaaaatggagtactgtttttctgtttgcatgtactcttgacaagtttgctttgaaatgtttttagtaagaaggcttctcttatgtgaagaattggagcgttcctcttgtggcagtgtcctttttcatggttacttgcccccaccag

SEQ ID NO: 630 - DNA, 272 bp, Homo sapiens
gtatgtgctcttttaatatttggtgtttatgatttgactcatgtatgaaagttgccctaaatgaaatgtgtttatatcaggtcctaatttttgatggacttgttcagtgcttagtttttgtggattttcatagtaaaaagatgttgtcaactctgacttaattaaaattttccttttctttccttatcctcttgaactagagaaaataaaaatggagtactgtttttctgtttgcatgtactcttgacaagtttgctttgaaatgtttttag

SEQ ID NO: 631 - DNA, 200 bp, Homo sapiens
gtatgtgctcttttaatatttggtgtttatgatttgactcatgtatgaaagttgccctaaatgaaatgtgtttatatcaggtcctaatttttgatggacttgttcagtgcttagtttttgtggattttcatagtaaaaagatgttgtcaactctgacttaattaaaattttccttttctttccttatcctcttgaactag

SEQ ID NO: 632 - DNA, 160 bp, Homo sapiens
gttgccacatgaacatcttccagcatcttgcgttctcagatgtggatgttgccagggttctcactccagatgcttttgtgtgtcggaccatctgcacctatcaccccaactgcctcttctttacattctatacaaatgtatggaaaatcgagtcacaaag

SEQ ID NO: 633 - DNA, 191 bp, Homo sapiens
gttgccacatgaacatcttccagcatcttgcgttctcagatgtggatgttgccagggttctcactccagatgcttttgtgtgtcggaccatctgcacctatcaccccaactgcctcttctttacattctatacaaatgtatggaaaatcgagtcacaaaggcgagtatgcatggaaaatcgcatcacaaag

SEQ ID NO: 634 - DNA, 816 bp, Homo sapiens
gcgagtatgcatggaaaatcgcatcacaaaggcgagtatgcatggggagcacttgctgctgtactttcatcacttttatagtctgagttcttaaaagtttcgttcatttccctcaaaacacttgaacctgcagtttcagtaggtactgttctgccaggtgcagattagttaagagattagcagacttctctgcctatcttctcttactttaaaacaaatgttaccattgaatcaaggaagcaatagccatgagaaaaaagaaggatctgacgcctttgaatgaagattcaaaacatgatcttcatgttttgtattagcttggagtaaaatccacttgctggcaatatagcccttaagcttgttgcctcttctctttgtttcagaaactagagccctgtttattctgatcaaggctctggcccactgtctttatctcagataacccaccctcttctgcacacagcatggagctaagagaagggtgtctagttatgtaatatcatcggcagcataaattcccagaatttgttctttgatttttttgtttgtttttccagttagaaggtggaacttcatcattgtcctcttttcaggttgtctgtgcctattagttttctccagagggagaggtggcttgatttacatttaatctctgcaatttattagagtcctgtagttggatttactttgaagagagtttcccagaagaataaaatttgctgcgttgctttttgggtgtgagctgcttttgtatttgcctaatgcctttaatgcaaatttctttctttctctcttgcttttttttaaaaaaaatag

SEQ ID NO: 635 - DNA, 785 bp, Homo sapiens
gcgagtatgcatggggagcacttgctgctgtactttcatcacttttatagtctgagttcttaaaagtttcgttcatttccctcaaaacacttgaacctgcagtttcagtaggtactgttctgccaggtgcagattagttaagagattagcagacttctctgcctatcttctcttactttaaaacaaatgttaccattgaatcaaggaagcaatagccatgagaaaaaagaaggatctgacgcctttgaatgaagattcaaaacatgatcttcatgttttgtattagcttggagtaaaatccacttgctggcaatatagcccttaagcttgttgcctcttctctttgtttcagaaactagagccctgtttattctgatcaaggctctggcccactgtctttatctcagataacccaccctcttctgcacacagcatggagctaagagaagggtgtctagttatgtaatatcatcggcagcataaattcccagaatttgttctttgatttttttgtttgtttttccagttagaaggtggaacttcatcattgtcctcttttcaggttgtctgtgcctattagttttctccagagggagaggtggcttgatttacatttaatctctgcaatttattagagtcctgtagttggatttactttgaagagagtttcccagaagaataaaatttgctgcgttgctttttgggtgtgagctgcttttgtatttgcctaatgcctttaatgcaaatttctttctttctctcttgcttttttttaaaaaaaatag

SEQ ID NO: 636 - DNA, 77 bp, Homo sapiens
ccagcctccctggcatgtgggaacggaccctgaccatcggcagcgccggcaagaccttcagcgccactggctggaag

SEQ ID NO: 637 - DNA, 65 bp, Homo sapiens
ccagcctccctggcatgtgggaacggaccctgaccatcggcagcgccggcaagaccttcagcgcc

SEQ ID NO: 638 - DNA, 109 bp, Homo sapiens
tctcagcagctgttctgttcggccttgggcagccagcctccctggcatgtgggaacggaccctgaccatcggcagcgccggcaagaccttcagcgccactggctggaag

SEQ ID NO: 639 - DNA, 97 bp, Homo sapiens
tctcagcagctgttctgttcggccttgggcagccagcctccctggcatgtgggaacggaccctgaccatcggcagcgccggcaagaccttcagcgcc

SEQ ID NO: 640 - DNA, 728 bp, Homo sapiens
gtgagccaagccagcctggggcccctcccctgcacattggtgggagggccttgaccccacctgagagtcagcgcaggcctggtagttagaacccagggttatggagccctgcagatcctgtgacctttgcctcccagagtacacagtgtcacagtagcacctgcctccctggttgtcgaaaggatgaggtcaaagaaatcctatgccgagcatggtgggtcacacctgtaatcccagcactttgggaggctgaggctggcagatcacttgaggtcaggagtttgagaccagcctggccaacatggtgaaaccctgtctgtactaaaagtacaaaaattagctgggcatggtggcacgtgcctgtagtcccagctactcaggaagctgaggtaggaggatcactggaacctgggaggcggaggttgcagtgaggcaagatggcgccattgcattcctgcctgggcaacagagcgagactccatctcaaaaaaaaaaaaaacaaagaaagaaatggggggtggagggagggagggagagagagagagagagaaagaaggaaggaaggaaaggaaaggaagaaagaaagaaaaaaaattgtgcaaataacttagtatgtagaggaatccagggtgtcaaaagcctatgcgtgtcccctggggcccagaccaccatcctcccccgtccccctcaccccagtctcagcagctgttctgttcggccttgggcag

SEQ ID NO: 641 - DNA, 696 bp, Homo sapiens
gtgagccaagccagcctggggcccctcccctgcacattggtgggagggccttgaccccacctgagagtcagcgcaggcctggtagttagaacccagggttatggagccctgcagatcctgtgacctttgcctcccagagtacacagtgtcacagtagcacctgcctccctggttgtcgaaaggatgaggtcaaagaaatcctatgccgagcatggtgggtcacacctgtaatcccagcactttgggaggctgaggctggcagatcacttgaggtcaggagtttgagaccagcctggccaacatggtgaaaccctgtctgtactaaaagtacaaaaattagctgggcatggtggcacgtgcctgtagtcccagctactcaggaagctgaggtaggaggatcactggaacctgggaggcggaggttgcagtgaggcaagatggcgccattgcattcctgcctgggcaacagagcgagactccatctcaaaaaaaaaaaaaacaaagaaagaaatggggggtggagggagggagggagagagagagagagagaaagaaggaaggaaggaaaggaaaggaagaaagaaagaaaaaaaattgtgcaaataacttagtatgtagaggaatccagggtgtcaaaagcctatgcgtgtcccctggggcccagaccaccatcctcccccgtccccctcaccccag

SEQ ID NO: 642 - DNA, 200 bp, Homo sapiens
gaatgaagctgcagtttccccggcccaaggaccaggcggcattgcagaggaaggcagactccgtcagtgacagactccttgcagacacgagaaagaagaccaagcaggcggagaggatgctgggaaacgcggcccctctttcctccagtgccaagaagaagggcagagaagcagaggtgttggccaaggacagtgccaag

SEQ ID NO: 643 - DNA, 116 bp, Homo sapiens
acacgagaaagaagaccaagcaggcggagaggatgctgggaaacgcggcccctctttcctccagtgccaagaagaagggcagagaagcagaggtgttggccaaggacagtgccaag

SEQ ID NO: 644 - DNA, 348 bp, Homo sapiens
gaatgaagctgcagtttccccggcccaaggaccaggcggcattgcagaggaaggcagactccgtcagtgacagactccttgcagacacgagaaagaagaccaagcaggcggagaggatgctgggaaacgcggcccctctttcctccagtgccaagaagaagggcagagaagcagaggtgttggccaaggacagtgccaaggtcagggtggtggctgtgacaacagtggcctccttccctcccggggggaccgcccttccgcgggccccttcccgacatccgtgctgactactccgcactcactcactgctcagtgggcccaggcaattagctcagagacttcacgggg

SEQ ID NO: 645 - DNA, 264 bp, Homo sapiens
acacgagaaagaagaccaagcaggcggagaggatgctgggaaacgcggcccctctttcctccagtgccaagaagaagggcagagaagcagaggtgttggccaaggacagtgccaaggtcagggtggtggctgtgacaacagtggcctccttccctcccggggggaccgcccttccgcgggccccttcccgacatccgtgctgactactccgcactcactcactgctcagtgggcccaggcaattagctcagagacttcacgggg

SEQ ID NO: 646 - DNA, 1752 bp, Homo sapiens
gtcagggtggtggctgtgacaacagtggcctccttccctcccggggggaccgcccttccgcgggccccttcccgacatccgtgctgactactccgcactcactcactgctcagtgggcccaggcaattagctcagagacttcacgggggtgagtctgtgggttcctcacgaaataggtgtcattgctgtccccattgtacaggtgagaatgctgaggtgcagccagcttcatgaacttaaccaggacttacacctgggtctgctggctttcctgcctaaacttctaggtttttcttttcttttttgttattttgaagtttgcgtttatttattttacctgcctttttgttttcaatttttttcttaattttttcagacagattcttactctgtggcccaggctggagtgcagtggcgcaatctcagctcactgcaatctccgcctcctgggttcaagtgactctcctgcctcagattccagagtggctgggattataggcgtgctccaccacacctggctaatttttgtatttttagtagagcggggtttcaccatgttggccaggctggtctcgaacttctgatctcagatgatccacctaccttggcctcccaaagtgctgggattacaggtgtgagccactgcacccagcttaagggtttttggttttgttttttttttttgcttgtttgtttgttttttgtagagacagggtctctgtcgcccaggctggagtacagtagcacaatcacagctcactgcagcctcaaacccttgggcttaagtgatcttcctgcctcagcctcctgagtaactgggactacaggtgtgtgccactgtgcctggctaacttttttttttttgcagagatgaggagtctcggccaggtgtggtggctaactcctgtaatcccagcactttgggaggccaaggcaggcagatcacttgaggtcaggagttcgagaccagtctggtcaacatggtgaaaccctgtctctactaaaaatacaaaaaaattagccgggcatggtggctcgcacctgtagtcctaactactccagaggctgagacacaagaattgcttgaacctgggaggtggaggttgcagtcagccaaactgcaccactgcactccagcctgggcaacagagggagactctgcctcgaaaaaaaaaaagaaaaaaaagattggggtctcactatgttgcccaggctggtcttgaacctctggtctcaagcaagcctcctgcctcagcctcccaaagtgctgggaccataggcatgagccactgcacccagccctggctgattttaactaggcttttaaaaaattggtgccaaattctaatcagtgcctatctccccagctctgctgctggttctgttgctcacacaccaaggaaactgtctttatggtgcctaggaaaagtgctgggtttgcagtaggggtccccgggcttgatctcttgtcatgcccctcgggctttggccagcccctcctcccctctgtgcctctgtttcctcacctgtaaaatagttagaattgctcctcctgaaacgggtggtatccagcagtctacactgtgcccagcacttagcctgcattcagtacatatttgttgcgtgcatgaatgaatgaatgatctgcctggtacagacaactgcttggcatcattgccataagagctatttacctccaaaaggacttgctgcactcacttcttctccctgccactgccacccatcccatag

SEQ ID NO: 647 - DNA, 1604 bp, Homo sapiens
gtgagtctgtgggttcctcacgaaataggtgtcattgctgtccccattgtacaggtgagaatgctgaggtgcagccagcttcatgaacttaaccaggacttacacctgggtctgctggctttcctgcctaaacttctaggtttttcttttcttttttgttattttgaagtttgcgtttatttattttacctgcctttttgttttcaatttttttcttaattttttcagacagattcttactctgtggcccaggctggagtgcagtggcgcaatctcagctcactgcaatctccgcctcctgggttcaagtgactctcctgcctcagattccagagtggctgggattataggcgtgctccaccacacctggctaatttttgtatttttagtagagcggggtttcaccatgttggccaggctggtctcgaacttctgatctcagatgatccacctaccttggcctcccaaagtgctgggattacaggtgtgagccactgcacccagcttaagggtttttggttttgttttttttttttgcttgtttgtttgttttttgtagagacagggtctctgtcgcccaggctggagtacagtagcacaatcacagctcactgcagcctcaaacccttgggcttaagtgatcttcctgcctcagcctcctgagtaactgggactacaggtgtgtgccactgtgcctggctaacttttttttttttgcagagatgaggagtctcggccaggtgtggtggctaactcctgtaatcccagcactttgggaggccaaggcaggcagatcacttgaggtcaggagttcgagaccagtctggtcaacatggtgaaaccctgtctctactaaaaatacaaaaaaattagccgggcatggtggctcgcacctgtagtcctaactactccagaggctgagacacaagaattgcttgaacctgggaggtggaggttgcagtcagccaaactgcaccactgcactccagcctgggcaacagagggagactctgcctcgaaaaaaaaaaagaaaaaaaagattggggtctcactatgttgcccaggctggtcttgaacctctggtctcaagcaagcctcctgcctcagcctcccaaagtgctgggaccataggcatgagccactgcacccagccctggctgattttaactaggcttttaaaaaattggtgccaaattctaatcagtgcctatctccccagctctgctgctggttctgttgctcacacaccaaggaaactgtctttatggtgcctaggaaaagtgctgggtttgcagtaggggtccccgggcttgatctcttgtcatgcccctcgggctttggccagcccctcctcccctctgtgcctctgtttcctcacctgtaaaatagttagaattgctcctcctgaaacgggtggtatccagcagtctacactgtgcccagcacttagcctgcattcagtacatatttgttgcgtgcatgaatgaatgaatgatctgcctggtacagacaactgcttggcatcattgccataagagctatttacctccaaaaggacttgctgcactcacttcttctccctgccactgccacccatcccatag

SEQ ID NO: 648 - DNA, 188 bp, Homo sapiens
cttacattttattatggtactatagatccttggtgtccaaaagagtactatgaagacattaagaaggattttccagaaggagacattcgactctgtgagaaaaacatacctcatgctttcatcacccattttaaccaggaaatggcagacatgattgctgactccctaaaggatgacttgtccaaaat

SEQ ID NO: 649 - DNA, 257 bp, Homo sapiens
cttacattttattatggtactatagatccttggtgtccaaaagagtactatgaagacattaagaaggattttccagaaggagacattcgactctgtgagaaaaacatacctcatgctttcatcacccattttaaccaggaaatggcagacatgattgctgactccctaaaggatgacttgtccaaaatgtaaattggcctgaggaacaagcccccactgccagtacatggaggcagtcagtgtactagacttagtag

SEQ ID NO: 650 - DNA, 1249 bp, Homo sapiens
gtaaattggcctgaggaacaagcccccactgccagtacatggaggcagtcagtgtactagacttagtaggtaaatgtttaattttgaagactgatattagaaatgaagaaagtgagaacctttgtcttacaaaccaactctccgctcgccatgttataggctgaagtaaacacagttgatgaatcattccataggtttaaccatacattttccaagactcagggaacacagtgatctacacagagtcttgtgtttgcacaagatgcccagtggcaccatatggtttattttggtaggcaggatctttgcagatgaaaaaaaaatctacatgtacttgattttaattgagttacattgtagaataggctcctctggaggaaattatgaaatacctactagaaaatgtaaaataaatcagtgaatgttaagagtatagttagatatgtgaagtgtatgagattatgacaaggatacactcatgttccaggagcaggaagtgaacctgggtctcctgtaagacagaagatgaagatgagcccaggctaacttagcacagatcttggctgagatcatcaatgtgacgtctaatgtacctgcactagacagagaataaagttcaccagacattactctggtcagctaaccagataaagaattgttgaaggaccccaactgtgcctcctgccacaggacaaccagcaagttctatgctgagccttagcctcccaggttataagctccctgcaggctcctcctctccagagccaggatggagaggcactgggctgtcccaaagcaggcttggatgtgccaacgtacagttgctccttctgtaattcttgcactaaaactccattaaagaccatcaatgagccaaatagtgtgctagccattgaggatggagttcttagctacttaatgattcttttcttctggaaatcttctagtgaataatttttaaaagcttcttttaaactgctcagtaaaacattgccatacattaactctccatttctgcattaacttcatttgctggaaagaaattattttgttaatgaaccaaacccagccattaagttatgtgaattcaccttctctagacacattgaggtatggcagagaagacacatattccctggcctagagtgggctgacaatattgctgcctcccctaaattgactcaatcttgagaaccacatactgcagtgacagttgatcatggatcagaaatattcctttttctcctag

SEQ ID NO: 651 - DNA, 1180 bp, Homo sapiens
gtaaatgtttaattttgaagactgatattagaaatgaagaaagtgagaacctttgtcttacaaaccaactctccgctcgccatgttataggctgaagtaaacacagttgatgaatcattccataggtttaaccatacattttccaagactcagggaacacagtgatctacacagagtcttgtgtttgcacaagatgcccagtggcaccatatggtttattttggtaggcaggatctttgcagatgaaaaaaaaatctacatgtacttgattttaattgagttacattgtagaataggctcctctggaggaaattatgaaatacctactagaaaatgtaaaataaatcagtgaatgttaagagtatagttagatatgtgaagtgtatgagattatgacaaggatacactcatgttccaggagcaggaagtgaacctgggtctcctgtaagacagaagatgaagatgagcccaggctaacttagcacagatcttggctgagatcatcaatgtgacgtctaatgtacctgcactagacagagaataaagttcaccagacattactctggtcagctaaccagataaagaattgttgaaggaccccaactgtgcctcctgccacaggacaaccagcaagttctatgctgagccttagcctcccaggttataagctccctgcaggctcctcctctccagagccaggatggagaggcactgggctgtcccaaagcaggcttggatgtgccaacgtacagttgctccttctgtaattcttgcactaaaactccattaaagaccatcaatgagccaaatagtgtgctagccattgaggatggagttcttagctacttaatgattcttttcttctggaaatcttctagtgaataatttttaaaagcttcttttaaactgctcagtaaaacattgccatacattaactctccatttctgcattaacttcatttgctggaaagaaattattttgttaatgaaccaaacccagccattaagttatgtgaattcaccttctctagacacattgaggtatggcagagaagacacatattccctggcctagagtgggctgacaatattgctgcctcccctaaattgactcaatcttgagaaccacatactgcagtgacagttgatcatggatcagaaatattcctttttctcctag

SEQ ID NO: 652 - DNA, 89 bp, Homo sapiens
gcgctcggctggcggctgcagcagcagagggagacccgcggcaaccccggcaacccagggctcggcgtcgctgccaccatgacgggaag

SEQ ID NO: 653 - DNA, 177 bp, Homo sapiens
gccacccccgcccacccctctcgcgggcggagcggctcttggccttttttgggcgtctccctgctccgcggcccgggctggcgggcgggcgctcggctggcggctgcagcagcagagggagacccgcggcaaccccggcaacccagggctcggcgtcgctgccaccatgacgggaag

SEQ ID NO: 654 - DNA, 273 bp, Homo sapiens
ctatactcccgcaacctcccaccgtcacctccccaacacccccaccaccctcagccttgacctccccatcccaccccgccccgcgggccccaccctgccacccccgcccacccctctcgcgggcggagcggctcttggccttttttgggcgtctccctgctccgcggcccgggctggcgggcgggcgctcggctggcggctgcagcagcagagggagacccgcggcaaccccggcaacccagggctcggcgtcgctgccaccatgacgggaag

SEQ ID NO: 655 - DNA, 482 bp, Homo sapiens
gcgctcggctggcggctgcagcagcagagggagacccgcggcaaccccggcaacccagggctcggcgtcgctgccaccatgacgggaaggtaacggcccccacccacgcccccgggccggggaggcgggactgcgggacccctggccgaggcgcagctcgccctcgtacagccccgcggcgccacgatccccgctccgccctggcgcgtcggattctcgcagctgccggggcggcagcgcccgtcggggcaggggtcccccagcccccgcgcctcttcctctgggcgagcgcctgcagcggaaggtggagctcctgcccacccgcccgctgcaagatgggacagccgtctgctcacaaccgacgcccagggctgcgggagggggtcttgtccaaggtcagacaccaaccacgggcaaaaggttcaaaggttgcgtgcctcccccaacttccccgagcccgcgctgtgcgatccccgatcccg

SEQ ID NO: 656 - DNA, 570 bp, Homo sapiens
gccacccccgcccacccctctcgcgggcggagcggctcttggccttttttgggcgtctccctgctccgcggcccgggctggcgggcgggcgctcggctggcggctgcagcagcagagggagacccgcggcaaccccggcaacccagggctcggcgtcgctgccaccatgacgggaaggtaacggcccccacccacgcccccgggccggggaggcgggactgcgggacccctggccgaggcgcagctcgccctcgtacagccccgcggcgccacgatccccgctccgccctggcgcgtcggattctcgcagctgccggggcggcagcgcccgtcggggcaggggtcccccagcccccgcgcctcttcctctgggcgagcgcctgcagcggaaggtggagctcctgcccacccgcccgctgcaagatgggacagccgtctgctcacaaccgacgcccagggctgcgggagggggtcttgtccaaggtcagacaccaaccacgggcaaaaggttcaaaggttgcgtgcctcccccaacttccccgagcccgcgctgtgcgatccccgatcccg

SEQ ID NO: 657 - DNA, 666 bp, Homo sapiens
ctatactcccgcaacctcccaccgtcacctccccaacacccccaccaccctcagccttgacctccccatcccaccccgccccgcgggccccaccctgccacccccgcccacccctctcgcgggcggagcggctcttggccttttttgggcgtctccctgctccgcggcccgggctggcgggcgggcgctcggctggcggctgcagcagcagagggagacccgcggcaaccccggcaacccagggctcggcgtcgctgccaccatgacgggaaggtaacggcccccacccacgcccccgggccggggaggcgggactgcgggacccctggccgaggcgcagctcgccctcgtacagccccgcggcgccacgatccccgctccgccctggcgcgtcggattctcgcagctgccggggcggcagcgcccgtcggggcaggggtcccccagcccccgcgcctcttcctctgggcgagcgcctgcagcggaaggtggagctcctgcccacccgcccgctgcaagatgggacagccgtctgctcacaaccgacgcccagggctgcgggagggggtcttgtccaaggtcagacaccaaccacgggcaaaaggttcaaaggttgcgtgcctcccccaacttccccgagcccgcgctgtgcgatccccgatcccg

SEQ ID NO: 658 - DNA, 1270 bp, Homo sapiens
gtaacggcccccacccacgcccccgggccggggaggcgggactgcgggacccctggccgaggcgcagctcgccctcgtacagccccgcggcgccacgatccccgctccgccctggcgcgtcggattctcgcagctgccggggcggcagcgcccgtcggggcaggggtcccccagcccccgcgcctcttcctctgggcgagcgcctgcagcggaaggtggagctcctgcccacccgcccgctgcaagatgggacagccgtctgctcacaaccgacgcccagggctgcgggagggggtcttgtccaaggtcagacaccaaccacgggcaaaaggttcaaaggttgcgtgcctcccccaacttccccgagcccgcgctgtgcgatccccgatcccggtgagtgtcatctctggagccttccgtttcctcctctgtaaacctggggtggtaaaaatgttaaaaatgttgaagggtatgttggaacttggccagagctgcgcccaagcaccagctgtgcaggggttggttggggacagggcgctcccctgggcctggcccaccctctgctctcaggcccctcgttgccatttcacagatgaggtcaccagaggccacagaggctgagccactcaggaggccagtcacaggtccaccagtgtccggccagtgtttgtccctgcagccctttctggaacctagctgggtacaagtgcatgactcaggactgggtgggagggggctgtccctgaggccctggtctcccccagccaagtcctggcagggggatgctgttcttcaggatcccatgacctggggctcttggggagccccagcccggagagtgacctgtggctttgctggggaaaggggcttggagggtacagggcagtgtccaggattgcagtctcaaatccgaggcccacaggggagctgcctctgtgatcgccattaaggctgtggcctggggtctcagggcagcccaggaaccaaaaatagcctgtaacttgtcactttgtaagtcctgccctccagacacacttccctttcttctccccaagcctctcttcccagttagctcccctgacttggagtcacctctaagccttggcccaggcccctctgcagtgagatggagggactcatcccccggagagtggcatctgcaggcccactggctgcctgtggtcaccccctagggttctagcggggctgcctcccattttcctcagagcatccctgccagctggctggttctcactctcctgttttctag

SEQ ID NO: 659 - DNA, 877 bp, Homo sapiens
gtgagtgtcatctctggagccttccgtttcctcctctgtaaacctggggtggtaaaaatgttaaaaatgttgaagggtatgttggaacttggccagagctgcgcccaagcaccagctgtgcaggggttggttggggacagggcgctcccctgggcctggcccaccctctgctctcaggcccctcgttgccatttcacagatgaggtcaccagaggccacagaggctgagccactcaggaggccagtcacaggtccaccagtgtccggccagtgtttgtccctgcagccctttctggaacctagctgggtacaagtgcatgactcaggactgggtgggagggggctgtccctgaggccctggtctcccccagccaagtcctggcagggggatgctgttcttcaggatcccatgacctggggctcttggggagccccagcccggagagtgacctgtggctttgctggggaaaggggcttggagggtacagggcagtgtccaggattgcagtctcaaatccgaggcccacaggggagctgcctctgtgatcgccattaaggctgtggcctggggtctcagggcagcccaggaaccaaaaatagcctgtaacttgtcactttgtaagtcctgccctccagacacacttccctttcttctccccaagcctctcttcccagttagctcccctgacttggagtcacctctaagccttggcccaggcccctctgcagtgagatggagggactcatcccccggagagtggcatctgcaggcccactggctgcctgtggtcaccccctagggttctagcggggctgcctcccattttcctcagagcatccctgccagctggctggttctcactctcctgttttctag

SEQ ID NO: 660 - DNA, 75 bp, Homo sapiens
aaatgactacgatgataccattccaatcttggatgcactaaaagtcaccgccaatattgtgtttggatatgccac

SEQ ID NO: 661 - DNA, 820 bp, Homo sapiens
gtaagaacatttgatgtttacgttgaagtttcctttattgtttgatgtctttttgtttttgctttttaggagcaggggtcttaactctgtcacccaggctggagtgcagaggcgccatcatagctcactgctcctgggctcaagcgatcctcctgcctcagccttctgagtcgctgggattacaggcatgtgccactgtgcctggcccctgagggttttttgattatagattagaggcctagaaaatacctatagacatgtaggcataaatttacctccttgatattctgcgtagaaaattttaaatgatcgactttagcattccatatcatggtatcttaattattaagcccaaattgggcatgtaattcctgcttaaagattaactctttaattatcaatgtcatgtgagaggcagaagagaaaatgaagcttattggtgtatacagaagtcccatgtggcaagtgtttgcttttctaacattttctttttaaaaaattatttttattggatattgacaagttataattgtatgtatttatgggatacaaagatatgctatgatgtacgtattcaatgtggaatgattgaatcaagataattcacatatcacctcaaatacttatcttttttcctaactgaaacattgtaccctgtgactaacagtccccacgctgtccccacccccccccagcctctggtaaccaccattctgctgggtgcttctctgagttcatttttattagcatccacatataagtgagaacatacagtatttgcctttctgtgcctggcttaacttctttttctatttttaag

SEQ ID NO: 662 - DNA, 260 bp, Homo sapiens
aaatgactacgatgataccattccaatcttggatgcactaaaagtcaccgccaatattgtgtttggatatgccacgtaagaacatttgatgtttacgttgaagtttcctttattgtttgatgtctttttgtttttgctttttaggagcaggggtcttaactctgtcacccaggctggagtgcagaggcgccatcatagctcactgctcctgggctcaagcgatcctcctgcctcagccttctgagtcgctgggattacag

SEQ ID NO: 663 - DNA, 635 bp, Homo sapiens
gcatgtgccactgtgcctggcccctgagggttttttgattatagattagaggcctagaaaatacctatagacatgtaggcataaatttacctccttgatattctgcgtagaaaattttaaatgatcgactttagcattccatatcatggtatcttaattattaagcccaaattgggcatgtaattcctgcttaaagattaactctttaattatcaatgtcatgtgagaggcagaagagaaaatgaagcttattggtgtatacagaagtcccatgtggcaagtgtttgcttttctaacattttctttttaaaaaattatttttattggatattgacaagttataattgtatgtatttatgggatacaaagatatgctatgatgtacgtattcaatgtggaatgattgaatcaagataattcacatatcacctcaaatacttatcttttttcctaactgaaacattgtaccctgtgactaacagtccccacgctgtccccacccccccccagcctctggtaaccaccattctgctgggtgcttctctgagttcatttttattagcatccacatataagtgagaacatacagtatttgcctttctgtgcctggcttaacttctttttctatttttaag

SEQ ID NO: 664 - DNA, 139 bp, Homo sapiens
tgctgcatggtgctgaaccattgccatattatactgctgcccacgcaatgagttggtgtttacagtgttcccaaggagtggcttatcttcacagcatgcaacccaaagcgctaattcacagggacctgaaaccaccaaa

SEQ ID NO: 665 - DNA, 159 bp, Homo sapiens
tttgtgcctttctttcgcagtgctgcatggtgctgaaccattgccatattatactgctgcccacgcaatgagttggtgtttacagtgttcccaaggagtggcttatcttcacagcatgcaacccaaagcgctaattcacagggacctgaaaccaccaaa

SEQ ID NO: 666 - DNA, 1407 bp, Homo sapiens
gtgagtgtcattagacctgtctttatctagtggattaaaataatttgaaaaattttaatataaaccctaagttgtttaacattcttcacaatttgccgtcagagtcccaaaagggcataatttttaaaaatctgctaagaataaaaatggaaagataagattctataacattagtatgtgaaatttagaggtctatcaattttttaagtagatggtactttgcatttcattaaaagcatttaagtaaaagtttactttttaaatagattttaaaatatcttcagatttttttctttttgccctctcataactttgagcctcctcattttagaattctttaaccatatttcgatttcactctgctttattttttcttttttttcaaaaaaaaatgtgaaaactcacttcacacaaccttttatttgtagtaatgaaaaaaaactttgtgtagttacattggagaacagagttcttttaccctaaaaataccaaccatatgcagaaatgtattgtctcttgtagcaccagttatataaaacaaattgttacattttattttttaattagtattattttatgtaaacttttacttatatttactgcccatgtgttcatcattgtgatggatatctaataccccattgtcttatttgattgaactacttctggtttttagccattacagaaaatacaggtgcaaacatcttgatatacattgttttgtttctttctgtactgttctctgcctctctcttgtagtagtgtgccataagactgctcataatttatattactttataaaagtctttatctgtttgaaaaaatgtggtaatgtatattgattttacttcaatgtaggaataacatttaatagatgtactattaaatgttaatatcatggcaattatccactcaaaattagtagatattttcatcctttttatttagaagaaaaattaaaaggccaggcatggtggctcactcctgtaatcccagcactttgggaggccaaggcaggcagatcatgaggtcaagagatcaagaccatcctggccaacatggtgataccctatctctactaaaaatacaaaaattagctgggcgtggtggcacacgcctgtagtcccagctactcgggaggctgagccaggagaatcgcttgaacccaggaggtggagtttacagtgagccaagatcgcaccactgcactccagcctggcgacaaagtgagagtccgtctcaaaaaacaaaaagaaaaaagaaagtaaaaaattaaaagcaggactgatggagcatatgtatatgtagaaaaatacccagtcatgtgttctgatagtgcttgcattcacattgtgtcttttgttatatgcaataaagttctttttagtttgtgcctttctttcgcag

SEQ ID NO: 667 - DNA, 1387 bp, Homo sapiens
gtgagtgtcattagacctgtctttatctagtggattaaaataatttgaaaaattttaatataaaccctaagttgtttaacattcttcacaatttgccgtcagagtcccaaaagggcataatttttaaaaatctgctaagaataaaaatggaaagataagattctataacattagtatgtgaaatttagaggtctatcaattttttaagtagatggtactttgcatttcattaaaagcatttaagtaaaagtttactttttaaatagattttaaaatatcttcagatttttttctttttgccctctcataactttgagcctcctcattttagaattctttaaccatatttcgatttcactctgctttattttttcttttttttcaaaaaaaaatgtgaaaactcacttcacacaaccttttatttgtagtaatgaaaaaaaactttgtgtagttacattggagaacagagttcttttaccctaaaaataccaaccatatgcagaaatgtattgtctcttgtagcaccagttatataaaacaaattgttacattttattttttaattagtattattttatgtaaacttttacttatatttactgcccatgtgttcatcattgtgatggatatctaataccccattgtcttatttgattgaactacttctggtttttagccattacagaaaatacaggtgcaaacatcttgatatacattgttttgtttctttctgtactgttctctgcctctctcttgtagtagtgtgccataagactgctcataatttatattactttataaaagtctttatctgtttgaaaaaatgtggtaatgtatattgattttacttcaatgtaggaataacatttaatagatgtactattaaatgttaatatcatggcaattatccactcaaaattagtagatattttcatcctttttatttagaagaaaaattaaaaggccaggcatggtggctcactcctgtaatcccagcactttgggaggccaaggcaggcagatcatgaggtcaagagatcaagaccatcctggccaacatggtgataccctatctctactaaaaatacaaaaattagctgggcgtggtggcacacgcctgtagtcccagctactcgggaggctgagccaggagaatcgcttgaacccaggaggtggagtttacagtgagccaagatcgcaccactgcactccagcctggcgacaaagtgagagtccgtctcaaaaaacaaaaagaaaaaagaaagtaaaaaattaaaagcaggactgatggagcatatgtatatgtagaaaaatacccagtcatgtgttctgatagtgcttgcattcacattgtgtcttttgttatatgcaataaagttctttttag

SEQ ID NO: 668 - DNA, 218 bp, Homo sapiens
ggcggcgcggggcgggcgcagcgggggtcggggcgctgggagcccgttgggccgcgaacgcagccgccacgctggggccgccgagatcgggtgcccgggatgagcctcatccggaaaaagggcttctacaagcaggacgtcaacaagacagcctgggagctgcccaagacctacgtgtccccgacgcacgtcggcagcggggcctatggctccgtgtg

SEQ ID NO: 669 - DNA, 189 bp, Homo sapiens
ggggcgctgggagcccgttgggccgcgaacgcagccgccacgctggggccgccgagatcgggtgcccgggatgagcctcatccggaaaaagggcttctacaagcaggacgtcaacaagacagcctgggagctgcccaagacctacgtgtccccgacgcacgtcggcagcggggcctatggctccgtgtg

SEQ ID NO: 670 - DNA, 39 bp, Homo sapiens
cccgacgcacgtcggcagcggggcctatggctccgtgtg

SEQ ID NO: 671 - DNA, 674 bp, Homo sapiens
ggcggcgcggggcgggcgcagcgggggtcggggcgctgggagcccgttgggccgcgaacgcagccgccacgctggggccgccgagatcgggtgcccgggatgagcctcatccggaaaaagggcttctacaagcaggacgtcaacaagacagcctgggagctgcccaagacctacgtgtccccgacgcacgtcggcagcggggcctatggctccgtgtggtgagacccctgggccgctggggggcggggggcgggcgccaggctctcccctttccgcccagcccgccctgggctggcccctcgccagcgccaccttgaccgcggacctcaaggcccagcgccctccccggggccacccagcggccatctcccttttctcaccgagtggctgagtgaggtctctgggggttgagttgggactgggcctggttctccaggactgtacacttgcaagaccccagagttcatcgggcagatcctcactgttacagacgagtacaccgaggccccaagagggggaggtggctcgccaagttgcagacagagtgagactcccgccctgccgtggatcccgtcgcaatgagacgttgctgcccctggcgctgtgcccctctctcagctcctgcctggcttcctactccctgccctgcgtcccgcggctcccccatattctag

SEQ ID NO: 672 - DNA, 645 bp, Homo sapiens
ggggcgctgggagcccgttgggccgcgaacgcagccgccacgctggggccgccgagatcgggtgcccgggatgagcctcatccggaaaaagggcttctacaagcaggacgtcaacaagacagcctgggagctgcccaagacctacgtgtccccgacgcacgtcggcagcggggcctatggctccgtgtggtgagacccctgggccgctggggggcggggggcgggcgccaggctctcccctttccgcccagcccgccctgggctggcccctcgccagcgccaccttgaccgcggacctcaaggcccagcgccctccccggggccacccagcggccatctcccttttctcaccgagtggctgagtgaggtctctgggggttgagttgggactgggcctggttctccaggactgtacacttgcaagaccccagagttcatcgggcagatcctcactgttacagacgagtacaccgaggccccaagagggggaggtggctcgccaagttgcagacagagtgagactcccgccctgccgtggatcccgtcgcaatgagacgttgctgcccctggcgctgtgcccctctctcagctcctgcctggcttcctactccctgccctgcgtcccgcggctcccccatattctag

SEQ ID NO: 673 - DNA, 495 bp, Homo sapiens
cccgacgcacgtcggcagcggggcctatggctccgtgtggtgagacccctgggccgctggggggcggggggcgggcgccaggctctcccctttccgcccagcccgccctgggctggcccctcgccagcgccaccttgaccgcggacctcaaggcccagcgccctccccggggccacccagcggccatctcccttttctcaccgagtggctgagtgaggtctctgggggttgagttgggactgggcctggttctccaggactgtacacttgcaagaccccagagttcatcgggcagatcctcactgttacagacgagtacaccgaggccccaagagggggaggtggctcgccaagttgcagacagagtgagactcccgccctgccgtggatcccgtcgcaatgagacgttgctgcccctggcgctgtgcccctctctcagctcctgcctggcttcctactccctgccctgcgtcccgcggctcccccatattctag

SEQ ID NO: 674 - DNA, 569 bp, Homo sapiens
gtgagacccctgggccgctggggggcggggggcgggcgccaggctctcccctttccgcccagcccgccctgggctggcccctcgccagcgccaccttgaccgcggacctcaaggcccagcgccctccccggggccacccagcggccatctcccttttctcaccgagtggctgagtgaggtctctgggggttgagttgggactgggcctggttctccaggactgtacacttgcaagaccccagagttcatcgggcagatcctcactgttacagacgagtacaccgaggccccaagagggggaggtggctcgccaagttgcagacagagtgagactcccgccctgccgtggatcccgtcgcaatgagacgttgctgcccctggcgctgtgcccctctctcagctcctgcctggcttcctactccctgccctgcgtcccgcggctcccccatattctaggtggtgggcctagtcccctctcagcccagctgcccagtgggaggggtcagggcggtctgggagatacggcccaggaggagagcctcgcctgctgaccggcctgtgcccgacag

SEQ ID NO: 675 - DNA, 113 bp, Homo sapiens
gtggtgggcctagtcccctctcagcccagctgcccagtgggaggggtcagggcggtctgggagatacggcccaggaggagagcctcgcctgctgaccggcctgtgcccgacag

SEQ ID NO: 676 - DNA, 39 bp, Homo sapiens
ctggccgctgtcgagaaactacatcacctgcagccctcg

SEQ ID NO: 677 - DNA, 439 bp, Homo sapiens
gggcaggtgtccgaccatgagcgtccgggtcgcacgggtagcgtgggtcaggggcttgggcgccagctaccgccgcggcgcctcgagcttcccggtgcctccgccgggcgcccagggtgtagcggagctgctgcgagatgcgaccggggcggaggaggaggcgccctgggcggcgacggagcggcgaatgccgggccagtgctccgtgctgctcttcccgggccagggcagccaggtggtgggcatgggccgcggtctgctcaactacccgcgcgtccgcgaactctacgccgccgcccgccgcgtgctgggctacgacctgctggaactgagcctgcacgggccgcaggagaccctggaccgcaccgtgcactgtcagcccgcgatcttcgtggcatcgctggccgctgtcgagaaactacatcacctgcagccctcg

SEQ ID NO: 678 - DNA, 473 bp, Homo sapiens
gcagtcgggcctcggtcgccacggtaacgcgcgcgggcaggtgtccgaccatgagcgtccgggtcgcacgggtagcgtgggtcaggggcttgggcgccagctaccgccgcggcgcctcgagcttcccggtgcctccgccgggcgcccagggtgtagcggagctgctgcgagatgcgaccggggcggaggaggaggcgccctgggcggcgacggagcggcgaatgccgggccagtgctccgtgctgctcttcccgggccagggcagccaggtggtgggcatgggccgcggtctgctcaactacccgcgcgtccgcgaactctacgccgccgcccgccgcgtgctgggctacgacctgctggaactgagcctgcacgggccgcaggagaccctggaccgcaccgtgcactgtcagcccgcgatcttcgtggcatcgctggccgctgtcgagaaactacatcacctgcagccctcg

SEQ ID NO: 679 - DNA, 73 bp, Homo sapiens
ctggccgctgtcgagaaactacatcacctgcagccctcggtgaggcccgaggccccgtgacaggagggggaag

SEQ ID NO: 680 - DNA, 473 bp, Homo sapiens
gggcaggtgtccgaccatgagcgtccgggtcgcacgggtagcgtgggtcaggggcttgggcgccagctaccgccgcggcgcctcgagcttcccggtgcctccgccgggcgcccagggtgtagcggagctgctgcgagatgcgaccggggcggaggaggaggcgccctgggcggcgacggagcggcgaatgccgggccagtgctccgtgctgctcttcccgggccagggcagccaggtggtgggcatgggccgcggtctgctcaactacccgcgcgtccgcgaactctacgccgccgcccgccgcgtgctgggctacgacctgctggaactgagcctgcacgggccgcaggagaccctggaccgcaccgtgcactgtcagcccgcgatcttcgtggcatcgctggccgctgtcgagaaactacatcacctgcagccctcggtgaggcccgaggccccgtgacaggagggggaag

SEQ ID NO: 681 - DNA, 507 bp, Homo sapiens
gcagtcgggcctcggtcgccacggtaacgcgcgcgggcaggtgtccgaccatgagcgtccgggtcgcacgggtagcgtgggtcaggggcttgggcgccagctaccgccgcggcgcctcgagcttcccggtgcctccgccgggcgcccagggtgtagcggagctgctgcgagatgcgaccggggcggaggaggaggcgccctgggcggcgacggagcggcgaatgccgggccagtgctccgtgctgctcttcccgggccagggcagccaggtggtgggcatgggccgcggtctgctcaactacccgcgcgtccgcgaactctacgccgccgcccgccgcgtgctgggctacgacctgctggaactgagcctgcacgggccgcaggagaccctggaccgcaccgtgcactgtcagcccgcgatcttcgtggcatcgctggccgctgtcgagaaactacatcacctgcagccctcggtgaggcccgaggccccgtgacaggagggggaag

SEQ ID NO: 682 - DNA, 1676 bp, Homo sapiens
gtgaggcccgaggccccgtgacaggagggggaaggtgagctctgcctgagctcttggccctgccagaggcttccgcctgccattccgggggctcccacgtcttactcattcgatcgagtttttttttttgtttgtttttgtttttttttttgagacggagtctcgctctgtcgcccaggctagagtgcagtggcgcgatctcggctccgcctcccgagttcacgccattctcctgcctcagcctcccaagtagctgggactacaggcgcccgccaccatgcccggctaattttttgtatttttagtagagacggggtttcatcgtgttagtcaggatggtcttgatctcctgacctcgtgatctgcccgcctcggcctcccaaagtgctgggattacaggcatgagccaccgtgcccggcccgttttgttttgttttttgagacagagtcttgctctgtcacccaggctggagtgcaatggcgcagtcttggctcactgcaacctctgcctcccaggttcaagcagttctcctgcctcagcctccgcagtagctgggatcacaggtgcacaccaccacgcccggctaatttttttattctttacttaaatcctcccaggttcacccacctcggcctcccaaagtgctaggattacaggtatgagccactgcactggcctaaatgaaggaacattgagatgagttgagaatgtcacttcacttgaaggtggtggattgattgctattaatatttaataagacggtaaatgttaagctagcacttgagatcctttaccctatttcaccttcacaccaccttgtgaggttaatactgttatttgatggttgaggaatgcagactcagggatattaaaagaattagttaagtggtcctgttgaatcgtcatcataatattcattcactgcttaccctagtctgggtctgtgctaagcactgtatagacattatattcacataattctctcatccgccctttggggtaggccctgttcttccctcatttcacagatgagataaaaatgctcttggccgggcgaggtggctcacgcctataatgcctataatccagcacttcaggaggctgaggtgggtgcatcacgaggtcaggagttcaaaaccagcctggccaacatggtgaaaccccgtctctactaaaaatacaaaaattagccaagtgtggtggtggacacctgtaatcccagcaactcgggaggctgaggcaggagaattgcttgaacccgggaggcggacgttgcagtgagccgagatcacgccattgcactccagcctgggcaacaagagcaaaactccgcctcaaaaaaaaaaaagtcatgctcttaacttgtgcacaacgatatggcctgagagcctgctgcagggccatggcaagggaatccagagccctgggttggcgtcagtgtgaccatggacggagttgatggactgtaactaaccaggaaagctcctcctaaataaaggggcaggactcaatgattgtcaaggtcacttttgtgtgtcctcttccagctggtgcaccaagttcgtagaacctggctcactgagatgctgaacaccccgccagctctcaggtacagagccctggaactgggatccccaggagagtgagggctcacgttctgcatctgtccccacag

SEQ ID NO: 683 - DNA, 1642 bp, Homo sapiens
gtgagctctgcctgagctcttggccctgccagaggcttccgcctgccattccgggggctcccacgtcttactcattcgatcgagtttttttttttgtttgtttttgtttttttttttgagacggagtctcgctctgtcgcccaggctagagtgcagtggcgcgatctcggctccgcctcccgagttcacgccattctcctgcctcagcctcccaagtagctgggactacaggcgcccgccaccatgcccggctaattttttgtatttttagtagagacggggtttcatcgtgttagtcaggatggtcttgatctcctgacctcgtgatctgcccgcctcggcctcccaaagtgctgggattacaggcatgagccaccgtgcccggcccgttttgttttgttttttgagacagagtcttgctctgtcacccaggctggagtgcaatggcgcagtcttggctcactgcaacctctgcctcccaggttcaagcagttctcctgcctcagcctccgcagtagctgggatcacaggtgcacaccaccacgcccggctaatttttttattctttacttaaatcctcccaggttcacccacctcggcctcccaaagtgctaggattacaggtatgagccactgcactggcctaaatgaaggaacattgagatgagttgagaatgtcacttcacttgaaggtggtggattgattgctattaatatttaataagacggtaaatgttaagctagcacttgagatcctttaccctatttcaccttcacaccaccttgtgaggttaatactgttatttgatggttgaggaatgcagactcagggatattaaaagaattagttaagtggtcctgttgaatcgtcatcataatattcattcactgcttaccctagtctgggtctgtgctaagcactgtatagacattatattcacataattctctcatccgccctttggggtaggccctgttcttccctcatttcacagatgagataaaaatgctcttggccgggcgaggtggctcacgcctataatgcctataatccagcacttcaggaggctgaggtgggtgcatcacgaggtcaggagttcaaaaccagcctggccaacatggtgaaaccccgtctctactaaaaatacaaaaattagccaagtgtggtggtggacacctgtaatcccagcaactcgggaggctgaggcaggagaattgcttgaacccgggaggcggacgttgcagtgagccgagatcacgccattgcactccagcctgggcaacaagagcaaaactccgcctcaaaaaaaaaaaagtcatgctcttaacttgtgcacaacgatatggcctgagagcctgctgcagggccatggcaagggaatccagagccctgggttggcgtcagtgtgaccatggacggagttgatggactgtaactaaccaggaaagctcctcctaaataaaggggcaggactcaatgattgtcaaggtcacttttgtgtgtcctcttccagctggtgcaccaagttcgtagaacctggctcactgagatgctgaacaccccgccagctctcaggtacagagccctggaactgggatccccaggagagtgagggctcacgttctgcatctgtccccacag

SEQ ID NO: 684 - DNA, 50 bp, Homo sapiens
gctttccaaaatggcgcgggtgctgaaggctgcagccgcgaatgccgtag

SEQ ID NO: 685 - DNA, 60 bp, Homo sapiens
gtggcgggttgctttccaaaatggcgcgggtgctgaaggctgcagccgcgaatgccgtag

SEQ ID NO: 686 - DNA, 513 bp, Homo sapiens
gctttccaaaatggcgcgggtgctgaaggctgcagccgcgaatgccgtaggtgaataccgggcaccggcgaccttcgccatgggacagggagcgtgggaacggcggtcgggggcggaggaggcctcggcgtggccaaagcaccttgatctaatgtcctcccccgggggcgcgttccacagcagctgctgtcacttaggcagagggtgccttccagaagcgccaccgcttagtagcggggattgccttgtgcatgagtcccatttccatccgagagctgtgcgccttgggctctgcaccttccagtatgtgggcgggagagtcgagggaacttgcccggcaggtcaggcagggcagggacagaagtaaatagaagcggatcggtaagttattttaccgcgcaccaataaagagactggggagaaaccagaaaggagagcacgttccgtaaaaacaacaactactagtcggccgaactccaagcgtgaccagctttctgttgggaacactcaaag

SEQ ID NO: 687 - DNA, 523 bp, Homo sapiens
gtggcgggttgctttccaaaatggcgcgggtgctgaaggctgcagccgcgaatgccgtaggtgaataccgggcaccggcgaccttcgccatgggacagggagcgtgggaacggcggtcgggggcggaggaggcctcggcgtggccaaagcaccttgatctaatgtcctcccccgggggcgcgttccacagcagctgctgtcacttaggcagagggtgccttccagaagcgccaccgcttagtagcggggattgccttgtgcatgagtcccatttccatccgagagctgtgcgccttgggctctgcaccttccagtatgtgggcgggagagtcgagggaacttgcccggcaggtcaggcagggcagggacagaagtaaatagaagcggatcggtaagttattttaccgcgcaccaataaagagactggggagaaaccagaaaggagagcacgttccgtaaaaacaacaactactagtcggccgaactccaagcgtgaccagctttctgttgggaacactcaaag

SEQ ID NO: 688 - DNA, 5636 bp, Homo sapiens
gtgaataccgggcaccggcgaccttcgccatgggacagggagcgtgggaacggcggtcgggggcggaggaggcctcggcgtggccaaagcaccttgatctaatgtcctcccccgggggcgcgttccacagcagctgctgtcacttaggcagagggtgccttccagaagcgccaccgcttagtagcggggattgccttgtgcatgagtcccatttccatccgagagctgtgcgccttgggctctgcaccttccagtatgtgggcgggagagtcgagggaacttgcccggcaggtcaggcagggcagggacagaagtaaatagaagcggatcggtaagttattttaccgcgcaccaataaagagactggggagaaaccagaaaggagagcacgttccgtaaaaacaacaactactagtcggccgaactccaagcgtgaccagctttctgttgggaacactcaaaggtcagtggtgtaaagaatacaaaaggagtggtttttccacgtgcactaatatatttatcgcgtacacagataaaagcatgtggatttggaaactttcttgagttctctcccccttcattttttttaaaatatgtacatagaatcagttatgacagaaataactgtaataattgtcacgttttctgactcactttctcctctttttatcctttttttttttctcttcctccttttatgagagggcaagtatttcccttaatctgagattccctattaggaagaaggtgccaagtggtaatgccccagagttactccgggacattcgtgataaatccttctagcaccagagcccacattcttaaccgtaaggcataccttcctcttaggtgatacacaagataggaacgtaaaactataaataaatgaatatttgggaaaaggcatttttatgtctatttttagaactgcacactttaatgattgacagtttgggaaaaagtatgacttccaacaggtcatatacatactgcaagaactcaatacagataaaggtgcatgtttgttttgtacttacatacacatcttggcataaaggaaaaatgaagacagtgtattccaaagattgcctttgatttgtcctattaagatacttgaagcttaatgtctccacttgtgtgtgtgtgtgtgtggttgaatatacataaagtaaaatttacctttttttttttttttgagacagagtctcactctgtcgcccaggctggagtgcagtggcgttagctcactgcaacctctgcctcccaggttcaagccattcttccgcctcagcctcccgagtagctgggattacaggcacccggcaccacgcccggctaattttttgcatttttagtggagacgagatttcaccatgttggccaggctggtttggaactcctggcctcaggtgatctgcccacctcgtcttcccaaagtgctgggattacaggcgtgagcccgtctctactaaaaatacaaaaattagccgggcgtggtagcacacgcctgttatcccgggtactcgggaggctgaggcaggataatcgcttgaacccgggaggcggaggttggcgtgagccaagatcgcgccactgcactccagcctgggcaaccaaagcgaaactccgtctcagaaaaaaaaaaaaaattgctttttaagactgaataatattccattgtgtgtgtataccacattttgtttatccattcgtctcttgatagacatttgggttatccccaccttttggctattgtaatacagctatgaacgtgggtgtacaaatacttctgaattcccgcttctttgggggtgtgtatactcataagtggaattgctggattacatggtaattctatgttatggcccctcttttaaggaacataaaacttcgccgaaaaacaaaagcacagaaaaatcagagtgaacacgtagaaaagttctgaaaatggaaattgaacctgttaggtgggagacaagaatgaccaacttacatgactgcataggtttactttcattaatcgtctgtaaatgggctaacagaaatgtaatctgtttacttactgtaatgaataaaaaaaattgatcatagtttgaaacaagttgaagatatatatatggtgctgtgaaattaactggtcaaatgtttaagagaaaacttaccagactaacttgaaagcacttctaatgaatgactttctaaatacgtatgtttcctcaaaccagatattcagtgaaaattcagacttatgttcggccaggcgcggtgactcacgcctgtaatcccagcactttgggaggctgaggaaggtggatcacctgaggtcaggagttcaagaccagcctggccaacatggcaaaacccatctctactaaaaatacaaaaattaaccgggcgtggtggcgcgctcctgtaatcccggctactccggaggctgaggcaggagaattgcttgaacctgggaagcagaggttgcactgagccaagattgcgccattgcactccagcctgggctacagagccagactcgtttcaaaaaaacaaacaaacttattacgtgttctaaaattagattatgtgaaggtcgcacaactttgcaaagatgcaaagaaatgaattgtacacttcaaatgggtgaactttatggtatataaattttaagtctgtttaaaaactattaagagataaagctgttaaaaaacctattacaagtgattattcacttttatagtactttttatacaaatttaacatctaatgtctttaaatagtaagtactcttaatgcatttgagtatagatccttgcagctaaacctttatgtattcagggacagtgtctaaaaagtgtgatctgaaataaatgcaaaatctgaactgaaagaaatgcaatgttgtttttaagtcaggacactaaaagtgattaacgagaattgatattgaaaggaagattggaatgagagttaacatacacatccgattttgatcttttacttgtataccagcttcctgacatgtgaaaatagtttctttaatctgtattcatctttacatgcgttttttattaacacttctgtttttaaatatcttatgcatttatttgcacatggttttacactgtagtatattcatgcaaagcaacctttattggaataatcacaaattaaacattgcagaattcaaaataatgcaattctgctgcactattctgaaatgggaggcagagaaatctaaaactaaagagctgtgaattcctgctagttggagggcaacctgaaataaaaatagctttaaaaaggtagcttcagtgttggtaatcattttcataatttatgcatttattaaaacatcacattgtataccttaaagatacaccgtttctattagtcatcatacctcaagctggaaaaaagtttctacaagtcaaaggagaaatataataattaagagttcaattcacaacaaacttttcaggaacacatttttattaaatataaagctctgtctctttttaactcctttattcagtgttctctacccagtttgcttggtctacacaatttcacctttggatttttattgttggatcttttttttttttttttttttttttggtaaaatgtacataacaaaaccctttaaaaatgtacagtttaggctgggcacagtagctcatgcctgtgatcccggcactttgggaggccgaggtgggcggatcacgaggtcaggagttcgagaccagcctggccaacatggtgaaaccctgtctctactaaaaatacaaaaattagccgggtgcggtggcatgcgcctgtaataccaattattcaggagactgaggcaggagaatcgcttgaacccggaaggtggaggttgcagtgagccgagatcacactattgcactccagcctgggtgaaagagcaagagttcgtctcaaaataaataaataataaagtacagtttaacagtaattattacattcactgggttagtgcaactatcacatttgtctatttcaaaacattttcactggcctagtgctgtgactcacatctgtagtcccagcactttgggaagccaaggtcggaggatcgcttgagcccaggagcaacatgggcagcctgggcaacatggtgaaaccccatctctacaaaacgtacaaaaattagccaggcatggtggctcatgcctatggttccagctactcaggaggctgaggtggaaggtattctttttttgcaatttagtttcaattgtacatttatgtatatgtgtactcggttgtaatccacttggatttcatgataacaatgaaacttactaagtttctaacttggtttgttgtgaatattagatagttggtgtaaaaaaataaatacagtgccagacagtaggtgcacagtaaattcaggccattcttgttgttaatgacatgcaatgactgtttgctaaatgaatggaatgcagagttatctgtggagatcaagaaactatctgatgaggacacagcgacagtgaattttaaaaatgctaaaaactgactggaatggtggcttacacctataatcccagcactttgggagaccgaggtgggtggatcacctgaggtcaggagtttgagaccagcctgaccaacatggtgaaaccccatctctactaaaaatgcaaaaattagggtgggcacagtggctcacatctctaatcctatcactttgggaggccgaggtgggtggatcacctgaggtcaggagttcgagaccagcctggccaatgaggcgaaaccccatctctactaaaaatacaacattagccgggcatgtggcaggtgcctgtaattccagctactcgggaggctgaggcaggagaatcgcttgaacctggggggcggaggttgcagtgagcccagatcgcgccacttcactccattctgggcgaaatagtgagactccgtctcaaaaaaaaaaaaaaatatatatatatatatatatatatttatatatatacacacacatacacacacacacaaattagctgggtatggtgacaggcacctgtaatcccagctacttgggaggctgaggccagtgaatcacttgaacccaggaggcagaggttgcagtgagctgagatcgcactgttgcactccagcactccggcctgggcaacagagcattaaagagtactgtatgtactcttttaatgtatatttatacctttaatgaacttattacaaaatataagacaaaaaattgggtacaggtagagaaattgcttgctcttattaaatatatgttgtttcattgtgaaatgcagagaatagcaagtaatgcttaatatgccactatttaagtgttaccagtaaatatgaattgttatgaaaaaatgttatcctgtgttttaaatctaactgcagctcagaattagcttttttattccagtcagttatttgaatgggcagagcagagtaattctgatgtaagtttttccatttatctcctggtttcatttcaataattaaaaagaacagatatataaataatgaatttttgcatgcattatttgtttagtttttaaaattcaatttagaagtgcgttaattctcaaaagaaggatatcaatggctgttcaatttttcag

SEQ ID NO: 689 - DNA, 5173 bp, Homo sapiens
gtcagtggtgtaaagaatacaaaaggagtggtttttccacgtgcactaatatatttatcgcgtacacagataaaagcatgtggatttggaaactttcttgagttctctcccccttcattttttttaaaatatgtacatagaatcagttatgacagaaataactgtaataattgtcacgttttctgactcactttctcctctttttatcctttttttttttctcttcctccttttatgagagggcaagtatttcccttaatctgagattccctattaggaagaaggtgccaagtggtaatgccccagagttactccgggacattcgtgataaatccttctagcaccagagcccacattcttaaccgtaaggcataccttcctcttaggtgatacacaagataggaacgtaaaactataaataaatgaatatttgggaaaaggcatttttatgtctatttttagaactgcacactttaatgattgacagtttgggaaaaagtatgacttccaacaggtcatatacatactgcaagaactcaatacagataaaggtgcatgtttgttttgtacttacatacacatcttggcataaaggaaaaatgaagacagtgtattccaaagattgcctttgatttgtcctattaagatacttgaagcttaatgtctccacttgtgtgtgtgtgtgtgtggttgaatatacataaagtaaaatttacctttttttttttttttgagacagagtctcactctgtcgcccaggctggagtgcagtggcgttagctcactgcaacctctgcctcccaggttcaagccattcttccgcctcagcctcccgagtagctgggattacaggcacccggcaccacgcccggctaattttttgcatttttagtggagacgagatttcaccatgttggccaggctggtttggaactcctggcctcaggtgatctgcccacctcgtcttcccaaagtgctgggattacaggcgtgagcccgtctctactaaaaatacaaaaattagccgggcgtggtagcacacgcctgttatcccgggtactcgggaggctgaggcaggataatcgcttgaacccgggaggcggaggttggcgtgagccaagatcgcgccactgcactccagcctgggcaaccaaagcgaaactccgtctcagaaaaaaaaaaaaaattgctttttaagactgaataatattccattgtgtgtgtataccacattttgtttatccattcgtctcttgatagacatttgggttatccccaccttttggctattgtaatacagctatgaacgtgggtgtacaaatacttctgaattcccgcttctttgggggtgtgtatactcataagtggaattgctggattacatggtaattctatgttatggcccctcttttaaggaacataaaacttcgccgaaaaacaaaagcacagaaaaatcagagtgaacacgtagaaaagttctgaaaatggaaattgaacctgttaggtgggagacaagaatgaccaacttacatgactgcataggtttactttcattaatcgtctgtaaatgggctaacagaaatgtaatctgtttacttactgtaatgaataaaaaaaattgatcatagtttgaaacaagttgaagatatatatatggtgctgtgaaattaactggtcaaatgtttaagagaaaacttaccagactaacttgaaagcacttctaatgaatgactttctaaatacgtatgtttcctcaaaccagatattcagtgaaaattcagacttatgttcggccaggcgcggtgactcacgcctgtaatcccagcactttgggaggctgaggaaggtggatcacctgaggtcaggagttcaagaccagcctggccaacatggcaaaacccatctctactaaaaatacaaaaattaaccgggcgtggtggcgcgctcctgtaatcccggctactccggaggctgaggcaggagaattgcttgaacctgggaagcagaggttgcactgagccaagattgcgccattgcactccagcctgggctacagagccagactcgtttcaaaaaaacaaacaaacttattacgtgttctaaaattagattatgtgaaggtcgcacaactttgcaaagatgcaaagaaatgaattgtacacttcaaatgggtgaactttatggtatataaattttaagtctgtttaaaaactattaagagataaagctgttaaaaaacctattacaagtgattattcacttttatagtactttttatacaaatttaacatctaatgtctttaaatagtaagtactcttaatgcatttgagtatagatccttgcagctaaacctttatgtattcagggacagtgtctaaaaagtgtgatctgaaataaatgcaaaatctgaactgaaagaaatgcaatgttgtttttaagtcaggacactaaaagtgattaacgagaattgatattgaaaggaagattggaatgagagttaacatacacatccgattttgatcttttacttgtataccagcttcctgacatgtgaaaatagtttctttaatctgtattcatctttacatgcgttttttattaacacttctgtttttaaatatcttatgcatttatttgcacatggttttacactgtagtatattcatgcaaagcaacctttattggaataatcacaaattaaacattgcagaattcaaaataatgcaattctgctgcactattctgaaatgggaggcagagaaatctaaaactaaagagctgtgaattcctgctagttggagggcaacctgaaataaaaatagctttaaaaaggtagcttcagtgttggtaatcattttcataatttatgcatttattaaaacatcacattgtataccttaaagatacaccgtttctattagtcatcatacctcaagctggaaaaaagtttctacaagtcaaaggagaaatataataattaagagttcaattcacaacaaacttttcaggaacacatttttattaaatataaagctctgtctctttttaactcctttattcagtgttctctacccagtttgcttggtctacacaatttcacctttggatttttattgttggatcttttttttttttttttttttttttggtaaaatgtacataacaaaaccctttaaaaatgtacagtttaggctgggcacagtagctcatgcctgtgatcccggcactttgggaggccgaggtgggcggatcacgaggtcaggagttcgagaccagcctggccaacatggtgaaaccctgtctctactaaaaatacaaaaattagccgggtgcggtggcatgcgcctgtaataccaattattcaggagactgaggcaggagaatcgcttgaacccggaaggtggaggttgcagtgagccgagatcacactattgcactccagcctgggtgaaagagcaagagttcgtctcaaaataaataaataataaagtacagtttaacagtaattattacattcactgggttagtgcaactatcacatttgtctatttcaaaacattttcactggcctagtgctgtgactcacatctgtagtcccagcactttgggaagccaaggtcggaggatcgcttgagcccaggagcaacatgggcagcctgggcaacatggtgaaaccccatctctacaaaacgtacaaaaattagccaggcatggtggctcatgcctatggttccagctactcaggaggctgaggtggaaggtattctttttttgcaatttagtttcaattgtacatttatgtatatgtgtactcggttgtaatccacttggatttcatgataacaatgaaacttactaagtttctaacttggtttgttgtgaatattagatagttggtgtaaaaaaataaatacagtgccagacagtaggtgcacagtaaattcaggccattcttgttgttaatgacatgcaatgactgtttgctaaatgaatggaatgcagagttatctgtggagatcaagaaactatctgatgaggacacagcgacagtgaattttaaaaatgctaaaaactgactggaatggtggcttacacctataatcccagcactttgggagaccgaggtgggtggatcacctgaggtcaggagtttgagaccagcctgaccaacatggtgaaaccccatctctactaaaaatgcaaaaattagggtgggcacagtggctcacatctctaatcctatcactttgggaggccgaggtgggtggatcacctgaggtcaggagttcgagaccagcctggccaatgaggcgaaaccccatctctactaaaaatacaacattagccgggcatgtggcaggtgcctgtaattccagctactcgggaggctgaggcaggagaatcgcttgaacctggggggcggaggttgcagtgagcccagatcgcgccacttcactccattctgggcgaaatagtgagactccgtctcaaaaaaaaaaaaaaatatatatatatatatatatatatttatatatatacacacacatacacacacacacaaattagctgggtatggtgacaggcacctgtaatcccagctacttgggaggctgaggccagtgaatcacttgaacccaggaggcagaggttgcagtgagctgagatcgcactgttgcactccagcactccggcctgggcaacagagcattaaagagtactgtatgtactcttttaatgtatatttatacctttaatgaacttattacaaaatataagacaaaaaattgggtacaggtagagaaattgcttgctcttattaaatatatgttgtttcattgtgaaatgcagagaatagcaagtaatgcttaatatgccactatttaagtgttaccagtaaatatgaattgttatgaaaaaatgttatcctgtgttttaaatctaactgcagctcagaattagcttttttattccagtcagttatttgaatgggcagagcagagtaattctgatgtaagtttttccatttatctcctggtttcatttcaataattaaaaagaacagatatataaataatgaatttttgcatgcattatttgtttagtttttaaaattcaatttagaagtgcgttaattctcaaaagaaggatatcaatggctgttcaatttttcag

SEQ ID NO: 690 - DNA, 85 bp, Homo sapiens
ctgggcgcagagggccgcgggggctgccgggaaaggcatacgtgcttaatcctggtgcagggggcgagcatggccgctccgcgag

SEQ ID NO: 691 - DNA, 51 bp, Homo sapiens
ggcatacgtgcttaatcctggtgcagggggcgagcatggccgctccgcgag

SEQ ID NO: 692 - DNA, 48 bp, Homo sapiens
atacgtgcttaatcctggtgcagggggcgagcatggccgctccgcgag

SEQ ID NO: 693 - DNA, 38 bp, Homo sapiens
aatcctggtgcagggggcgagcatggccgctccgcgag

SEQ ID NO: 694 - DNA, 37 bp, Homo sapiens
atcctggtgcagggggcgagcatggccgctccgcgag

SEQ ID NO: 695 - DNA, 28 bp, Homo sapiens
cagggggcgagcatggccgctccgcgag

SEQ ID NO: 696 - DNA, 197 bp, Homo sapiens
ctgggcgcagagggccgcgggggctgccgggaaaggcatacgtgcttaatcctggtgcagggggcgagcatggccgctccgcgaggtgagccattggctggggtgtcggcgagtgtgttcgtggagcgcgtcctggggacgactcccggcattatcggccaggttgagtccgctcctggcattccgcggaaagatgg

SEQ ID NO: 697 - DNA, 163 bp, Homo sapiens
ggcatacgtgcttaatcctggtgcagggggcgagcatggccgctccgcgaggtgagccattggctggggtgtcggcgagtgtgttcgtggagcgcgtcctggggacgactcccggcattatcggccaggttgagtccgctcctggcattccgcggaaagatgg

SEQ ID NO: 698 - DNA, 160 bp, Homo sapiens
atacgtgcttaatcctggtgcagggggcgagcatggccgctccgcgaggtgagccattggctggggtgtcggcgagtgtgttcgtggagcgcgtcctggggacgactcccggcattatcggccaggttgagtccgctcctggcattccgcggaaagatgg

SEQ ID NO: 699 - DNA, 150 bp, Homo sapiens
aatcctggtgcagggggcgagcatggccgctccgcgaggtgagccattggctggggtgtcggcgagtgtgttcgtggagcgcgtcctggggacgactcccggcattatcggccaggttgagtccgctcctggcattccgcggaaagatgg

SEQ ID NO: 700 - DNA, 149 bp, Homo sapiens
atcctggtgcagggggcgagcatggccgctccgcgaggtgagccattggctggggtgtcggcgagtgtgttcgtggagcgcgtcctggggacgactcccggcattatcggccaggttgagtccgctcctggcattccgcggaaagatgg

SEQ ID NO: 701 - DNA, 140 bp, Homo sapiens
cagggggcgagcatggccgctccgcgaggtgagccattggctggggtgtcggcgagtgtgttcgtggagcgcgtcctggggacgactcccggcattatcggccaggttgagtccgctcctggcattccgcggaaagatgg

SEQ ID NO: 702 - DNA, 437 bp, Homo sapiens
gtgagccattggctggggtgtcggcgagtgtgttcgtggagcgcgtcctggggacgactcccggcattatcggccaggttgagtccgctcctggcattccgcggaaagatgggtgggtgccgggcagaggtgtggccacctgcgatggggattgacctccgaggggagggggcccttctagacgtcgtgccgtgggataggtaccttctgctccctccccgccaccctgcctcagatcagcacaaggtccttactgctgcccatctgacagttgggaacatcgaggcctgcagcggaggggggtctcatccaacagcctacaaaacccttatttgactctgtccccagtgagcacccccagctcttgcctggtttcccgggacactagggtggggcctgaggagtggagtggcagctgaccctgtctgtgcccctag

SEQ ID NO: 703 - DNA, 325 bp, Homo sapiens
gtgggtgccgggcagaggtgtggccacctgcgatggggattgacctccgaggggagggggcccttctagacgtcgtgccgtgggataggtaccttctgctccctccccgccaccctgcctcagatcagcacaaggtccttactgctgcccatctgacagttgggaacatcgaggcctgcagcggaggggggtctcatccaacagcctacaaaacccttatttgactctgtccccagtgagcacccccagctcttgcctggtttcccgggacactagggtggggcctgaggagtggagtggcagctgaccctgtctgtgcccctag

SEQ ID NO: 704 - DNA, 76 bp, Homo sapiens
gcaggggaagctcaccacacacaaagaggaactctatcccaagaacccttatctccaagactttctgagtgcagag

SEQ ID NO: 705 - DNA, 140 bp, Homo sapiens
gcaggggaagctcaccacacacaaagaggaactctatcccaagaacccttatctccaagactttctgagtgcagaggtgagggcctctgtcctgaactttttaacccggtgccacaacccgagggtctccataggggcag

SEQ ID NO: 706 - DNA, 257 bp, Homo sapiens
gtgagggcctctgtcctgaactttttaacccggtgccacaacccgagggtctccataggggcaggtaaacggggattttaatcattttaagtgtcttagaatgatattttgggaaaaagcactccttttcctaaggactgcgactcggtgaacagaaaggaggctatgcggtgtggccagccaactcaaggaggacgaagcaacctttgcctctaaactgcctggaactaaatgtcgatttttctgacccctcccag

SEQ ID NO: 707 - DNA, 193 bp, Homo sapiens
gtaaacggggattttaatcattttaagtgtcttagaatgatattttgggaaaaagcactccttttcctaaggactgcgactcggtgaacagaaaggaggctatgcggtgtggccagccaactcaaggaggacgaagcaacctttgcctctaaactgcctggaactaaatgtcgatttttctgacccctcccag

SEQ ID NO: 708 - DNA, 160 bp, Homo sapiens
atcctgcgcagactgcagcagaatgagcggctacctgagcggagccgccagcgcctccggctgcgggagtgtggtctccagggtctggttgcctgcttgcctgaggggactgtttccccccagctctgccagggcctctacaagctgttcctgggggcag

SEQ ID NO: 709 - DNA, 197 bp, Homo sapiens
gtacacccagcccaccccctcccctggcatcccattcactggggcccctgcctggggttcagggaggtacagcaggccttgggccagcggatgaagctgccttcaagggcctcttgagccacacacctgcacggtgacttcccctcctacagtaactccttccacatgatgacagtcctccgatgacccccacacag

SEQ ID NO: 710 - DNA, 205 bp, Homo sapiens
taactccttccacatgatgacagtcctccgatgacccccacacagatcctgcgcagactgcagcagaatgagcggctacctgagcggagccgccagcgcctccggctgcgggagtgtggtctccagggtctggttgcctgcttgcctgaggggactgtttccccccagctctgccagggcctctacaagctgttcctgggggcag

SEQ ID NO: 711 - DNA, 152 bp, Homo sapiens
gtacacccagcccaccccctcccctggcatcccattcactggggcccctgcctggggttcagggaggtacagcaggccttgggccagcggatgaagctgccttcaagggcctcttgagccacacacctgcacggtgacttcccctcctacag

SEQ ID NO: 712 - DNA, 218 bp, Homo sapiens
gaggatcccctgccactggctttctttgtccacgatgctgagatcgtctcctcactggggaagacgttggagtcccaggcagtggagacagagaaggtcctagacatcatctaccagccacaggctatcttcagagtccgggctgtgactcgctgcaccagctccttggagggtcacagtgaggcagtcatttctgtggccttcagccctacgggaaa

SEQ ID NO: 713 - DNA, 534 bp, Homo sapiens
gtaaggacagctgcagactcatggagggggtatgtgggggtgcagtctttgcctggtttggggagggtctcccagagttataattgatggggcctcagggctgcctaccatagacccaagctctggactcagcttgcaattaagggacttcctcagtagggcatggtccccaaaggctgcttaaggacccctgccttggacaaacctctcctagacttgatttttcaagatctgagctgtgtgacttgtataaatcacttaacctttccgagttaatttttcatctgtgaaactgggattagttgcttctctcaaacttagaaaggtaatgagaagcttcaaaagctggttatagctgtggagaggaaagaaatggcctcctgatgtattctcccagaggacagcatcagtattgtctttctcccttccaggggcgaggaaagagtccagttccatattctattcacagaaagtgattgaataggtggcacaaatgcacatgtgcagtgtcaagcatcctctcttcttccccag

SEQ ID NO: 714 - DNA, 247 bp, Homo sapiens
gaggatcccctgccactggctttctttgtccacgatgctgagatcgtctcctcactggggaagacgttggagtcccaggcagtggagacagagaaggtcctagacatcatctaccagccacaggctatcttcagagtccgggctgtgactcgctgcaccagctccttggagggtcacagtgaggcagtcatttctgtggccttcagccctacgggaaagtaaggacagctgcagactcatggagggg

SEQ ID NO: 715 - DNA, 505 bp, Homo sapiens
gtatgtgggggtgcagtctttgcctggtttggggagggtctcccagagttataattgatggggcctcagggctgcctaccatagacccaagctctggactcagcttgcaattaagggacttcctcagtagggcatggtccccaaaggctgcttaaggacccctgccttggacaaacctctcctagacttgatttttcaagatctgagctgtgtgacttgtataaatcacttaacctttccgagttaatttttcatctgtgaaactgggattagttgcttctctcaaacttagaaaggtaatgagaagcttcaaaagctggttatagctgtggagaggaaagaaatggcctcctgatgtattctcccagaggacagcatcagtattgtctttctcccttccaggggcgaggaaagagtccagttccatattctattcacagaaagtgattgaataggtggcacaaatgcacatgtgcagtgtcaagcatcctctcttcttccccag

SEQ ID NO: 716 - DNA, 84 bp, Homo sapiens
ctttaagagcaggaagtgtggggatgcctttgcagaagccctctccaggagcttgccgacaatggggaggctgcagatgctggg

SEQ ID NO: 717 - DNA, 146 bp, Homo sapiens
gtgagccaggccttggagctgagaagggtcttcagctggggatgcctggtactctcctccctctccttaatcctacacaaggcagattcctggccccgcccttttcccctcctcgttcctccccaccatctttgcttactctgtag

SEQ ID NO: 718 - DNA, 132 bp, Homo sapiens
ctttaagagcaggaagtgtggggatgcctttgcagaagccctctccaggagcttgccgacaatggggaggctgcagatgctggggtgagccaggccttggagctgagaagggtcttcagctggggatgcctg

SEQ ID NO: 719 - DNA, 98 bp, Homo sapiens
gtactctcctccctctccttaatcctacacaaggcagattcctggccccgcccttttcccctcctcgttcctccccaccatctttgcttactctgtag

SEQ ID NO: 720 - DNA, 324 bp, Homo sapiens
gtcggtgcccactttctggaggcagtggtgaggaagttcgatgccatctataaatacggaagcgaagggaaagagtgtgacaacctgttcaccgtcattgcccatttatacaacttccacgtggtacagtctctcctcatcttcgacattttgaaaaaactgattggaactttcaccgaaaaagatattgaactgatcttgttaatgctgaaaaacgtgggtttttcattgaggaaagatgatgctttatcacttaaggaattgatcactgaagcccagaccaaagccagcggggcaggcagcgagtttcaggaccagaccagg

SEQ ID NO: 721 - DNA, 403 bp, Homo sapiens
gtcggtgcccactttctggaggcagtggtgaggaagttcgatgccatctataaatacggaagcgaagggaaagagtgtgacaacctgttcaccgtcattgcccatttatacaacttccacgtggtacagtctctcctcatcttcgacattttgaaaaaactgattggaactttcaccgaaaaagatattgaactgatcttgttaatgctgaaaaacgtgggtttttcattgaggaaagatgatgctttatcacttaaggaattgatcactgaagcccagaccaaagccagcggggcaggcagcgagtttcaggaccagaccagggtacgcgtgcgacgcttgatctgcttcctaagtccctaaagctcacaaactggccagaacctaaaaatcagtatctggg

SEQ ID NO: 722 - DNA, 1976 bp, Homo sapiens
gtacgcgtgcgacgcttgatctgcttcctaagtccctaaagctcacaaactggccagaacctaaaaatcagtatctggggtaaatattacacttgctttcctagtgatttctgttttttctgtctcatcctgttttctggctttaatatgtgaatggaccttattcctttaccagaaaaatattttgtgaatttaaaaactgatttatttaacattcatccgttaaaaaatgcttaccgaggaggccacaggacatggggctctagggtcagcctgggttggactttgggctctgccacttgacagcagcataacctgggtcttctgagcctcagtttccccctctgtaaaacagggactgatcacagctcccacattgtgtgccgttcagatgatgagatgtgtggaaccgcgtgttcctgggaagccgtttggggaagaacccgaaaagggttagtttgagagcctggagggggcatcacaagagaaaaaggcagagttcaggtctctggtcccttgttaattactgcagggaattgagggttttatcctagaggcatctgaagggttccagcaggtgaatgacaggttggagttttccttctgatggtcactttgactccaaggcagaaagaggcatgaggtggtcgaagtcaggaggagttttgcaggagctggggagtaggtggtggcaaatgttgggatcgtggcagtgggtgtggacatgggcgtcagaagtgaccagacctcatgtggattgggatgaagggaaggagggctcagggtcacccatcaggggcacaggggaccgtgcaggaggagatgaggatttaggacaggcacctccatttttgaaagactgggttagctgtgaacagagtgggctgaagggatatggggctgctctcgtagagggggtcctgggagccatggaaatgggtggacttgcctggcagcaggtgggctgtgaagaggaccttcaggttaaggagcactgacgtctagctgcaggcaggagggagagctggcaggtgagaaggaaatgaggatggtcccaggagccagggaacactagtgtccccaggaagaattcacgcccgtgtgggatgctgaggaccagcaagaggaggaagggatttgcattttgggctgaattgtgacggcggtcctgactggcttatcctggtccccggagaagccagtctgaagaggagggggctggagaagggaatgggagcagcgggctcaatggtggtttcaaatggagaagagacagaaagtacattagtgggctggggagctggctggggagttggggaaatggggaatggttgttaatgggcttggagtttctcttctggggtgatgagaaagttctgaaattgattgtggtgatagttgcacaactctgaatgtattaaaagccacataattatataccttacatgagtgagttttatgctatgtgaattctgtatcagtaagaagttgacatttggggacatctcagagggtatgtgggaattctttgtgctgttcttgcaacttttctgtatgacattacttccagttttaaagttaaaaaaattacaaggccagtggtaggagagaggatgtccagagcaggtcgcggggggccagggtgggagcaggagcgtagtagaggccggggtggccgagtaggtgtggacggtgcggaagggtgaggcgtgtggcgagcagaagggaaaagagatctctggggagtttgggttcccacttgacgttgggggacacatttccattttgaagtattatgtagccctgagtaagcggctgagactagtttagactgtctctacctaaaggctgtcctgactttgtatcgtggcggtggcggccatgtgcatcaggtgtggtagatttcttgccaacttgaatgggccgtttagactgtttgaaatgatggactttccattttttcatttttcttgaag

SEQ ID NO: 723 - DNA, 1897 bp, Homo sapiens
gtaaatattacacttgctttcctagtgatttctgttttttctgtctcatcctgttttctggctttaatatgtgaatggaccttattcctttaccagaaaaatattttgtgaatttaaaaactgatttatttaacattcatccgttaaaaaatgcttaccgaggaggccacaggacatggggctctagggtcagcctgggttggactttgggctctgccacttgacagcagcataacctgggtcttctgagcctcagtttccccctctgtaaaacagggactgatcacagctcccacattgtgtgccgttcagatgatgagatgtgtggaaccgcgtgttcctgggaagccgtttggggaagaacccgaaaagggttagtttgagagcctggagggggcatcacaagagaaaaaggcagagttcaggtctctggtcccttgttaattactgcagggaattgagggttttatcctagaggcatctgaagggttccagcaggtgaatgacaggttggagttttccttctgatggtcactttgactccaaggcagaaagaggcatgaggtggtcgaagtcaggaggagttttgcaggagctggggagtaggtggtggcaaatgttgggatcgtggcagtgggtgtggacatgggcgtcagaagtgaccagacctcatgtggattgggatgaagggaaggagggctcagggtcacccatcaggggcacaggggaccgtgcaggaggagatgaggatttaggacaggcacctccatttttgaaagactgggttagctgtgaacagagtgggctgaagggatatggggctgctctcgtagagggggtcctgggagccatggaaatgggtggacttgcctggcagcaggtgggctgtgaagaggaccttcaggttaaggagcactgacgtctagctgcaggcaggagggagagctggcaggtgagaaggaaatgaggatggtcccaggagccagggaacactagtgtccccaggaagaattcacgcccgtgtgggatgctgaggaccagcaagaggaggaagggatttgcattttgggctgaattgtgacggcggtcctgactggcttatcctggtccccggagaagccagtctgaagaggagggggctggagaagggaatgggagcagcgggctcaatggtggtttcaaatggagaagagacagaaagtacattagtgggctggggagctggctggggagttggggaaatggggaatggttgttaatgggcttggagtttctcttctggggtgatgagaaagttctgaaattgattgtggtgatagttgcacaactctgaatgtattaaaagccacataattatataccttacatgagtgagttttatgctatgtgaattctgtatcagtaagaagttgacatttggggacatctcagagggtatgtgggaattctttgtgctgttcttgcaacttttctgtatgacattacttccagttttaaagttaaaaaaattacaaggccagtggtaggagagaggatgtccagagcaggtcgcggggggccagggtgggagcaggagcgtagtagaggccggggtggccgagtaggtgtggacggtgcggaagggtgaggcgtgtggcgagcagaagggaaaagagatctctggggagtttgggttcccacttgacgttgggggacacatttccattttgaagtattatgtagccctgagtaagcggctgagactagtttagactgtctctacctaaaggctgtcctgactttgtatcgtggcggtggcggccatgtgcatcaggtgtggtagatttcttgccaacttgaatgggccgtttagactgtttgaaatgatggactttccattttttcatttttcttgaag

SEQ ID NO: 724 - DNA, 146 bp, Homo sapiens
gcgataggaagaactatgcctctgccaagctttctgagttgctgccagaagaagttgaagcagaagtgaaagcagctgcagagatatcaatgggaacagaggtttcagaagaagatatttgcaatattctgcatctttgcacccag

SEQ ID NO: 725 - DNA, 250 bp, Homo sapiens
gcatccttttcattggctttctactttttcttttgactatttgctggattttatataatttgttgaagagtgattctccctcatcctctgcaaacattccataggcgataggaagaactatgcctctgccaagctttctgagttgctgccagaagaagttgaagcagaagtgaaagcagctgcagagatatcaatgggaacagaggtttcagaagaagatatttgcaatattctgcatctttgcacccag

SEQ ID NO: 726 - DNA, 667 bp, Homo sapiens
gtgagtaatttgttcatcctttaaggcattgaaagtaaatgaatttgattgcatcctaaaacatgacgtatagcattttgttaagcaagattcccagggtttttgcaatttctgtgtatttgggaagtgtagcagtttagtgtcttaaatttaagaaacaaaatgaattttaacttagattttgatggcctataacatgatattagtacctaatgctaaatagcagtattgccgtctgtactgttaatatacagaggaacttgattgttgattgtcgttaacgtacagaggaacttgattgattgatggtttacttgccttacgaattactggccccagcttcagtataaaattgtctgtgacattattattagtcctgtcttttttaaatttttgccacttatattctgtaataagtgttgtggcatattttgtcctctttttactctgattattttttggaagaaggtggtggggagacatttaatgtctaaacttaaacccttaaatgaggaaaactgttatactaggtcaaacttcttcattttttttgttttgtttaggcatccttttcattggctttctactttttcttttgactatttgctggattttatataatttgttgaagagtgattctccctcatcctctgcaaacattccatag

SEQ ID NO: 727 - DNA, 563 bp, Homo sapiens
gtgagtaatttgttcatcctttaaggcattgaaagtaaatgaatttgattgcatcctaaaacatgacgtatagcattttgttaagcaagattcccagggtttttgcaatttctgtgtatttgggaagtgtagcagtttagtgtcttaaatttaagaaacaaaatgaattttaacttagattttgatggcctataacatgatattagtacctaatgctaaatagcagtattgccgtctgtactgttaatatacagaggaacttgattgttgattgtcgttaacgtacagaggaacttgattgattgatggtttacttgccttacgaattactggccccagcttcagtataaaattgtctgtgacattattattagtcctgtcttttttaaatttttgccacttatattctgtaataagtgttgtggcatattttgtcctctttttactctgattattttttggaagaaggtggtggggagacatttaatgtctaaacttaaacccttaaatgaggaaaactgttatactaggtcaaacttcttcattttttttgttttgtttag

SEQ ID NO: 728 - DNA, 507 bp, Homo sapiens
gctgatgaatctgcacctgttgcaaactataatcagagaaaagaagaggagcatactcttttggacaagcttacccaacaactgcagggccttgctgtgacaataagcagagaaaatataactgagtatgcttcctttctacctttcttttttcttttttaaagatatatcaccaatagctttaatgtttaactcaaagacatatagcagtatagatataaacaaatgacactaacaatagaatcagtcaacatttatttattgtgtataatagaaggtgttagatcccatgagagatggaaagaagtgtaagtcatagtctctgccctcaggcaatttataatttagttgaaacaaaacagagatctgaaaagctaaatgaacaaatgttagaaaataaagatgatatatttaatgtcaatgttgatgtgtaaaagggaaatgatttggaatgtctacttgcattgttctccctttcataaacattctttaaaaatttgaagcaaa

SEQ ID NO: 729 - DNA, 125 bp, Homo sapiens
gctgatgaatctgcacctgttgcaaactataatcagagaaaagaagaggagcatactcttttggacaagcttacccaacaactgcagggccttgctgtgacaataagcagagaaaatataactga

SEQ ID NO: 730 - DNA, 895 bp, Homo sapiens
gtgaggaaattgaagctctcagtggtgaagcatccatgcctcttctgtcaataagtggcagaacttgggattggtgcctgtctcattgactttaaagccgatcttctgtcagaacatatctcttactgactatggaaggtctataatacttagcaagaaaataaaagagaaacctaaaacaagtggtataattttattttttcatttggtttgcattccaacacaattgcctgtttcttttaaatctaatttatttccctaagataggtgtaatgtcacactgatatttactttgttatatagcacttattggaattttttgttgttcttttgaaattaggaaactgaaattaattttttagtgaaatagacctatattctctcataggctgatgaatctgcacctgttgcaaactataatcagagaaaagaagaggagcatactcttttggacaagcttacccaacaactgcagggccttgctgtgacaataagcagagaaaatataactgagtatgcttcctttctacctttcttttttcttttttaaagatatatcaccaatagctttaatgtttaactcaaagacatatagcagtatagatataaacaaatgacactaacaatagaatcagtcaacatttatttattgtgtataatagaaggtgttagatcccatgagagatggaaagaagtgtaagtcatagtctctgccctcaggcaatttataatttagttgaaacaaaacagagatctgaaaagctaaatgaacaaatgttagaaaataaagatgatatatttaatgtcaatgttgatgtgtaaaagggaaatgatttggaatgtctacttgcattgttctccctttcataaacattctttaaaaatttgaagcaaa

SEQ ID NO: 731 - DNA, 513 bp, Homo sapiens
gtgaggaaattgaagctctcagtggtgaagcatccatgcctcttctgtcaataagtggcagaacttgggattggtgcctgtctcattgactttaaagccgatcttctgtcagaacatatctcttactgactatggaaggtctataatacttagcaagaaaataaaagagaaacctaaaacaagtggtataattttattttttcatttggtttgcattccaacacaattgcctgtttcttttaaatctaatttatttccctaagataggtgtaatgtcacactgatatttactttgttatatagcacttattggaattttttgttgttcttttgaaattaggaaactgaaattaattttttagtgaaatagacctatattctctcataggctgatgaatctgcacctgttgcaaactataatcagagaaaagaagaggagcatactcttttggacaagcttacccaacaactgcagggccttgctgtgacaataagcagagaaaatataactga

SEQ ID NO: 732 - DNA, 1076 bp, Homo sapiens
gtaagtattgaggttaatcacattattaaaacatctcttcctatacaagtatttttattaagtggaagttaattcaagttggtaagttcctgggtttacgttagtgatatagtctaactgcagccagtgctggcttgccgaacaggcttgctaagtctgtgcttgggagcaaagcaaaatccagggctccaactaccgaaaaatgttcagctttgatgaactcacctgctattaaggattcagacaatcctggaaggagctatttttatttttgcattttgtgagttgttttacagtttagaattatttttattttaatttctttgtggggaaataatgcataatctggccctgagggtaagtggtaaagaagcttcttgtatcaaatggcagctctgatatcaatgtctctgcagaaacaagaggaacaggaatttaaccttgacaatcccttcaggatttttttttttttttcacatgagccttggctacagctagatgtccaggtccagagactcatggagtctttaaagtggaaggcacctgaaagtcagctctccagctgtatattactcccctttactgcatctgagatatgtggtcactgaagagctcctccaaatttctccagtgacacaaaacttttcaacttagactgtttgaaaacctaattatttctgtttcacaggtgaggaaattgaagctctcagtggtgaagcatccatgcctcttctgtcaataagtggcagaacttgggattggtgcctgtctcattgactttaaagccgatcttctgtcagaacatatctcttactgactatggaaggtctataatacttagcaagaaaataaaagagaaacctaaaacaagtggtataattttattttttcatttggtttgcattccaacacaattgcctgtttcttttaaatctaatttatttccctaagataggtgtaatgtcacactgatatttactttgttatatagcacttattggaattttttgttgttcttttgaaattaggaaactgaaattaattttttagtgaaatagacctatattctctcatag

SEQ ID NO: 733 - DNA, 688 bp, Homo sapiens
gtaagtattgaggttaatcacattattaaaacatctcttcctatacaagtatttttattaagtggaagttaattcaagttggtaagttcctgggtttacgttagtgatatagtctaactgcagccagtgctggcttgccgaacaggcttgctaagtctgtgcttgggagcaaagcaaaatccagggctccaactaccgaaaaatgttcagctttgatgaactcacctgctattaaggattcagacaatcctggaaggagctatttttatttttgcattttgtgagttgttttacagtttagaattatttttattttaatttctttgtggggaaataatgcataatctggccctgagggtaagtggtaaagaagcttcttgtatcaaatggcagctctgatatcaatgtctctgcagaaacaagaggaacaggaatttaaccttgacaatcccttcaggatttttttttttttttcacatgagccttggctacagctagatgtccaggtccagagactcatggagtctttaaagtggaaggcacctgaaagtcagctctccagctgtatattactcccctttactgcatctgagatatgtggtcactgaagagctcctccaaatttctccagtgacacaaaacttttcaacttagactgtttgaaaacctaattatttctgtttcacag

SEQ ID NO: 734 - DNA, 136 bp, Homo sapiens
gtgaacaccatcccagcatccttccacgacgggctcctgctctatatccaggcagtgacggagactctggcacatgggggaactgttactgatggggagaacatcactcagcggatgtggaaccgaagctttcaag

SEQ ID NO: 735 - DNA, 494 bp, Homo sapiens
gtgaacaccatcccagcatccttccacgacgggctcctgctctatatccaggcagtgacggagactctggcacatgggggaactgttactgatggggagaacatcactcagcggatgtggaaccgaagctttcaaggtcagggcctggaggtggctggaatgggctgccttgggggatgaatcccaggtgcccagtgtcaagccatgagaagcctattgtcctgcagcagttacctatgcacaccagccttttcctccacagcttttttcaggcccatccctcagaagtcctacaaagtgtccaatctcaatcatccctgctgggcactgagttcttttacctttctttttcttttttcttttttttttgagatggagtctcgctctgtccccaagactggagtgtggtggtgcaatctcggctcacttcaacctccgcctcccaggttcaagcaattctcctgcctcagcctcctgagtagctgggattacag

SEQ ID NO: 736 - DNA, 658 bp, Homo sapiens
gtcagggcctggaggtggctggaatgggctgccttgggggatgaatcccaggtgcccagtgtcaagccatgagaagcctattgtcctgcagcagttacctatgcacaccagccttttcctccacagcttttttcaggcccatccctcagaagtcctacaaagtgtccaatctcaatcatccctgctgggcactgagttcttttacctttctttttcttttttcttttttttttgagatggagtctcgctctgtccccaagactggagtgtggtggtgcaatctcggctcacttcaacctccgcctcccaggttcaagcaattctcctgcctcagcctcctgagtagctgggattacaggtgccctccaccaacacttggctaattttttgtattttttttagtagagacagggtttcaccacgttggtcaggctggtcttgaactcctgacgtcaggtgatctgcccgcctcagcctcccaaagtgctgggattacaagcatgagccacagtgcccggccgttttaccatttactatcattctgtatacatgtatgtttggaaggcaaggcaaaaaagattagaggatgaagagatgaagtggggcacccctgaacttctattctctcaaacatagtcatcttcccccatgtcctcag

SEQ ID NO: 737 - DNA, 300 bp, Homo sapiens
gtgccctccaccaacacttggctaattttttgtattttttttagtagagacagggtttcaccacgttggtcaggctggtcttgaactcctgacgtcaggtgatctgcccgcctcagcctcccaaagtgctgggattacaagcatgagccacagtgcccggccgttttaccatttactatcattctgtatacatgtatgtttggaaggcaaggcaaaaaagattagaggatgaagagatgaagtggggcacccctgaacttctattctctcaaacatagtcatcttcccccatgtcctcag

SEQ ID NO: 738 - DNA, 140 bp, Homo sapiens
tgatggggcagagggccaggggcagggccagctgctgatcaagacagtgaaactggcattctccgtcaccaacaatgttattcggctgaaacctccttctaatgtggtgtcccccctggaacaggctctctcacaacatg

SEQ ID NO: 739 - DNA, 271 bp, Homo sapiens
tttggactggggcctctaacagaagctgttgaactctgggattattgttggaatctaattcatgagagcacatatattgcgaatgaagtcatactgtctgaatcatctttggtttccatttggcaccctagtgatggggcagagggccaggggcagggccagctgctgatcaagacagtgaaactggcattctccgtcaccaacaatgttattcggctgaaacctccttctaatgtggtgtcccccctggaacaggctctctcacaacatg

SEQ ID NO: 740 - DNA, 329 bp, Homo sapiens
gtagggctccttctccacgttccctttgtctgtctttattgtgcctgcatgttactaataactccagtttaagttaacttgcagtagcttttagaagacgacattgttcttcctaggacatagcctttacataccctagtggctgctgtatagattggcgtatagcaaagggagttgattactcctcctctctcctagtttggactggggcctctaacagaagctgttgaactctgggattattgttggaatctaattcatgagagcacatatattgcgaatgaagtcatactgtctgaatcatctttggtttccatttggcaccctag

SEQ ID NO: 741 - DNA, 198 bp, Homo sapiens
gtagggctccttctccacgttccctttgtctgtctttattgtgcctgcatgttactaataactccagtttaagttaacttgcagtagcttttagaagacgacattgttcttcctaggacatagcctttacataccctagtggctgctgtatagattggcgtatagcaaagggagttgattactcctcctctctcctag

SEQ ID NO: 742 - DNA, 50 bp, Homo sapiens
atttctaacgacccaagtccaggatacaacattgaacagatggcaaagcg

SEQ ID NO: 743 - DNA, 152 bp, Homo sapiens
gtaaggggacataaggtggaagcaggctggctgctggggcttcagggatttccccatatacggtatatattaacaaaatttgggacgggctttggagggtgagaagccagctgactgtaggcttagtgcctcgtacgcttattcccacatag

SEQ ID NO: 744 - DNA, 112 bp, Homo sapiens
atttctaacgacccaagtccaggatacaacattgaacagatggcaaagcggtaaggggacataaggtggaagcaggctggctgctggggcttcagggatttccccatatacg

SEQ ID NO: 745 - DNA, 90 bp, Homo sapiens
gtatatattaacaaaatttgggacgggctttggagggtgagaagccagctgactgtaggcttagtgcctcgtacgcttattcccacatag

SEQ ID NO: 746 - DNA, 116 bp, Homo sapiens
gtggtgtgtgatgagaacggctctaagggttatgcctttgtccacttcgagacccaagaggctgccgacaaggccatcgagaagatgaatggcatgctcctcaatgaccgcaaagt

SEQ ID NO: 747 - DNA, 253 bp, Homo sapiens
gtggtgtgtgatgagaacggctctaagggttatgcctttgtccacttcgagacccaagaggctgccgacaaggccatcgagaagatgaatggcatgctcctcaatgaccgcaaagtgtgagtgtcccagtccggagcaacaaccatcgcatgagccagccgtggccccacctcgctattaactggcacacacaaggcggctactggttctcggcccaagtgtggcctgctcctacctctccactccagggctg

SEQ ID NO: 748 - DNA, 1231 bp, Homo sapiens
gtgagtgtcccagtccggagcaacaaccatcgcatgagccagccgtggccccacctcgctattaactggcacacacaaggcggctactggttctcggcccaagtgtggcctgctcctacctctccactccagggctggtgagtctccctgcctgagccgtggcagcccttttgactcgccaaggtgggcttcctgcccaagccatggcctgcctgccgcctctcccttaaaggcatctgtctgtgggttttgtgagcatcaacaactggggctggctggaaagcagctctaagctcactctgagtcggggtcttggccagcggcagagtggagagggccctggactgaccaggagctgtatactagcagtgtgaccttggctttcctgtgattcaggtctgtccatgggtccctcgctagtggttgatgccaaattgtccccgcggttctccattttctaacttatgactcagtgacctaatacaaggctggctccacagtaatacttggtgacaatgaaaaaatcccatccctttgcagaaaaacttcataacagaccttgttgctttgatgtggttgttactgtagaatgcagagagggggaacttaccaaagccatatggggagaagaagagacaataagtcttggctattacaagccaaaataatttttgtcctttgtgtcattcagtatgccagaggatgggttatctttataatgtctgtgtgtgcagtggttgatctacagatatcactaaaaagaaatacaaaaatgtcagtgcatggataaattttcttttaagtataacagaccaaaataaataaatttaaaaagcaaagggtgccccttcactccaacaatctcatatctaggattaaccactgttaacagtttggtttgtatccttccagaccttttctatgcatttacatagttgcacagaaatgaacattttaaaaacatggccatcaggtttcttcatgaaggcagtgtgatgtggtaggaatagccctggtctaagccaggagccctggggctggtcctcacaggatagtcctgcctttttctctttctgctggggacttggggtatctctgagcctccttggtggtggatggggatctcgtgttttaacctctcctgtcagtctttaacctgtattcctttgggtccctggacatcatgttttattcctctgggtaattactgttcttcatggtttcattttag

SEQ ID NO: 749 - DNA, 1094 bp, Homo sapiens
gtgagtctccctgcctgagccgtggcagcccttttgactcgccaaggtgggcttcctgcccaagccatggcctgcctgccgcctctcccttaaaggcatctgtctgtgggttttgtgagcatcaacaactggggctggctggaaagcagctctaagctcactctgagtcggggtcttggccagcggcagagtggagagggccctggactgaccaggagctgtatactagcagtgtgaccttggctttcctgtgattcaggtctgtccatgggtccctcgctagtggttgatgccaaattgtccccgcggttctccattttctaacttatgactcagtgacctaatacaaggctggctccacagtaatacttggtgacaatgaaaaaatcccatccctttgcagaaaaacttcataacagaccttgttgctttgatgtggttgttactgtagaatgcagagagggggaacttaccaaagccatatggggagaagaagagacaataagtcttggctattacaagccaaaataatttttgtcctttgtgtcattcagtatgccagaggatgggttatctttataatgtctgtgtgtgcagtggttgatctacagatatcactaaaaagaaatacaaaaatgtcagtgcatggataaattttcttttaagtataacagaccaaaataaataaatttaaaaagcaaagggtgccccttcactccaacaatctcatatctaggattaaccactgttaacagtttggtttgtatccttccagaccttttctatgcatttacatagttgcacagaaatgaacattttaaaaacatggccatcaggtttcttcatgaaggcagtgtgatgtggtaggaatagccctggtctaagccaggagccctggggctggtcctcacaggatagtcctgcctttttctctttctgctggggacttggggtatctctgagcctccttggtggtggatggggatctcgtgttttaacctctcctgtcagtctttaacctgtattcctttgggtccctggacatcatgttttattcctctgggtaattactgttcttcatggtttcattttag

SEQ ID NO: 750 - DNA, 259 bp, Homo sapiens
gtccccgagggccagactgtgtccctctcattccgagtcttcgacctggagctgcaccccgcctgccgctacgatgctctggaggtcttcgctgggtctgggacttccggccagcggctcggacgcttttgtgggaccttccggcctgcgcccctagtcgcccccggcaaccaggtgaccctgaggatgacgacggatgagggcacaggaggacgaggcttcctgctctggtacagcgggcgggccacctcgggcactg

SEQ ID NO: 751 - DNA, 544 bp, Homo sapiens
gtccccgagggccagactgtgtccctctcattccgagtcttcgacctggagctgcaccccgcctgccgctacgatgctctggaggtcttcgctgggtctgggacttccggccagcggctcggacgcttttgtgggaccttccggcctgcgcccctagtcgcccccggcaaccaggtgaccctgaggatgacgacggatgagggcacaggaggacgaggcttcctgctctggtacagcgggcgggccacctcgggcactggtgagaactccctcacctccgccttccccccctccaggccccgccccggccgcagccccgcccccagccctaacctccgccccgcccaccccgcgccccagtgcctagggccccctacctccctgacccattttcctcactaaccgccccttcagtccctcctccccgtcttctctcccctcctcccgcacccacccatccctcttccagggccccccccaggcgcgaggcggaaatgggtcaccgacccgcgggtggaatgggcggcctggggttactgggacg

SEQ ID NO: 752 - DNA, 873 bp, Homo sapiens
gtgagaactccctcacctccgccttccccccctccaggccccgccccggccgcagccccgcccccagccctaacctccgccccgcccaccccgcgccccagtgcctagggccccctacctccctgacccattttcctcactaaccgccccttcagtccctcctccccgtcttctctcccctcctcccgcacccacccatccctcttccagggccccccccaggcgcgaggcggaaatgggtcaccgacccgcgggtggaatgggcggcctggggttactgggacggtgagtaactgccggcccccgtccgcaatcgggctccctccgtcgggcgcgagggggcaccccagggctggggggactaggttcctccaaccccggggggcccctacacccagccctgggctcccgattgcggtcccatcaccccctcctggcggcagaagtctcccttgcaatgtttcaggcggggacctccctaaaggggtcctcgggggctgtgccccaagtcgaggacaccctctccagcctgaaaggggactctgctgcagggccggggagatgggatctcctaggggaagaggcgcggtgcggccgcgggtcggggaggggccagaagggggcgtccagccagttcctcctcccgcttccaccgcccgccagtgcgccctgcggccccagacttccccgagccgcgctcctcccggccgctctctgttaacctgcccccatcttacctccccttcttctcgtcccctcatcctgagccccagacatccgagctgcctgccggggctcccagcctagagttctcctgaagctgaccgagggtctccaccgccccccacccccgctcctctctcccctccccag

SEQ ID NO: 753 - DNA, 588 bp, Homo sapiens
gtgagtaactgccggcccccgtccgcaatcgggctccctccgtcgggcgcgagggggcaccccagggctggggggactaggttcctccaaccccggggggcccctacacccagccctgggctcccgattgcggtcccatcaccccctcctggcggcagaagtctcccttgcaatgtttcaggcggggacctccctaaaggggtcctcgggggctgtgccccaagtcgaggacaccctctccagcctgaaaggggactctgctgcagggccggggagatgggatctcctaggggaagaggcgcggtgcggccgcgggtcggggaggggccagaagggggcgtccagccagttcctcctcccgcttccaccgcccgccagtgcgccctgcggccccagacttccccgagccgcgctcctcccggccgctctctgttaacctgcccccatcttacctccccttcttctcgtcccctcatcctgagccccagacatccgagctgcctgccggggctcccagcctagagttctcctgaagctgaccgagggtctccaccgccccccacccccgctcctctctcccctccccag

SEQ ID NO: 754 - DNA, 96 bp, Homo sapiens
gtccaagaataccgagaggccctggagggaatactcatcagaggcaagaatgggatccgcctggtgcctgaactctacgctgtcccgcctaacaag

SEQ ID NO: 755 - DNA, 147 bp, Homo sapiens
caatcatgaccagacctccttcctgccatggatgatggggctgttttccaggtccaagaataccgagaggccctggagggaatactcatcagaggcaagaatgggatccgcctggtgcctgaactctacgctgtcccgcctaacaag

SEQ ID NO: 756 - DNA, 2476 bp, Homo sapiens
gtgagaaaatgctgggtgttacgttgataattattttcattccactggtatactgattattattagaacatagggttatgcaagaatttaggtcactgtttcggttatctgttcccacttagcaaactttcccaaaactgagtgaattaaagcaacacctattttatttatttgctcatgattctgcaatttgggcagagcccagcagggacaggttgtctctgctttacctgctgtcagctgggatggttccatggaagtggagaatctatttccaagatggcctcactcacatggccaattgatgctggctagcagctgatgctgggaactcagctgtgctattggtgggggccttggttctcctccacatggctagcttgggcttctcacaatattgtagtctctgggccattaattttacatgttggttgttttcccctcagaacacaaaagcagaagctgccaagcttccataagtgttaggcccggaactgacaaaatgtcactttcatcacattctgttggctaaaggaccatcccatattcaagcgggaggggactagacaagggcatgagtactaggaggcgtggttcactggggtctagcaagaacattccatcacagacaggttttgttgttgctgttgttctttccagatcagccagtggtttgctgtctttagccctagtttggggtgctcttggataacatcttacttcatgtaacagcctcctcactcgaatctcagcctccggcctggttccctgctgtttccattcttctcacccatgccagagtgatcttattaaaaggcaaattaggttatgctactgccttgcttgaaagcttgcttgaaaaccacttcatgcgttttgtggggttccatatgatctgatccctgctttcacccctgtagcctcatttcttagtgcttctttcttgagttctgtgatccaagcacaatgaaatcctttcagtcctttaaacaggccatgtgccctcctctcttctcaaaggccgaggacattcttttcttccccaattgcccctcccccttcccttggttcaatgtaagtgtgtcttctttcagaaagctttctctgaccctaaaagctggggcaggtgctcctacgacccacaactataacagcatgggtcacactatgttgtatctcccccttacctgtcaaaggacgctggtagaggccatctctctccagttcacgggtatagtccctgtgcctagtgcatagtatgtgctcagtaaacatttactgatgcaactctcatttgttcatgacctatctctttagcttctacttggtaccatgctctgtgctgagccctgagcatactttgttgaacagaaccgacctgtctttgtgcaggttacatgaatgactgacatcgcagatgctttgccattttttcaactggttctgatcacatgtttggtgggggtggggatgagcaatcagagattcactttagctcttgacagctctcctgctcaggaatgctggggggcttcagaaccagcagtcagctggaaatgttaatatttccccactgttgatgctttctcttaggcttcagtgattatcttaggttttctgtcattttatcccagaattgaaagatctcaaaagaattgacttagaatttcagttgtgaataggcttaacaatgatggggggaagaaaactcaggagaggaaaatgactgtgtttagcgtcttgttgattaagcttcatggaatctactacccttctacacctttgctgtcgctcacacttgttgcccaatgacatttttaatatggggtcaacttttttagcgcccacacatgagtgagaacatgtggcatctttctgtgcctggcttatttcacttaacacactgacctccaattccatccatgttactacaaatgacagaatgttattctttttttatggctgaatagtaatgaatgcctcttaagtggaaaacttaccaagaggtggaaatgggtacactgcttaagatatagcttcccccacaagaagtttataatccggttactgagacaaaatttaaatatatgaggggttaagaatgaaataattacatgacgagttaaagacagaacaggaaagacatctgatacacagtgtagatatgactactagaggaattttgaggaagaaacagctactgtatgatgggtgctctgtctctctttctggaagcaagacaggcagggctgagcttagatacactcctgagaggaatagccgatcgtgtttagctcctcctaacactgtaagtgtgcctcctgcactcctggagctgagggtatttgtgcatttctttgccctgtgtctgaactctaatctgttgccatgagagctttttttctatgttgcaccgctgttacagcaatcatgaccagacctccttcctgccatggatgatggggctgttttccag

SEQ ID NO: 757 - DNA, 2425 bp, Homo sapiens
gtgagaaaatgctgggtgttacgttgataattattttcattccactggtatactgattattattagaacatagggttatgcaagaatttaggtcactgtttcggttatctgttcccacttagcaaactttcccaaaactgagtgaattaaagcaacacctattttatttatttgctcatgattctgcaatttgggcagagcccagcagggacaggttgtctctgctttacctgctgtcagctgggatggttccatggaagtggagaatctatttccaagatggcctcactcacatggccaattgatgctggctagcagctgatgctgggaactcagctgtgctattggtgggggccttggttctcctccacatggctagcttgggcttctcacaatattgtagtctctgggccattaattttacatgttggttgttttcccctcagaacacaaaagcagaagctgccaagcttccataagtgttaggcccggaactgacaaaatgtcactttcatcacattctgttggctaaaggaccatcccatattcaagcgggaggggactagacaagggcatgagtactaggaggcgtggttcactggggtctagcaagaacattccatcacagacaggttttgttgttgctgttgttctttccagatcagccagtggtttgctgtctttagccctagtttggggtgctcttggataacatcttacttcatgtaacagcctcctcactcgaatctcagcctccggcctggttccctgctgtttccattcttctcacccatgccagagtgatcttattaaaaggcaaattaggttatgctactgccttgcttgaaagcttgcttgaaaaccacttcatgcgttttgtggggttccatatgatctgatccctgctttcacccctgtagcctcatttcttagtgcttctttcttgagttctgtgatccaagcacaatgaaatcctttcagtcctttaaacaggccatgtgccctcctctcttctcaaaggccgaggacattcttttcttccccaattgcccctcccccttcccttggttcaatgtaagtgtgtcttctttcagaaagctttctctgaccctaaaagctggggcaggtgctcctacgacccacaactataacagcatgggtcacactatgttgtatctcccccttacctgtcaaaggacgctggtagaggccatctctctccagttcacgggtatagtccctgtgcctagtgcatagtatgtgctcagtaaacatttactgatgcaactctcatttgttcatgacctatctctttagcttctacttggtaccatgctctgtgctgagccctgagcatactttgttgaacagaaccgacctgtctttgtgcaggttacatgaatgactgacatcgcagatgctttgccattttttcaactggttctgatcacatgtttggtgggggtggggatgagcaatcagagattcactttagctcttgacagctctcctgctcaggaatgctggggggcttcagaaccagcagtcagctggaaatgttaatatttccccactgttgatgctttctcttaggcttcagtgattatcttaggttttctgtcattttatcccagaattgaaagatctcaaaagaattgacttagaatttcagttgtgaataggcttaacaatgatggggggaagaaaactcaggagaggaaaatgactgtgtttagcgtcttgttgattaagcttcatggaatctactacccttctacacctttgctgtcgctcacacttgttgcccaatgacatttttaatatggggtcaacttttttagcgcccacacatgagtgagaacatgtggcatctttctgtgcctggcttatttcacttaacacactgacctccaattccatccatgttactacaaatgacagaatgttattctttttttatggctgaatagtaatgaatgcctcttaagtggaaaacttaccaagaggtggaaatgggtacactgcttaagatatagcttcccccacaagaagtttataatccggttactgagacaaaatttaaatatatgaggggttaagaatgaaataattacatgacgagttaaagacagaacaggaaagacatctgatacacagtgtagatatgactactagaggaattttgaggaagaaacagctactgtatgatgggtgctctgtctctctttctggaagcaagacaggcagggctgagcttagatacactcctgagaggaatagccgatcgtgtttagctcctcctaacactgtaagtgtgcctcctgcactcctggagctgagggtatttgtgcatttctttgccctgtgtctgaactctaatctgttgccatgagagctttttttctatgttgcaccgctgttacag

SEQ ID NO: 758 - DNA, 210 bp, Homo sapiens
cgggacttcggtccttgcggctccttgtcctgcacagcaacctcctggcctctgtgccagctgacttggcccgccttccactcctcacccggctcgacctgagggacaaccagctccgggacctgccccctgagctgctagacgccccctttgtgcgcctgcaggggaaccccctgggtgaggcctcgccagacgccccgagttcaccag

SEQ ID NO: 759 - DNA, 414 bp, Homo sapiens
gagggcaacgccgggacacactgggtgcctgtctccggggtgccctgaccaacctgcccgctggtctgagtggcctggcccatctggcccacctggacctgagcttcaacagcctggagacactgccggcctgtgtcctgcagatgcgaggtctgggtgcgctcttgctgtctcacaactgcctctctgagctgcctgaggctctgggggccctccccgccctcaccttcctcacagtgacacacaaccgcctgcagacgctgcccccagcactgggggccctatccaccctgcagcgcctcgatctctctcagaatctgctggacacgctacctcctgagattggaggcctgggcagcctcctggagctcaacctggcctccaaccggctgcagagcctcccagcctctctgg

SEQ ID NO: 760 - DNA, 404 bp, Homo sapiens
gcttggtccacagctgcctcttggttgtccctccacctccctggcctttgagactccctcagtggctttgtcagagttctctgagcccagctgtggaggagagtctgaaacagctgctctgggaggcggcagcaggagtgtcccagcgccgtgggctgggctggtgccaagcctaagccagcaactgcccgcagcgggacttcggtccttgcggctccttgtcctgcacagcaacctcctggcctctgtgccagctgacttggcccgccttccactcctcacccggctcgacctgagggacaaccagctccgggacctgccccctgagctgctagacgccccctttgtgcgcctgcaggggaaccccctgggtgaggcctcgccagacgccccgagttcaccag

SEQ ID NO: 761 - DNA, 474 bp, Homo sapiens
ggtcgatctgggacctcggaccctggctctgagggccacatccgcctccccccttcccaggagggcaacgccgggacacactgggtgcctgtctccggggtgccctgaccaacctgcccgctggtctgagtggcctggcccatctggcccacctggacctgagcttcaacagcctggagacactgccggcctgtgtcctgcagatgcgaggtctgggtgcgctcttgctgtctcacaactgcctctctgagctgcctgaggctctgggggccctccccgccctcaccttcctcacagtgacacacaaccgcctgcagacgctgcccccagcactgggggccctatccaccctgcagcgcctcgatctctctcagaatctgctggacacgctacctcctgagattggaggcctgggcagcctcctggagctcaacctggcctccaaccggctgcagagcctcccagcctctctgg

SEQ ID NO: 762 - DNA, 282 bp, Homo sapiens
gtgagtagcccctgcgccccgacacactggccccacgggagggtccctgaagcctgcctgtcttctgcaggggcctctgcacccacaggcttggtccacagctgcctcttggttgtccctccacctccctggcctttgagactccctcagtggctttgtcagagttctctgagcccagctgtggaggagagtctgaaacagctgctctgggaggcggcagcaggagtgtcccagcgccgtgggctgggctggtgccaagcctaagccagcaactgcccgcag

SEQ ID NO: 763 - DNA, 506 bp, Homo sapiens
gtgagttccacctgttctgggccctgtctccatctctcgctctgccctgcctctgctgcatgttctcaaaggcaaaccccagtcccagccccagctccaggccgcccctcccggctccccaggtgtgaactgttctgctcttggtcctgtccagccccatcgccatcctcggtgatcaccacccccagtgtggggctggctgggccctggctcctggaccctgacgctgcccagtgggggtctctccagaccacagtgcagatgttgttcctggggaaggttgtgggtgatggttgtcagctgagatgagccggtggtctccacccctgcctccttccatttgcgggcacctctccagtgtttctgtctgtctgtccctgtctggctggggtgggggtggggtgggaggtctgtgcctctcgagcagctgtttctctggctggcagggtcgatctgggacctcggaccctggctctgagggccacatccgcctccccccttcccag

SEQ ID NO: 764 - DNA, 88 bp, Homo sapiens
gtgagtagcccctgcgccccgacacactggccccacgggagggtccctgaagcctgcctgtcttctgcaggggcctctgcacccacag

SEQ ID NO: 765 - DNA, 446 bp, Homo sapiens
gtgagttccacctgttctgggccctgtctccatctctcgctctgccctgcctctgctgcatgttctcaaaggcaaaccccagtcccagccccagctccaggccgcccctcccggctccccaggtgtgaactgttctgctcttggtcctgtccagccccatcgccatcctcggtgatcaccacccccagtgtggggctggctgggccctggctcctggaccctgacgctgcccagtgggggtctctccagaccacagtgcagatgttgttcctggggaaggttgtgggtgatggttgtcagctgagatgagccggtggtctccacccctgcctccttccatttgcgggcacctctccagtgtttctgtctgtctgtccctgtctggctggggtgggggtggggtgggaggtctgtgcctctcgagcagctgtttctctggctggcag

SEQ ID NO: 766 - DNA, 153 bp, Homo sapiens
tacgagcgggccctggacgtggcggcagagcccaagcacgagcggcagcaccgagcccagatacgcaagaacatcacggagactctggtgtccctgagggtccacactgtggatgacatccagcagatcgctgctgcgctggcccagtgcatg

SEQ ID NO: 767 - DNA, 341 bp, Homo sapiens
cccccgcccaggagggcccatgtgcttaccctgttttgcccatgaagaaacagctcagtgttgtgggtcagtgcccgcatcacacagcgtctagcacgtaactgcaccccgggagtcgtgggcatctgctggcctcctgccggcctcctgcgctgctgacagcttgctgtgccccctgcctgccccagtacgagcgggccctggacgtggcggcagagcccaagcacgagcggcagcaccgagcccagatacgcaagaacatcacggagactctggtgtccctgagggtccacactgtggatgacatccagcagatcgctgctgcgctggcccagtgcatg

SEQ ID NO: 768 - DNA, 390 bp, Homo sapiens
gtgagtgcagcctgggaggggacgtcacatctgctgcatgcgtgcttgggaccaagacctgtacccctgcctggagctttgcagagggctcatcccgggccccagagataaatcccagtgaccctgaagcagcaccccgaccttccgctcccagcagccacacccaccgggccctctccggcgtctgctttccacaatgcagcccccgcccaggagggcccatgtgcttaccctgttttgcccatgaagaaacagctcagtgttgtgggtcagtgcccgcatcacacagcgtctagcacgtaactgcaccccgggagtcgtgggcatctgctggcctcctgccggcctcctgcgctgctgacagcttgctgtgccccctgcctgccccag

SEQ ID NO: 769 - DNA, 202 bp, Homo sapiens
gtgagtgcagcctgggaggggacgtcacatctgctgcatgcgtgcttgggaccaagacctgtacccctgcctggagctttgcagagggctcatcccgggccccagagataaatcccagtgaccctgaagcagcaccccgaccttccgctcccagcagccacacccaccgggccctctccggcgtctgctttccacaatgcag

SEQ ID NO: 770 - DNA, 155 bp, Homo sapiens
accagctggtgtggcgggcggcccgaagcagcggggcagctcctacttacttccgacccaatgggcgcttcctggacggtgggctgctggccaacaaccccacgctggatgccatgaccgagatccatgagtacaatcaggacctgatccgcaag

SEQ ID NO: 771 - DNA, 134 bp, Homo sapiens
accagctggtgtggcgggcggcccgaagcagcggggcagctcctacttacttccgacccaatgggcgcttcctggacggtgggctgctggccaacaaccccacgctggatgccatgaccgagatccatgagtac

SEQ ID NO: 772 - DNA, 323 bp, Homo sapiens
gacgaactagccagagagtgtggcttcgtgggtcctgcttctgaagagttcccagcctcccctcttcccgcacccccagcccccaacacgcacaccctgagatctggagtgcatgggttttatgccagtcccttgtgccactgggccgccctccttccccgcccctagaccagctggtgtggcgggcggcccgaagcagcggggcagctcctacttacttccgacccaatgggcgcttcctggacggtgggctgctggccaacaaccccacgctggatgccatgaccgagatccatgagtacaatcaggacctgatccgcaag

SEQ ID NO: 773 - DNA, 302 bp, Homo sapiens
gacgaactagccagagagtgtggcttcgtgggtcctgcttctgaagagttcccagcctcccctcttcccgcacccccagcccccaacacgcacaccctgagatctggagtgcatgggttttatgccagtcccttgtgccactgggccgccctccttccccgcccctagaccagctggtgtggcgggcggcccgaagcagcggggcagctcctacttacttccgacccaatgggcgcttcctggacggtgggctgctggccaacaaccccacgctggatgccatgaccgagatccatgagtac

SEQ ID NO: 774 - DNA, 393 bp, Homo sapiens
gtttaaaccatgtttgatgcatccatgggaagcgactggcccgagaggctgtggggtggtgggtgggagtcgtgcacttgccatcaggcaccctcaccgtgccaccagcccacccgctgcactggtctttattggctgaggacagggattgcgggggagctgtcaggcccctggcaggttagaaaagtccctggaaagtcctcagctgtacctgccttccaccaggacgaactagccagagagtgtggcttcgtgggtcctgcttctgaagagttcccagcctcccctcttcccgcacccccagcccccaacacgcacaccctgagatctggagtgcatgggttttatgccagtcccttgtgccactgggccgccctccttccccgcccctag

SEQ ID NO: 775 - DNA, 225 bp, Homo sapiens
gtttaaaccatgtttgatgcatccatgggaagcgactggcccgagaggctgtggggtggtgggtgggagtcgtgcacttgccatcaggcaccctcaccgtgccaccagcccacccgctgcactggtctttattggctgaggacagggattgcgggggagctgtcaggcccctggcaggttagaaaagtccctggaaagtcctcagctgtacctgccttccaccag

SEQ ID NO: 776 - DNA, 84 bp, Homo sapiens
gtttgtgaatggggcaggttactttgctgctgtggcagatgccatccttcgagctcaagaggagattttcatcacagactggtg

SEQ ID NO: 777 - DNA, 127 bp, Homo sapiens
cctcccaccccgcgcccagactcaccagccaccccagacctctctcacaaccaattcttctggctgggcaaggactacagcaatcttatcaccaaggactgggtgcagctggaccggcctttcgaag

SEQ ID NO: 778 - DNA, 89 bp, Homo sapiens
aatcagttcttcattagctgctcagatgggcggacggttctgaacaaggtgggcgatgagattgtggacagaatcctgaaggcccacaa

SEQ ID NO: 779 - DNA, 135 bp, Homo sapiens
agctttctggcttctgactcccctgacctccttggcttggcctccccccaggtttgtgaatggggcaggttactttgctgctgtggcagatgccatccttcgagctcaagaggagattttcatcacagactggtg

SEQ ID NO: 780 - DNA, 205 bp, Homo sapiens
tgctcctctctttggccctggctctgtacagccccatgacttccccttgcccctggcttgggtgtgttccccctacagcctcccaccccgcgcccagactcaccagccaccccagacctctctcacaaccaattcttctggctgggcaaggactacagcaatcttatcaccaaggactgggtgcagctggaccggcctttcgaag

SEQ ID NO: 781 - DNA, 110 bp, Homo sapiens
aatcagttcttcattagctgctcagatgggcggacggttctgaacaaggtgggcgatgagattgtggacagaatcctgaaggcccacaagtaaggtggactgtcaggaag

SEQ ID NO: 782 - DNA, 3466 bp, Homo sapiens
gtgagacactgacatcccttctgagcttgtctgtggctttcttgaccccctgtgtaatctctgagtccttcatcctctcttttctcatctgaaccctcctgacctcaatgacccgccccgtgacttctttaatcttcctgacctttgacatctttaaccacattgatctctctgatttcgcgccgacctttctgacccccaaacttggtcatctcttctgacccttgacctctctaacctcctataaccttttaaacccctctctacaatactgaccctctctgttctccatgatcttctcaaatctctctgatttagtccttcatttaataaacattttcttttctttttttttttttttttttttgagagagagttttgttctgttgatctcggctcactgcaacctccgcctcccaggttcaagcgattcttctgcctcagcctcccgagtagccgggattacaggcgcccaccaccacacctggctaatttttgtatttttagtagagacgggggtttcaccatgttggccaggctcttctcgaactcctgacctcgggtgatccgcccgcctcggcctcccgaagtgctgggattacaggcgtgagccaccgtgcccagccttaataaacatttttctaagcacctagcagtgctggcagtaacacacagtcctctctgggttagggaagtaggtgatcaaatcgtgaaacaatgtgaacttgccgtactggtgataggtagaaggtgacacgcacagacaggaagtacctggcccagcagggatatcaggacaggtttccaggaggtggtgaccctcaggtagttttgctttaaatcagagactgacacaatattaattttgttggtttttgttggagacagtgtcttgctctgtcaccaggcgtgtagtgcagtagtgtgatcatggctcacggcaacttcaacctcccaggctcaaatcatcctcctgcctcagcctcccaagtagctgagactacagacacatgccaccacacccggctaattaaaaacatttttttttacaaaaaattttaaaaattagacgggtgtggtctcgaactcctgggctcaagggatcatcctgcctcggcctccccaaagtgctggattgcaggcatgagcgacagtgcctggcctatatacttttttttttttaaggcagagtttcgctcttgttgcccaggctagcgtgcagtggcacaatctcagctcactgcaacctcagcctcccaggttcaagggattctcctgcctcagcctcccaagtagctgggatcacaggtgcatgccaccacacccagctaatttttgttttggttttttttttttttttttgagatggagtctgtctctgtcaccaggctggagtgcagtggcaggatcccacctcactgcaacctctgactccccggttcaagtgattcttctgcctcagcctcctgagtagctaggattacaggcatatgccaccatgtccagctaatttttgtatttttagtagagccagggtttcaccatgttggccaggatggtctcgatctcctgacttcgtgatctgcccacctcggcctcccaaagtgctgggattacaggcttgagccactgcacctggctataaacttctaaaacagccaaaaccaatccacagtgatggaaatcagatcagcagttgcctgtggcagggtatggggaaatgattgcctatagtggggcacacgagggaacattccaggacgataaaaatgtcctatattttgataggactggtgattgcgtgggaacatacacttgctgatcctcatggaactatacaagataaagaaaatgcagaacagtccaggcacagaagacagaaatagctcagggtgtttgggaaccaccaggacatattgttgttactgagtgaggaggagcagtcagaggagaagctgggagtcagtggcacctgatctcacagggtcccatgtgctaatatcacaggcacacagggcagtcatggaaggaagttttgtttgttcgtttgttttgttttggtttggtttggtttttgagatggagtctggctctgtcgcccaagctggagtgcagtggcgcgataccagctcactgcagtctctgccccctgggttcaagcgattctcctgcctcggcctcctgagtagctgggattacaggcgtgcaccactatgctcagctgatttttgtatttttagtagagataggatttcaccatgttggccaggctggtcacgaactcctgaccttaagtgatccacccgcttcggcttcccaaagggctgggattacaggcatgagccaccttgcccagccttcctgcatattttcacatgtgcatgcacgtgttacttttgtttcaacataaatgagatcatgcaacctcttctgtgacttattttttcacttaatacctgtgtgagagattagacacttatattatttcccatttttcactcttacaaacaatgtgatgaacacaacatttgcctaggcattgtattagatgtattcctagacatgtaattaccatgtatatttaatgatattaaagggtatatgcatttaatattttgatactgctgaccagtcgctttggctcatgcctgtaatcccagcactttgggaggccgaggcgggtagatcattggggtcaggagttcaagaccaacctggccaacatggcaaaaacccgtctctactaaaaatacaaaaattagccaggcgtggtggcgggcgcctgtaatttcagttacttgggaggctgagacaggaaaattgcttgaacccaagaggcggaggttgcagtgagccaagatcatgccattgcactccagcctgggtgacagagcgggacaccatctccaaaaagctatatatatattttttgatactgccaaattgtctcctaaaagttatattcccatagtctatgagaatacccacttccccagcatattgaatattgatattgaatgttaccagtgatttgaattattaccaatctaatggattttttaaatgtaatttcattttaatttcgttgtttactagtgaaactgaacatttgccacgattggccattttaatttctctgtgaactgtcagttcttactctttgctcatttttcagttggctcatgtgactttttcttgtcgatttattggtgttctttatgtatgatgtattaatcctcctgttctttagttgattaggttattgtgtctttttgtaatttttatttgtatttagcgcatatgggcaaacactattttgatgtgtctgataccacttgtgttctctgatcatttctgatctttgaccttgctgtcacctctgacccacgactgtcctccggtcttcactctccagagctttctggcttctgactcccctgacctccttggcttggcctccccccag

SEQ ID NO: 783 - DNA, 685 bp, Homo sapiens
gtaatccccctgaggccttcctgagcacccccaaactcagataagctcaatcaacaccatttcccagctccagccttaccccctcagtcattccaggccctgccaacctcagggttcctcagactttctgggactccaagaacccactttgaaagtgctgtaactggccgggagccatggcttatgcctgtaatcccagcactttgggaggccaaggcgggtggatcacctgaggtctggagttcgagaccagcctgaccgacatggtgaaaccctgtctctactaaaaatgcaaaaaattagctgggcatggtggcagttgcctgtcattgaagctactcgggaggctgaggcaggagaatcacttgaacccaggaggcggaggttgcagtgagccgagattgtgccattgtactccaccctgggcaacagagcgagactctgtctcaaaaaaaaaaaaaaaagtgctgtcacccacccagtcctttccccattttcactgaccatcaccccattcctctaaaagtgtcaaaggcaactggaggggagggctggggaatcagaccctctgtttcattcttcctctcggtctctctcactctttcagtgctcctctctttggccctggctctgtacagccccatgacttccccttgcccctggcttgggtgtgttccccctacag

SEQ ID NO: 784 - DNA, 108 bp, Homo sapiens
gtaaggtggactgtcaggaaggtggggactgtgggtgtggtttgagcccggttgaagggggtggggtttgagggaccagtcgcacctctgactccaccccctccccag

SEQ ID NO: 785 - DNA, 3415 bp, Homo sapiens
gtgagacactgacatcccttctgagcttgtctgtggctttcttgaccccctgtgtaatctctgagtccttcatcctctcttttctcatctgaaccctcctgacctcaatgacccgccccgtgacttctttaatcttcctgacctttgacatctttaaccacattgatctctctgatttcgcgccgacctttctgacccccaaacttggtcatctcttctgacccttgacctctctaacctcctataaccttttaaacccctctctacaatactgaccctctctgttctccatgatcttctcaaatctctctgatttagtccttcatttaataaacattttcttttctttttttttttttttttttttgagagagagttttgttctgttgatctcggctcactgcaacctccgcctcccaggttcaagcgattcttctgcctcagcctcccgagtagccgggattacaggcgcccaccaccacacctggctaatttttgtatttttagtagagacgggggtttcaccatgttggccaggctcttctcgaactcctgacctcgggtgatccgcccgcctcggcctcccgaagtgctgggattacaggcgtgagccaccgtgcccagccttaataaacatttttctaagcacctagcagtgctggcagtaacacacagtcctctctgggttagggaagtaggtgatcaaatcgtgaaacaatgtgaacttgccgtactggtgataggtagaaggtgacacgcacagacaggaagtacctggcccagcagggatatcaggacaggtttccaggaggtggtgaccctcaggtagttttgctttaaatcagagactgacacaatattaattttgttggtttttgttggagacagtgtcttgctctgtcaccaggcgtgtagtgcagtagtgtgatcatggctcacggcaacttcaacctcccaggctcaaatcatcctcctgcctcagcctcccaagtagctgagactacagacacatgccaccacacccggctaattaaaaacatttttttttacaaaaaattttaaaaattagacgggtgtggtctcgaactcctgggctcaagggatcatcctgcctcggcctccccaaagtgctggattgcaggcatgagcgacagtgcctggcctatatacttttttttttttaaggcagagtttcgctcttgttgcccaggctagcgtgcagtggcacaatctcagctcactgcaacctcagcctcccaggttcaagggattctcctgcctcagcctcccaagtagctgggatcacaggtgcatgccaccacacccagctaatttttgttttggttttttttttttttttttgagatggagtctgtctctgtcaccaggctggagtgcagtggcaggatcccacctcactgcaacctctgactccccggttcaagtgattcttctgcctcagcctcctgagtagctaggattacaggcatatgccaccatgtccagctaatttttgtatttttagtagagccagggtttcaccatgttggccaggatggtctcgatctcctgacttcgtgatctgcccacctcggcctcccaaagtgctgggattacaggcttgagccactgcacctggctataaacttctaaaacagccaaaaccaatccacagtgatggaaatcagatcagcagttgcctgtggcagggtatggggaaatgattgcctatagtggggcacacgagggaacattccaggacgataaaaatgtcctatattttgataggactggtgattgcgtgggaacatacacttgctgatcctcatggaactatacaagataaagaaaatgcagaacagtccaggcacagaagacagaaatagctcagggtgtttgggaaccaccaggacatattgttgttactgagtgaggaggagcagtcagaggagaagctgggagtcagtggcacctgatctcacagggtcccatgtgctaatatcacaggcacacagggcagtcatggaaggaagttttgtttgttcgtttgttttgttttggtttggtttggtttttgagatggagtctggctctgtcgcccaagctggagtgcagtggcgcgataccagctcactgcagtctctgccccctgggttcaagcgattctcctgcctcggcctcctgagtagctgggattacaggcgtgcaccactatgctcagctgatttttgtatttttagtagagataggatttcaccatgttggccaggctggtcacgaactcctgaccttaagtgatccacccgcttcggcttcccaaagggctgggattacaggcatgagccaccttgcccagccttcctgcatattttcacatgtgcatgcacgtgttacttttgtttcaacataaatgagatcatgcaacctcttctgtgacttattttttcacttaatacctgtgtgagagattagacacttatattatttcccatttttcactcttacaaacaatgtgatgaacacaacatttgcctaggcattgtattagatgtattcctagacatgtaattaccatgtatatttaatgatattaaagggtatatgcatttaatattttgatactgctgaccagtcgctttggctcatgcctgtaatcccagcactttgggaggccgaggcgggtagatcattggggtcaggagttcaagaccaacctggccaacatggcaaaaacccgtctctactaaaaatacaaaaattagccaggcgtggtggcgggcgcctgtaatttcagttacttgggaggctgagacaggaaaattgcttgaacccaagaggcggaggttgcagtgagccaagatcatgccattgcactccagcctgggtgacagagcgggacaccatctccaaaaagctatatatatattttttgatactgccaaattgtctcctaaaagttatattcccatagtctatgagaatacccacttccccagcatattgaatattgatattgaatgttaccagtgatttgaattattaccaatctaatggattttttaaatgtaatttcattttaatttcgttgtttactagtgaaactgaacatttgccacgattggccattttaatttctctgtgaactgtcagttcttactctttgctcatttttcagttggctcatgtgactttttcttgtcgatttattggtgttctttatgtatgatgtattaatcctcctgttctttagttgattaggttattgtgtctttttgtaatttttatttgtatttagcgcatatgggcaaacactattttgatgtgtctgataccacttgtgttctctgatcatttctgatctttgaccttgctgtcacctctgacccacgactgtcctccggtcttcactctccag

SEQ ID NO: 786 - DNA, 607 bp, Homo sapiens
gtaatccccctgaggccttcctgagcacccccaaactcagataagctcaatcaacaccatttcccagctccagccttaccccctcagtcattccaggccctgccaacctcagggttcctcagactttctgggactccaagaacccactttgaaagtgctgtaactggccgggagccatggcttatgcctgtaatcccagcactttgggaggccaaggcgggtggatcacctgaggtctggagttcgagaccagcctgaccgacatggtgaaaccctgtctctactaaaaatgcaaaaaattagctgggcatggtggcagttgcctgtcattgaagctactcgggaggctgaggcaggagaatcacttgaacccaggaggcggaggttgcagtgagccgagattgtgccattgtactccaccctgggcaacagagcgagactctgtctcaaaaaaaaaaaaaaaagtgctgtcacccacccagtcctttccccattttcactgaccatcaccccattcctctaaaagtgtcaaaggcaactggaggggagggctggggaatcagaccctctgtttcattcttcctctcggtctctctcactctttcag

SEQ ID NO: 787 - DNA, 87 bp, Homo sapiens
gtggggactgtgggtgtggtttgagcccggttgaagggggtggggtttgagggaccagtcgcacctctgactccaccccctccccag

SEQ ID NO: 788 - DNA, 111 bp, Homo sapiens
ttcggctcgctcttcaagccctacatccgctactgcatggaggaggagggctgcatggagtacatgcgcggcctgctgcgcgacaacgacctcttccgggcctacatcacg

SEQ ID NO: 789 - DNA, 251 bp, Homo sapiens
gaaacagggatcataagcttgctgcccccttggggtggtcgcccaagtgcagtaaggaagcgcttgcgcagcgcctggcgcgggccggcccgcagggagcgcgcggtaaccggcgccgtggttgttctgccccgggccagttcggctcgctcttcaagccctacatccgctactgcatggaggaggagggctgcatggagtacatgcgcggcctgctgcgcgacaacgacctcttccgggcctacatcacg

SEQ ID NO: 790 - DNA, 387 bp, Homo sapiens
gtacgggcggggccgggcgcaggcgggggcactgaggcagggctggggcgccgaaaagcctccacggcccgatccggtctgcccagcatccccaacctcccccaggcccgtaaccgcacttgaccccttgtggccaagggtgaggaattacgaggcggtcgcccgggtttgagcctccacctgaccatctacccctgatccctggccacgggtggtcactttggctgaggctcagtttcctcatcaggaaacagggatcataagcttgctgcccccttggggtggtcgcccaagtgcagtaaggaagcgcttgcgcagcgcctggcgcgggccggcccgcagggagcgcgcggtaaccggcgccgtggttgttctgccccgggccag

SEQ ID NO: 791 - DNA, 247 bp, Homo sapiens
gtacgggcggggccgggcgcaggcgggggcactgaggcagggctggggcgccgaaaagcctccacggcccgatccggtctgcccagcatccccaacctcccccaggcccgtaaccgcacttgaccccttgtggccaagggtgaggaattacgaggcggtcgcccgggtttgagcctccacctgaccatctacccctgatccctggccacgggtggtcactttggctgaggctcagtttcctcatcag

SEQ ID NO: 792 - DNA, 291 bp, Homo sapiens
cattggctccgaggacttaggacctgttagcttggttgggcgactggcaaatccttccttccccggggtagaagtccagggtgagaaattggttccgaactcaaaggaacccagtgccgggccacagccgggtcacgtggccggcggccccccatgacgtgctggctgcggggcgtcacggcgacgttcgggcgacctgccgagtggccaggctacctcagtcacctgtgtggtcgcagtgctgccatggacctgggacccatgcgcaagagttaccgcggggaccgagag

SEQ ID NO: 793 - DNA, 247 bp, Homo sapiens
tggcaaatccttccttccccggggtagaagtccagggtgagaaattggttccgaactcaaaggaacccagtgccgggccacagccgggtcacgtggccggcggccccccatgacgtgctggctgcggggcgtcacggcgacgttcgggcgacctgccgagtggccaggctacctcagtcacctgtgtggtcgcagtgctgccatggacctgggacccatgcgcaagagttaccgcggggaccgagag

SEQ ID NO: 794 - DNA, 243 bp, Homo sapiens
aaatccttccttccccggggtagaagtccagggtgagaaattggttccgaactcaaaggaacccagtgccgggccacagccgggtcacgtggccggcggccccccatgacgtgctggctgcggggcgtcacggcgacgttcgggcgacctgccgagtggccaggctacctcagtcacctgtgtggtcgcagtgctgccatggacctgggacccatgcgcaagagttaccgcggggaccgagag

SEQ ID NO: 795 - DNA, 108 bp, Homo sapiens
acgttcgggcgacctgccgagtggccaggctacctcagtcacctgtgtggtcgcagtgctgccatggacctgggacccatgcgcaagagttaccgcggggaccgagag

SEQ ID NO: 796 - DNA, 53 bp, Homo sapiens
gtgctgccatggacctgggacccatgcgcaagagttaccgcggggaccgagag

SEQ ID NO: 797 - DNA, 1492 bp, Homo sapiens
gtgccgccgctagggccaggcctcctgcaggggcgggggaaaaggggtccccggagtcatctacagcggggaggggagtagtaggagcccctcggggcttctggggccacccggtggggcaaggaggtttgaggatcaccccccgtgggaaaagggggcttcaaagacatcccaccaggggaggagttccggggaaacgcaaatgaagatgggttcaaaaggcagcctttcgtaatgggtaagagctcgaactttggagcctgcctgggttggaatgtttaatgtatctgggcctcagtttcctcatctgggaagtgatagtatctgcctcacggggatgttatggtctaagatgtttgtaaagtgcttagaaccctgctactcgacaggtagcaaggtcaaataacttgctcagtcccacagctagtgatgaatgaatcggggtttcatgtgatggatgtcaggactgtgctgggcctccctcaagggcgggggaagaggggtcctcggagtcatctactggggggaggggagtaggaggaaacagcccctcagggcttctggggccaccccctggggcaaggagatttgggggtcacccaaacctccttgtgccaggtgggcatggtcatgggcccctctttaggtgggtacagtgacaaacagcttacaaactgtttgacaaaaaagtaagtggaatatgggggaaggggactagctcggggaggaggggaggagaaagctcttagcttactgccttcagtactttctgctgaccactgggaagttcttttccttttcgctcctcaggaggggaaccaagagaaccttttaggaattggggtccagggccctggttgccaaatctggttgcatgtgggcatttctagaaacgcttgtttaaaatgcagtttttccagcctgggcaacatagtgagaccctgtctctacaaaaaattaaaattagtcgagcatgttggagcgtgcctgtaattccagctacttgggaggatgaggttggaggattgcttgagctcaggaagttgagactgcagtaagccgagatcacaccaccgcactccagcctaggtgacagagtgagaccctgtctaaaataaataaataaataaataaaaatgcagtttttgatgaagcctcagacctgctgaatgagaaattttgggggtggagcccagaaagttttttttatgctccccaggtgattctgatgcacagacagttttgacacccatgacatgtaaccctgatttatccatcactagctgtgggacagcaagttgtctgagtttttatgcctgtttcctcacctgtaaaatggggcacagaatcttcttactgcatactatttcttattttaaggtcattgtcatgaggactaaatgagttgatttttgaaaagtgactagaacagtgccaggtccatagtaagcactatatatgtttattaaatgaaataaatctcctttcctag

SEQ ID NO: 798 - DNA, 529 bp, Homo sapiens
cattggctccgaggacttaggacctgttagcttggttgggcgactggcaaatccttccttccccggggtagaagtccagggtgagaaattggttccgaactcaaaggaacccagtgccgggccacagccgggtcacgtggccggcggccccccatgacgtgctggctgcggggcgtcacggcgacgttcgggcgacctgccgagtggccaggctacctcagtcacctgtgtggtcgcagtgctgccatggacctgggacccatgcgcaagagttaccgcggggaccgagaggtgccgccgctagggccaggcctcctgcaggggcgggggaaaaggggtccccggagtcatctacagcggggaggggagtagtaggagcccctcggggcttctggggccacccggtggggcaaggaggtttgaggatcaccccccgtgggaaaagggggcttcaaagacatcccaccaggggaggagttccggggaaacgcaaatgaagatgggttcaaaaggcagcctttcgtaatgg

SEQ ID NO: 799 - DNA, 485 bp, Homo sapiens
tggcaaatccttccttccccggggtagaagtccagggtgagaaattggttccgaactcaaaggaacccagtgccgggccacagccgggtcacgtggccggcggccccccatgacgtgctggctgcggggcgtcacggcgacgttcgggcgacctgccgagtggccaggctacctcagtcacctgtgtggtcgcagtgctgccatggacctgggacccatgcgcaagagttaccgcggggaccgagaggtgccgccgctagggccaggcctcctgcaggggcgggggaaaaggggtccccggagtcatctacagcggggaggggagtagtaggagcccctcggggcttctggggccacccggtggggcaaggaggtttgaggatcaccccccgtgggaaaagggggcttcaaagacatcccaccaggggaggagttccggggaaacgcaaatgaagatgggttcaaaaggcagcctttcgtaatgg

SEQ ID NO: 800 - DNA, 481 bp, Homo sapiens
aaatccttccttccccggggtagaagtccagggtgagaaattggttccgaactcaaaggaacccagtgccgggccacagccgggtcacgtggccggcggccccccatgacgtgctggctgcggggcgtcacggcgacgttcgggcgacctgccgagtggccaggctacctcagtcacctgtgtggtcgcagtgctgccatggacctgggacccatgcgcaagagttaccgcggggaccgagaggtgccgccgctagggccaggcctcctgcaggggcgggggaaaaggggtccccggagtcatctacagcggggaggggagtagtaggagcccctcggggcttctggggccacccggtggggcaaggaggtttgaggatcaccccccgtgggaaaagggggcttcaaagacatcccaccaggggaggagttccggggaaacgcaaatgaagatgggttcaaaaggcagcctttcgtaatgg

SEQ ID NO: 801 - DNA, 346 bp, Homo sapiens
acgttcgggcgacctgccgagtggccaggctacctcagtcacctgtgtggtcgcagtgctgccatggacctgggacccatgcgcaagagttaccgcggggaccgagaggtgccgccgctagggccaggcctcctgcaggggcgggggaaaaggggtccccggagtcatctacagcggggaggggagtagtaggagcccctcggggcttctggggccacccggtggggcaaggaggtttgaggatcaccccccgtgggaaaagggggcttcaaagacatcccaccaggggaggagttccggggaaacgcaaatgaagatgggttcaaaaggcagcctttcgtaatgg

SEQ ID NO: 802 - DNA, 291 bp, Homo sapiens
gtgctgccatggacctgggacccatgcgcaagagttaccgcggggaccgagaggtgccgccgctagggccaggcctcctgcaggggcgggggaaaaggggtccccggagtcatctacagcggggaggggagtagtaggagcccctcggggcttctggggccacccggtggggcaaggaggtttgaggatcaccccccgtgggaaaagggggcttcaaagacatcccaccaggggaggagttccggggaaacgcaaatgaagatgggttcaaaaggcagcctttcgtaatgg

SEQ ID NO: 803 - DNA, 1254 bp, Homo sapiens
gtaagagctcgaactttggagcctgcctgggttggaatgtttaatgtatctgggcctcagtttcctcatctgggaagtgatagtatctgcctcacggggatgttatggtctaagatgtttgtaaagtgcttagaaccctgctactcgacaggtagcaaggtcaaataacttgctcagtcccacagctagtgatgaatgaatcggggtttcatgtgatggatgtcaggactgtgctgggcctccctcaagggcgggggaagaggggtcctcggagtcatctactggggggaggggagtaggaggaaacagcccctcagggcttctggggccaccccctggggcaaggagatttgggggtcacccaaacctccttgtgccaggtgggcatggtcatgggcccctctttaggtgggtacagtgacaaacagcttacaaactgtttgacaaaaaagtaagtggaatatgggggaaggggactagctcggggaggaggggaggagaaagctcttagcttactgccttcagtactttctgctgaccactgggaagttcttttccttttcgctcctcaggaggggaaccaagagaaccttttaggaattggggtccagggccctggttgccaaatctggttgcatgtgggcatttctagaaacgcttgtttaaaatgcagtttttccagcctgggcaacatagtgagaccctgtctctacaaaaaattaaaattagtcgagcatgttggagcgtgcctgtaattccagctacttgggaggatgaggttggaggattgcttgagctcaggaagttgagactgcagtaagccgagatcacaccaccgcactccagcctaggtgacagagtgagaccctgtctaaaataaataaataaataaataaaaatgcagtttttgatgaagcctcagacctgctgaatgagaaattttgggggtggagcccagaaagttttttttatgctccccaggtgattctgatgcacagacagttttgacacccatgacatgtaaccctgatttatccatcactagctgtgggacagcaagttgtctgagtttttatgcctgtttcctcacctgtaaaatggggcacagaatcttcttactgcatactatttcttattttaaggtcattgtcatgaggactaaatgagttgatttttgaaaagtgactagaacagtgccaggtccatagtaagcactatatatgtttattaaatgaaataaatctcctttcctag

SEQ ID NO: 804 - DNA, 213 bp, Homo sapiens
gtgctgcggaagggctctggcactctgtgtgaggccttgctgatggtgcaggccttccacgccaacatcatcttccccaacaagcaagagcaggagttcaataagctgacggacgacggacacgtgctggactctgagacctacgtcgggggccacgtggaggccctcgagtctggggttttccgcagcgatatcccttgccggtttaggatg

SEQ ID NO: 805 - DNA, 304 bp, Homo sapiens
gtgtgcttcttccctgggattcagattcttcccactcttgtgctgtggtaggacccagaagctgcaggggctgaaataaagccccttctccccatcctgtcccacggcccctcaccgggtgtggcttctctggcccagcaccccccgggggcttctttagggcagtgcactgcagattgtgcacatgagtccttccggagctttctcgggcacaacctgccacgtgcagccacagcgtcaaacctgaggcaggctagtgtgggtgtgtttcccctctgaccccgtcgtctcactgttgtgctag

SEQ ID NO: 806 - DNA, 260 bp, Homo sapiens
gtgctgcggaagggctctggcactctgtgtgaggccttgctgatggtgcaggccttccacgccaacatcatcttccccaacaagcaagagcaggagttcaataagctgacggacgacggacacgtgctggactctgagacctacgtcgggggccacgtggaggccctcgagtctggggttttccgcagcgatatcccttgccggtttaggatggtgtgcttcttccctgggattcagattcttcccactcttgtgctgtg

SEQ ID NO: 807 - DNA, 257 bp, Homo sapiens
gtaggacccagaagctgcaggggctgaaataaagccccttctccccatcctgtcccacggcccctcaccgggtgtggcttctctggcccagcaccccccgggggcttctttagggcagtgcactgcagattgtgcacatgagtccttccggagctttctcgggcacaacctgccacgtgcagccacagcgtcaaacctgaggcaggctagtgtgggtgtgtttcccctctgaccccgtcgtctcactgttgtgctag

SEQ ID NO: 808 - DNA, 56 bp, Homo sapiens
aagctggctctgaagatattgacatacttcccaatggtctggctttttttagtgtg

SEQ ID NO: 809 - DNA, 126 bp, Homo sapiens
aagctggctctgaagatattgacatacttcccaatggtctggctttttttagtgtggtgagtgtcttcttccttccccaaattcagcagaggagatacaagggtatttgatgagggctgcagaaca

SEQ ID NO: 810 - DNA, 3764 bp, Homo sapiens
gtgagtgtcttcttccttccccaaattcagcagaggagatacaagggtatttgatgagggctgcagaacagtaagttgcttttaaaattcattttccaaaatgcattctgaagaaaagagaggtcaaacaagatcttggaaaacttcctccagcttttctaaatgtagagatgaagactctttgcccattgagatagtgttctttatttccccattgcattgcactaaaatattccaatgcaatctgtgttttgttttgttttttcttttttaattttttttattttttgagacggagtcttgttctggttgccccggctggagtgcagtggcatgatctcagcttactgcaacctccgcctcccgggttcaagcaattcttttgcctcagcctcccgagtagctgggattacaggcgcccgccaccatgcccggctaatttttgtatttttagtagagatggggtttcgccgtgttggccaggctggtctcaaacacctgacctcaggtgatcgcctgcctcagcctcccaaagtgctggcattacgggagtgagccaccacgcccagcgcaatctgtgttttaaatgtgcactattaagagggatatttgaggtcttactgtggatactcaatactaacattatactattttaaatacagcatctactcatctttctattactattcaacttgaagcaaatattcttgccattattatttattttcaaatattataccaaccttgcccttttgctttctttcttttttcccctgaatagccaatcataagtggaaagtcattgagtttatttacacccttcattttgccttgattcttgtaagctgaaaaacaatatcctttctgggtatacaatagaaagactttaaaaacaattggcttgtgaatattgttgtgaatattgttgaaactagcttgtaacaatgtccattctaattggaaatccagataaggggacagatgaggaggttctgaccacctacctccctggcttgggcagacataggagttcttggcatcttcataggtccagtttttctggaggaagaagtaaccaactctgacacctgactgtaattattccatttcctctcaacatccattattttcaggctctgagactcaagagggatgtgaaatactgggagatacttagaagggagtcaccacactaataaaatagttgttagacttatgagaaaggtgagagaactcaggttggagtagaatgagaattagaacactcttcaggttcctgatggtttttatgtgaaagacagtgagcagctggttattaccactgaggcaataaagagatactgtgggctttagcagaaacaccagtatatgtatttagtttttaaaataaggttttaaaaggaatgttttatttaattgcctacacagaatgaataaagtgatatttatagtaggactctgggtttgtttaggagcacatgcttgcacatgtgtggcttaggaaaaaccactgggaccactagtctaaaatattcataagtaaagatgcaaacattctgaataaagtagaaggcagttgcattgatttttttatttgtttatttgtgttttttgttgttgttttgcaaggatgtgttcttggagatttttataatctagaattcacctatttcaagatttctctccagcccccatagtaataaatctgaagtaggagggatgaggtctccaaacacataaatctacagccattttagcttgggggcatgttatagttacaaagatcttatagccatatcaatagaactttttctgctttttttctgttaccctcctttgctcatttgactttttttaaaatttagaaacattcccagtttgctgctgtttttcatttacttggcattgtctctaataaaacctagagtgtactctcttctaaataaagaggtcctacattgtggaggttgttcattcttcttcctagcattttagctcatctaacccaacctattttacagttatgggttgagggtcacctcaaaactaatgtcacacttcatgaagaattggatgacatagaataaaatataaaaaatgtaaacaatgtgagtgtgcttaacaccactgaactgtacacttaaaaatggtgaaagtgatgaatgttgtatgtattttatcataattaaaaataaatttttaaaaagagaaaaaatacttaaataaataaggagtgcgaacataaccatgactagttatcaccatctgatagtgcttcctttgcatgtaaatcatgcttttgttttggggacattcataaagaatagggattaactgaagtggcactgccatgtaacaatagcataattccagtttgttctacttaccaggcttgccctccatgaaaatatacaattgtagataatcttttttaattggagagatttcctcttatgtccaattttatacataaagtaagacttttttattgtgtgcctaaatttgtgtaaatatgactgcatcgtattagtaaactgaattaggtagtgcattcacataaaatttaacatcaccaagaaggctttaccttaagaatgtaatgatgaatcaccattttagatagactgataggtaatttattaactgatttaaaagagaaaagacctatatcatctcagtgagtaccaaaaagcatttaataaaattcaatactcattcctaaagttccaagcaaactagaaagataaggaaaattcccacaaaactacagcaaacatcattcttgatggtgaagcattggctgcatttgcattaatgctcagaacaggaagaaaatacccaacaccacaaccatcagtaatctactagagttcttagtaattcagtaaaacgagaaaaagaaatgtgagatagaaaagaaaaagacaaaactgtcattagagaagcagggactggctcaattgcccaggctgatgtgcagtagtgcaatcatagctcactgcagcctgaactcctaaactcctgcgctcaagaggtccttccacctcagccttccgagcagctaggactacaagtgctcaccataacactcagctaatttttttttttttttttttttttttttttgtagagacagagtcttgctatgttgcccaggctggtctcaaactgctggcctcaagcagtcctcccacgtcagcctcccaaagtgctggaattataggcatgagccaccaggcctgacctaaagctgtagtaatttaaaaagtgttatattggcacaggaatagacatgagacattaaaataacaaaacagagagtccctaaatagaccaatatgtaaatgtcagagatctagcacatgataaaggtgatattttgaatcagtgggagaaggatggactgtatgccaggcactgttccaggcactgggatctagcagtgaacaaatttccacagtcagtatgtagatgtcacttttctccaccctcagctctccctggaatcacctagtccaccaaccttctgattactctctgaagagaataaatccctgatcttcttttcagttattttcaggctttcagtattccacctccccgttattattttttctgttatcttttctctgttttttgagtttttgtggctttatgccactactttaaccacaatctctatttatccttcatgtacagttcccatgttagtccataaaaatacttaagcttttgtatttaacatttttcaccgttttggaaag

SEQ ID NO: 811 - DNA, 3694 bp, Homo sapiens
gtaagttgcttttaaaattcattttccaaaatgcattctgaagaaaagagaggtcaaacaagatcttggaaaacttcctccagcttttctaaatgtagagatgaagactctttgcccattgagatagtgttctttatttccccattgcattgcactaaaatattccaatgcaatctgtgttttgttttgttttttcttttttaattttttttattttttgagacggagtcttgttctggttgccccggctggagtgcagtggcatgatctcagcttactgcaacctccgcctcccgggttcaagcaattcttttgcctcagcctcccgagtagctgggattacaggcgcccgccaccatgcccggctaatttttgtatttttagtagagatggggtttcgccgtgttggccaggctggtctcaaacacctgacctcaggtgatcgcctgcctcagcctcccaaagtgctggcattacgggagtgagccaccacgcccagcgcaatctgtgttttaaatgtgcactattaagagggatatttgaggtcttactgtggatactcaatactaacattatactattttaaatacagcatctactcatctttctattactattcaacttgaagcaaatattcttgccattattatttattttcaaatattataccaaccttgcccttttgctttctttcttttttcccctgaatagccaatcataagtggaaagtcattgagtttatttacacccttcattttgccttgattcttgtaagctgaaaaacaatatcctttctgggtatacaatagaaagactttaaaaacaattggcttgtgaatattgttgtgaatattgttgaaactagcttgtaacaatgtccattctaattggaaatccagataaggggacagatgaggaggttctgaccacctacctccctggcttgggcagacataggagttcttggcatcttcataggtccagtttttctggaggaagaagtaaccaactctgacacctgactgtaattattccatttcctctcaacatccattattttcaggctctgagactcaagagggatgtgaaatactgggagatacttagaagggagtcaccacactaataaaatagttgttagacttatgagaaaggtgagagaactcaggttggagtagaatgagaattagaacactcttcaggttcctgatggtttttatgtgaaagacagtgagcagctggttattaccactgaggcaataaagagatactgtgggctttagcagaaacaccagtatatgtatttagtttttaaaataaggttttaaaaggaatgttttatttaattgcctacacagaatgaataaagtgatatttatagtaggactctgggtttgtttaggagcacatgcttgcacatgtgtggcttaggaaaaaccactgggaccactagtctaaaatattcataagtaaagatgcaaacattctgaataaagtagaaggcagttgcattgatttttttatttgtttatttgtgttttttgttgttgttttgcaaggatgtgttcttggagatttttataatctagaattcacctatttcaagatttctctccagcccccatagtaataaatctgaagtaggagggatgaggtctccaaacacataaatctacagccattttagcttgggggcatgttatagttacaaagatcttatagccatatcaatagaactttttctgctttttttctgttaccctcctttgctcatttgactttttttaaaatttagaaacattcccagtttgctgctgtttttcatttacttggcattgtctctaataaaacctagagtgtactctcttctaaataaagaggtcctacattgtggaggttgttcattcttcttcctagcattttagctcatctaacccaacctattttacagttatgggttgagggtcacctcaaaactaatgtcacacttcatgaagaattggatgacatagaataaaatataaaaaatgtaaacaatgtgagtgtgcttaacaccactgaactgtacacttaaaaatggtgaaagtgatgaatgttgtatgtattttatcataattaaaaataaatttttaaaaagagaaaaaatacttaaataaataaggagtgcgaacataaccatgactagttatcaccatctgatagtgcttcctttgcatgtaaatcatgcttttgttttggggacattcataaagaatagggattaactgaagtggcactgccatgtaacaatagcataattccagtttgttctacttaccaggcttgccctccatgaaaatatacaattgtagataatcttttttaattggagagatttcctcttatgtccaattttatacataaagtaagacttttttattgtgtgcctaaatttgtgtaaatatgactgcatcgtattagtaaactgaattaggtagtgcattcacataaaatttaacatcaccaagaaggctttaccttaagaatgtaatgatgaatcaccattttagatagactgataggtaatttattaactgatttaaaagagaaaagacctatatcatctcagtgagtaccaaaaagcatttaataaaattcaatactcattcctaaagttccaagcaaactagaaagataaggaaaattcccacaaaactacagcaaacatcattcttgatggtgaagcattggctgcatttgcattaatgctcagaacaggaagaaaatacccaacaccacaaccatcagtaatctactagagttcttagtaattcagtaaaacgagaaaaagaaatgtgagatagaaaagaaaaagacaaaactgtcattagagaagcagggactggctcaattgcccaggctgatgtgcagtagtgcaatcatagctcactgcagcctgaactcctaaactcctgcgctcaagaggtccttccacctcagccttccgagcagctaggactacaagtgctcaccataacactcagctaatttttttttttttttttttttttttttttgtagagacagagtcttgctatgttgcccaggctggtctcaaactgctggcctcaagcagtcctcccacgtcagcctcccaaagtgctggaattataggcatgagccaccaggcctgacctaaagctgtagtaatttaaaaagtgttatattggcacaggaatagacatgagacattaaaataacaaaacagagagtccctaaatagaccaatatgtaaatgtcagagatctagcacatgataaaggtgatattttgaatcagtgggagaaggatggactgtatgccaggcactgttccaggcactgggatctagcagtgaacaaatttccacagtcagtatgtagatgtcacttttctccaccctcagctctccctggaatcacctagtccaccaaccttctgattactctctgaagagaataaatccctgatcttcttttcagttattttcaggctttcagtattccacctccccgttattattttttctgttatcttttctctgttttttgagtttttgtggctttatgccactactttaaccacaatctctatttatccttcatgtacagttcccatgttagtccataaaaatacttaagcttttgtatttaacatttttcaccgttttggaaag

SEQ ID NO: 812 - DNA, 75 bp, Homo sapiens
gacctgtggcggatccggagcccctgtggtgactgcgaaggcttcgacgtgcacatcatggacgacatgattaag

SEQ ID NO: 813 - DNA, 172 bp, Homo sapiens
gtgtgcagggaacagcaagatgtgcctcttgttcttgctgccacgcttccctgtgtcctggcgggcgggtgtggacggggctgctccttcctcacaggacctgtggcggatccggagcccctgtggtgactgcgaaggcttcgacgtgcacatcatggacgacatgattaag

SEQ ID NO: 814 - DNA, 1082 bp, Homo sapiens
gtaggccacccaggggatgttggagaaaaaagcagaggaggcgggtggggaaccttgttttcttgcaggaaccttgggtgcctgtagagcggctcaggccttgatgatttgagcttgtgttttctttctgtgtcagcacactgtggggttgaatagaagatgcttgccttttaaaaaatgcgataatttgacatacgaaatggaaatggctgagtgttgtcattttacaattgtggcttatcagaataatttaaaaatataaattaagcgtttcagaagccatgccgtgtggcctgctctgctctcattaatagccgaggcttcgattgttaaaggcattttgagatgggagagtcagctgctttgtgcaagaaaaaatggaaaagcttccttttaattttctcatcaaagcagaaccatagtcacaaagtcattttgggaagggcatttttattaaaaggatttgaaaagctttaccctggatggagagtgtatctcatttgatgagagtggttttctctcctagcttagtggctccatcactgaaagtctgggcatttctcctgtgttacttgtttacctaatcagatttccacatgaattctggttttcatggccaaagaggggatgtcacgatccatgcgtgcgtgtgaccaggaggaagggagggaaggctgtgtggcctgagtgtcctctgggttcctcttggcagggcctttttctctccccagcatcctcatgaactggagatgatgctggggagagaattggcttacagatttcttcccaaagaaatgatgttcaggatggcccggataggagtgtgcagcccccagcctaggagctctggccgactgtcccttataggagaggactcaggtgtcacgtcagagcttgcaggttcccgcccagcccagtctgttacagaaaccgttgtggatctttgttctctctgagccccttcatacttgggggtctctttcaggtgtgcagggaacagcaagatgtgcctcttgttcttgctgccacgcttccctgtgtcctggcgggcgggtgtggacggggctgctccttcctcacag

SEQ ID NO: 815 - DNA, 985 bp, Homo sapiens
gtaggccacccaggggatgttggagaaaaaagcagaggaggcgggtggggaaccttgttttcttgcaggaaccttgggtgcctgtagagcggctcaggccttgatgatttgagcttgtgttttctttctgtgtcagcacactgtggggttgaatagaagatgcttgccttttaaaaaatgcgataatttgacatacgaaatggaaatggctgagtgttgtcattttacaattgtggcttatcagaataatttaaaaatataaattaagcgtttcagaagccatgccgtgtggcctgctctgctctcattaatagccgaggcttcgattgttaaaggcattttgagatgggagagtcagctgctttgtgcaagaaaaaatggaaaagcttccttttaattttctcatcaaagcagaaccatagtcacaaagtcattttgggaagggcatttttattaaaaggatttgaaaagctttaccctggatggagagtgtatctcatttgatgagagtggttttctctcctagcttagtggctccatcactgaaagtctgggcatttctcctgtgttacttgtttacctaatcagatttccacatgaattctggttttcatggccaaagaggggatgtcacgatccatgcgtgcgtgtgaccaggaggaagggagggaaggctgtgtggcctgagtgtcctctgggttcctcttggcagggcctttttctctccccagcatcctcatgaactggagatgatgctggggagagaattggcttacagatttcttcccaaagaaatgatgttcaggatggcccggataggagtgtgcagcccccagcctaggagctctggccgactgtcccttataggagaggactcaggtgtcacgtcagagcttgcaggttcccgcccagcccagtctgttacagaaaccgttgtggatctttgttctctctgagccccttcatacttgggggtctctttcag

SEQ ID NO: 816 - DNA, 147 bp, Homo sapiens
aaagccacagagatgggcgtgcggctgatggtggatgccgagcagacctacttccagccggccatcagccgcctgacgctggagatgcagcggaagttcaatgtggagaagccgctcatcttcaacacataccagtgctacctcaag

SEQ ID NO: 817 - DNA, 108 bp, Homo sapiens
gtgagctgtcccgctcgggcagagggtacctgggactcgtggagaagagggcacctgcctcacttgagcaacagttgctcccactctcccaccccctgcgcctctcag

SEQ ID NO: 818 - DNA, 181 bp, Homo sapiens
ttgctcccactctcccaccccctgcgcctctcagaaagccacagagatgggcgtgcggctgatggtggatgccgagcagacctacttccagccggccatcagccgcctgacgctggagatgcagcggaagttcaatgtggagaagccgctcatcttcaacacataccagtgctacctcaag

SEQ ID NO: 819 - DNA, 74 bp, Homo sapiens
gtgagctgtcccgctcgggcagagggtacctgggactcgtggagaagagggcacctgcctcacttgagcaacag

SEQ ID NO: 820 - DNA, 114 bp, Homo sapiens
agcgcatgaagaggccaacgctgcccgaaaactcacagcagaacagagaaaggtcaagaaaattaaaaagcttaaagaagacatttcacagggggtacacatatctgtatatag

SEQ ID NO: 821 - DNA, 172 bp, Homo sapiens
gtaagtgccatgggattgggtggaaacctcgggcaagtacctttcccaaactcttctggggggtccatatttggagggaggggagagttctccgttgctctctctttccctcagccctgcctctgatcttcaatgcctttctcacttgtggatgtccttcctgtcacgacag

SEQ ID NO: 822 - DNA, 172 bp, Homo sapiens
ccctgcctctgatcttcaatgcctttctcacttgtggatgtccttcctgtcacgacagagcgcatgaagaggccaacgctgcccgaaaactcacagcagaacagagaaaggtcaagaaaattaaaaagcttaaagaagacatttcacagggggtacacatatctgtatatag

SEQ ID NO: 823 - DNA, 114 bp, Homo sapiens
gtaagtgccatgggattgggtggaaacctcgggcaagtacctttcccaaactcttctggggggtccatatttggagggaggggagagttctccgttgctctctctttccctcag

SEQ ID NO: 824 - DNA, 59 bp, Homo sapiens
gagtgggctttgcaagctctggtctgttcctgattgcaacctccttcacactcttcgag

SEQ ID NO: 825 - DNA, 1842 bp, Homo sapiens
gtaagttccattttacaatgacattttttcctaaatggggaacaggctcaggaagaaaattagcatttgcgttagacgtctatttctacgtcctctttctctgcttctcatgatcacaccaaactacagatgtcagtcagtgctctacctgttgtataatacaatgtagccttggtttagccgttctcgctcttcaccagtgaccccagagatccattacacaaagcactctgtcacattcttgacactagtattttggaacaggtcctgtagtgagtttatagaccaactagtatccataactcagtctggcttttctttttcagttatgtgacctcgctaagatacttaatttctgtaagcttcagtgttcttacctgtaaagtgggatgaggtagtgtttgcaaggcattttgccttgacagtgcctggtatgtagtaaggactcgttaaacgttaattattggtttatctttgttttattttcttatcaccacatatgcagaaaactcaggatgtggtaactttgttgttttgtttgagtttggttgtgtttttctgtgggacatggctatctaatgagaaaggaaacttagattgaatacacaggagctacttgactaggctgacctttagatgggttcaggagaaagccaaggttctgcacaaatgagtccacctctccaagcctcattaccttcactataaagtttgatcgttcctgccgtacctgcttcacaggtctgttagaaagatcatccgagataatagatataaaagtaatttgttgaaaaatttccaaaataagaagtctctaaaaagtttaaggccagccagccatggtggctcacacttgtaatcccagcactttggaaggccacggcaggaggatcacttgagcccaggagtttgagaccaggctgggcaacaatagtgagaccctgtctctacaaatttttttttttttttttttttttttttttttttttttttttttttttttttttgagacggagtgtcacactttcggccaggctggagtgcagtggcgcgatctcggctcactgcaagctccacctcctgggttcacgccattctcctacctcagcctcccaagtagctgggactacaggcacccgccaccgcacccagctaattttttgtatttttagtagagacagggtttcaccgtgttagccaggatgggctcgatctcctgaccttgtgatctgcccgccttggcctcccaaagtgctgggattacaggtgtgagccacagcgcctggcccaaaaaatttttaaaaatttatttaattttttaaaacgttagccaggtgtggtggcatgcgcctgttagtcccagctactcaggaggctgggtgatagaattgcttgagcctgggaggttgaggctgcagtgaactgtgatcacactactgcactccagcctaggtgacagagtgacactgtttctcaaaaaaaaaatttaaatactttgtaatcagcaaaatactattcatatttaaggacagtatcactattaatattcgtattattggatagtttaatttgccccaccttccctcacaagtggatccaaaagttaaggagaatggctactggtgtagtgttaattatagtccagtaaaagcctctggttgcgtgtgggctggaggtagctttttcttctataacccttctaactataaggcttttatttttctgtcagccattgtaaagtttattgggggtgagaagagattgtcctttagtaatattaccaaggtaccttttccttcccagaccaaccctggctgagatgctttcctttgtatttgatag

SEQ ID NO: 826 - DNA, 98 bp, Homo sapiens
accaaccctggctgagatgctttcctttgtatttgataggagtgggctttgcaagctctggtctgttcctgattgcaacctccttcacactcttcgag

SEQ ID NO: 827 - DNA, 1803 bp, Homo sapiens
gtaagttccattttacaatgacattttttcctaaatggggaacaggctcaggaagaaaattagcatttgcgttagacgtctatttctacgtcctctttctctgcttctcatgatcacaccaaactacagatgtcagtcagtgctctacctgttgtataatacaatgtagccttggtttagccgttctcgctcttcaccagtgaccccagagatccattacacaaagcactctgtcacattcttgacactagtattttggaacaggtcctgtagtgagtttatagaccaactagtatccataactcagtctggcttttctttttcagttatgtgacctcgctaagatacttaatttctgtaagcttcagtgttcttacctgtaaagtgggatgaggtagtgtttgcaaggcattttgccttgacagtgcctggtatgtagtaaggactcgttaaacgttaattattggtttatctttgttttattttcttatcaccacatatgcagaaaactcaggatgtggtaactttgttgttttgtttgagtttggttgtgtttttctgtgggacatggctatctaatgagaaaggaaacttagattgaatacacaggagctacttgactaggctgacctttagatgggttcaggagaaagccaaggttctgcacaaatgagtccacctctccaagcctcattaccttcactataaagtttgatcgttcctgccgtacctgcttcacaggtctgttagaaagatcatccgagataatagatataaaagtaatttgttgaaaaatttccaaaataagaagtctctaaaaagtttaaggccagccagccatggtggctcacacttgtaatcccagcactttggaaggccacggcaggaggatcacttgagcccaggagtttgagaccaggctgggcaacaatagtgagaccctgtctctacaaatttttttttttttttttttttttttttttttttttttttttttttttttttttgagacggagtgtcacactttcggccaggctggagtgcagtggcgcgatctcggctcactgcaagctccacctcctgggttcacgccattctcctacctcagcctcccaagtagctgggactacaggcacccgccaccgcacccagctaattttttgtatttttagtagagacagggtttcaccgtgttagccaggatgggctcgatctcctgaccttgtgatctgcccgccttggcctcccaaagtgctgggattacaggtgtgagccacagcgcctggcccaaaaaatttttaaaaatttatttaattttttaaaacgttagccaggtgtggtggcatgcgcctgttagtcccagctactcaggaggctgggtgatagaattgcttgagcctgggaggttgaggctgcagtgaactgtgatcacactactgcactccagcctaggtgacagagtgacactgtttctcaaaaaaaaaatttaaatactttgtaatcagcaaaatactattcatatttaaggacagtatcactattaatattcgtattattggatagtttaatttgccccaccttccctcacaagtggatccaaaagttaaggagaatggctactggtgtagtgttaattatagtccagtaaaagcctctggttgcgtgtgggctggaggtagctttttcttctataacccttctaactataaggcttttatttttctgtcagccattgtaaagtttattgggggtgagaagagattgtcctttagtaatattaccaaggtaccttttccttcccag

SEQ ID NO: 828 - DNA, 60 bp, Homo sapiens
agctgggttggggtcgggctccgggaatggtgggcggcggtcgccgggtggggcgcgacg

SEQ ID NO: 829 - DNA, 270 bp, Homo sapiens
agctgggttggggtcgggctccgggaatggtgggcggcggtcgccgggtggggcgcgacggtagcccagttctgggcggggtgggaacccagacgggggacccctaggcgccgggccctccctctccccgtacttttcccccttcccagtcatttcttctgcggaacctccacccctccagtgggtgcgggaccctaggcagcaggccaggcaccgccgctctgactgggggccccgaagcagttaacgggccggacagcaaagtggaaa

SEQ ID NO: 830 - DNA, 318 bp, Homo sapiens
gtagcccagttctgggcggggtgggaacccagacgggggacccctaggcgccgggccctccctctccccgtacttttcccccttcccagtcatttcttctgcggaacctccacccctccagtgggtgcgggaccctaggcagcaggccaggcaccgccgctctgactgggggccccgaagcagttaacgggccggacagcaaagtggaaagttagaccagctgggaccaggggaggtgggcacccggctgcgggaggagcggccaggctggcactgcccccctaacttgctctcgatcctgccggtctcgtcccgcag

SEQ ID NO: 831 - DNA, 108 bp, Homo sapiens
gttagaccagctgggaccaggggaggtgggcacccggctgcgggaggagcggccaggctggcactgcccccctaacttgctctcgatcctgccggtctcgtcccgcag

SEQ ID NO: 832 - DNA, 111 bp, Homo sapiens
caacacgtgcaggatggccggaaggagcgccttgagggcttcgtgaagacctttgagaaagagctctcaggagacacccacccggggatctacgccctggactgcgagatg

SEQ ID NO: 833 - DNA, 124 bp, Homo sapiens
gcactgaacgaggagaaggtggcctatgaccgcagccccagcaagaacatctacctgaatgtggccgtgaacaccctcaagaagctcaggggcctggcccccagcgctgtgcccggcctcagca

SEQ ID NO: 834 - DNA, 377 bp, Homo sapiens
gtgagccctggcgtcccagtcccctctgcctgttctcaacagacttctgcctccccatcgttggtgtggggtctcgggacacagcacagtcctgggctcagggtctgggcccccgggcagcctttcttgtgttacccagagaacgtagcacccgtaggccccaggccctgtccctggccacttcccatcctgggaagccgtcctccctgtgtcttcttggcaagcccccttccccacctgctcaccagggtcccaaccagtgaatgggcgtgatggatggataggatggtcccgaagggctcagagatgtgctgctgctgccacccccgcccccactgcaccccgaagctgccctcacctgccttctccacccccag

SEQ ID NO: 835 - DNA, 206 bp, Homo sapiens
gtgaggtcctggagttcctatctggccggtcgggtggggactaggggtccagggtggtccccagacatcccccggcctctcagccgcagctgtgacccggagctgcctgggagagatgcaagtccccgaccccatggcgaccccaccgctggggctccccggcaccaggcaggcatggcctcagctgggcaccgcctgtcccccag

SEQ ID NO: 836 - DNA, 240 bp, Homo sapiens
ggtcccaaccagtgaatgggcgtgatggatggataggatggtcccgaagggctcagagatgtgctgctgctgccacccccgcccccactgcaccccgaagctgccctcacctgccttctccacccccagcaacacgtgcaggatggccggaaggagcgccttgagggcttcgtgaagacctttgagaaagagctctcaggagacacccacccggggatctacgccctggactgcgagatg

SEQ ID NO: 837 - DNA, 247 bp, Homo sapiens
ccgcagctgtgacccggagctgcctgggagagatgcaagtccccgaccccatggcgaccccaccgctggggctccccggcaccaggcaggcatggcctcagctgggcaccgcctgtcccccaggcactgaacgaggagaaggtggcctatgaccgcagccccagcaagaacatctacctgaatgtggccgtgaacaccctcaagaagctcaggggcctggcccccagcgctgtgcccggcctcagca

SEQ ID NO: 838 - DNA, 248 bp, Homo sapiens
gtgagccctggcgtcccagtcccctctgcctgttctcaacagacttctgcctccccatcgttggtgtggggtctcgggacacagcacagtcctgggctcagggtctgggcccccgggcagcctttcttgtgttacccagagaacgtagcacccgtaggccccaggccctgtccctggccacttcccatcctgggaagccgtcctccctgtgtcttcttggcaagcccccttccccacctgctcaccag

SEQ ID NO: 839 - DNA, 83 bp, Homo sapiens
gtgaggtcctggagttcctatctggccggtcgggtggggactaggggtccagggtggtccccagacatcccccggcctctcag

SEQ ID NO: 840 - DNA, 111 bp, Homo sapiens; identical to SEQ ID NO: 832

SEQ ID NO: 841 - DNA, 124 bp, Homo sapiens; identical to SEQ ID NO: 833

SEQ ID NO: 842 - DNA, 240 bp, Homo sapiens; identical to SEQ ID NO: 836

SEQ ID NO: 843 - DNA, 247 bp, Homo sapiens; identical to SEQ ID NO: 837

SEQ ID NO: 844 - DNA, 377 bp, Homo sapiens; identical to SEQ ID NO: 834

SEQ ID NO: 845 - DNA, 206 bp, Homo sapiens; identical to SEQ ID NO: 835

SEQ ID NO: 846 - DNA, 248 bp, Homo sapiens; identical to SEQ ID NO: 838

SEQ ID NO: 847 - DNA, 83 bp, Homo sapiens; identical to SEQ ID NO: 839

SEQ ID NO: 848 - DNA, 120 bp, Homo sapiens
gaagtactgtgagagtcttgcctgttgccgcccactcagcacagccaactttggcaagatcatcagagagatcttccctgacatcaaagctcgaaggcttggtggccggggccagtccaa

SEQ ID NO: 849 - DNA, 16 bp, Homo sapiens
gaagtactgtgagagt

SEQ ID NO: 850 - DNA, 188 bp, Homo sapiens
ggactcttcgagcctacccatggcctccttctctgagtatcttcccactctgctcccctctcactcaggaagtactgtgagagtcttgcctgttgccgcccactcagcacagccaactttggcaagatcatcagagagatcttccctgacatcaaagctcgaaggcttggtggccggggccagtccaa

SEQ ID NO: 851 - DNA, 84 bp, Homo sapiens
ggactcttcgagcctacccatggcctccttctctgagtatcttcccactctgctcccctctcactcaggaagtactgtgagagt

SEQ ID NO: 852 - DNA, 191 bp, Homo sapiens
gtgggtggaggggtgggtggtgggatgagtggattggtgggcataggaccccctcacccatgaagagcttcctgccttgataaagcctgccttcttaaagggttcctcacacttgatccctagggactcttcgagcctacccatggcctccttctctgagtatcttcccactctgctcccctctcactcag

SEQ ID NO: 853 - DNA, 123 bp, Homo sapiens
gtgggtggaggggtgggtggtgggatgagtggattggtgggcataggaccccctcacccatgaagagcttcctgccttgataaagcctgccttcttaaagggttcctcacacttgatccctag

SEQ ID NO: 854 - DNA, 75 bp, Homo sapiens
gtgctgcggaacaaaggtgtgtacgagagcgtgaagtacatccagcaggagaacttctgggttggccccagctcg

SEQ ID NO: 855 - DNA, 145 bp, Homo sapiens
gtgctgcggaacaaaggtgtgtacgagagcgtgaagtacatccagcaggagaacttctgggttggccccagctcggtgagggcccaggctgggggacatcatctgagccaggagtccctgtgccctgtcactcccagctgggcag

SEQ ID NO: 856 - DNA, 195 bp, Homo sapiens
gtgagggcccaggctgggggacatcatctgagccaggagtccctgtgccctgtcactcccagctgggcaggtgggctcctcacccacccgcaggcccctcatcaggggagactctgcggggcagaggtggagtgatggacccctcccaggtctggggctcaaactcactctctcccctccctttcccttccccag

SEQ ID NO: 857 - DNA, 125 bp, Homo sapiens
gtgggctcctcacccacccgcaggcccctcatcaggggagactctgcggggcagaggtggagtgatggacccctcccaggtctggggctcaaactcactctctcccctccctttcccttccccag

SEQ ID NO: 858 - DNA, 109 bp, Homo sapiens
gacctaatgcactgcacagcatttgcaacggcagatgagtatcatctgggaaatctgtctcaagatctggcctcccacggatatgttgaagtaacaagcttgcctagag

SEQ ID NO: 859 - DNA, 135 bp, Homo sapiens
gacctaatgcactgcacagcatttgcaacggcagatgagtatcatctgggaaatctgtctcaagatctggcctcccacggatatgttgaagtaacaagcttgcctagaggtacttcttcttgaacctggggccaa

SEQ ID NO: 860 - DNA, 3215 bp, Homo sapiens
gtacttcttcttgaacctggggccaagtatgttaaaatgtattggataattttcctatgatactatcttaagtatgtatttgtttgcaattcattttcttttgaaaggattgtatcataaaagtggatgttgaatctctttataaagatgacaaagttaagaattaaaatgtatttacagagaactcattaaaatcagtatgatttattaagattatttataggatcattattacttgaggtggtcagaggtcatactacttcatttctagcacattaagaagttattttagtttgtgtgtgtctgtgtgtgttttgtgttttttttttttttgttttttgggatggagtttcactcttgttgcccaggctggagtgcaatggcgcgatctcagctcactacaacttccgcctcccaggttcaagcgattttcctgcctcagcctccggagtagctaggattacaggcatgcgccaccacacctggctaatttttgtatttttagtagagatggtgtttctccatgttggtcaggctggcctcgaactcccaacctcatctaatcctcccgcctcggcctcccaaagtgctgggattacaggtttgagccaccacacccagcccgttattttagtcttatagaagaaccatgaagttgatagacatggggagagcctttaaaaaaaaaatttaccagctcaatctaatactttaaaacaattagttagccgggtgcagtagctcacgcctgtaattgcagcactttgggaggccgaggcgggcagatcacctgaggttgggagtttgagaccaacctgaccaacatagagaaacccctgtctctactaaaaatacaaataataataataataaaacgattagttagaagataaaaatgaaaaagaagaaaattaaaatgaacttaattgaggatttttatggtgaaatcaggaaggattcttgagaaatggcttgctttacattaattaaaaataatttaggccagccatggtggctcaggcctgtaatcccagcactttgggaggctgaggtgggtggatcatttgaggtcaggagttcgagaccagcctggccaacatggtgaaaccccatctctactaaaaatacaaaaattagccaggtatggtggcacgagcctgtagtcccagctacttgggagactgagacacaagaattgcttgaacctggagggtggaggttgcagtgagctgagatcatgccactgcactccaacctgggcgacagagtgagactctgtcttaaaaaataaataaataggccgggcgtgatgcctcatacctgtaatcctgcactctgggagactgagacaggcagatcacctgaggtcaggagtttcagaccagcctgtccaacatggtgaaaccccacctttactaaaaatacaaaaattagctgggcgtggtggtacgtgcctgtaatcccagctactcaggaggctgaggcaggacaatcacttgaacctgggaggtggaggttgcaatgagccaagatcgtgccactgcactccagcctgggtgacagagcgagactctgtctcaaaaataaataagttacttagaacattttgataaacttttacagtgaaactcaggatagctcaatacccagaacatttattaatttacctaagagtagcaaaaataggttgaaagccttcctataacagtggaaattcttaagactcaatcccatagaagatagttgaaatatcattgtgataatccaaacagaccgtttgtgtgattaggtgacaaaaacaagcatagttgacttagaaagacagagctatgtctagagccccttggtatgaaaatttgcctggaggtattgttggctgatgctgaaggctgccagctgtgtggtctgtgcttcacagaattgcaggcttcactgccctgggttgtttcagtcgattttattttgcttttggctgtgtaggcaaactctgtcctatgtaggatgtagtaattaacaatttagaaaaaaaaaaaaaatcacagttttggtctgtgtctgaattgcccatcacccagcctttaccagaaatttctgaagctttgaggatcctaattttatgttaattccgttaagacatacaaccttttgcaaattaatagtatattttttaattgatatattaacattggttgtaatttatattatggaatatatgcttatgataaatatcactatactaatatataaagcaacttcttatgatgaatattggtatattagtatatgttttaacaatacttaggccaggccccgtggctcatgcttgtaatgcactttgggaggccaaggcaggcagatggcttgagctgaggagttcacgaccagcctgggcaacatagtgagacctcatctctacaaaacataaacaaaaacttagccaggtgcggtggcacatgcctgtagtctaagctacttgggaggctgaggtgggtggggcgggggggggtcccttgagttcaggaggttgaggctgcattgagctgagatcatggcactgcgcttcagcctgggagacagagcaagaccctgtctcaaaaaaaacaaacaaacaaaaaaaaaactttttttttaaatagttgcaggtggctgcagtggtagcccctgtagtgattaaccttgaaatcacatatgttttgaagtggtcagtatctttatttctgtgtattttctattgccctactttttatactttaaaattcagcaggagtagtagtttgggaatgttaaaattgcattattaatgaaatggtatttataggaagagaatatattaatacttcttcaaattttatttttaattttgtagaaagaagtttaattcttgacacttagttgtatggaacctaagactttattaattatctggactagtgattattgaatcaaaatgggcatgaatgagctctaatattaatatcacaggttgttgaatgttttataaaagtaattgctgatctttttttggtggtcgtatttgcatttttatatattaaatcctttcagaggccttagtagaaagatggtgattgtgttacagagcactccatggtatataaagaaatgatcttaagtactttattacagtgtttataggtgactcttacaacttgtgttaccttgacatagcttttttgttcgtttattttaaatcacag

SEQ ID NO: 861 - DNA, 3189 bp, Homo sapiens
gtatgttaaaatgtattggataattttcctatgatactatcttaagtatgtatttgtttgcaattcattttcttttgaaaggattgtatcataaaagtggatgttgaatctctttataaagatgacaaagttaagaattaaaatgtatttacagagaactcattaaaatcagtatgatttattaagattatttataggatcattattacttgaggtggtcagaggtcatactacttcatttctagcacattaagaagttattttagtttgtgtgtgtctgtgtgtgttttgtgttttttttttttttgttttttgggatggagtttcactcttgttgcccaggctggagtgcaatggcgcgatctcagctcactacaacttccgcctcccaggttcaagcgattttcctgcctcagcctccggagtagctaggattacaggcatgcgccaccacacctggctaatttttgtatttttagtagagatggtgtttctccatgttggtcaggctggcctcgaactcccaacctcatctaatcctcccgcctcggcctcccaaagtgctgggattacaggtttgagccaccacacccagcccgttattttagtcttatagaagaaccatgaagttgatagacatggggagagcctttaaaaaaaaaatttaccagctcaatctaatactttaaaacaattagttagccgggtgcagtagctcacgcctgtaattgcagcactttgggaggccgaggcgggcagatcacctgaggttgggagtttgagaccaacctgaccaacatagagaaacccctgtctctactaaaaatacaaataataataataataaaacgattagttagaagataaaaatgaaaaagaagaaaattaaaatgaacttaattgaggatttttatggtgaaatcaggaaggattcttgagaaatggcttgctttacattaattaaaaataatttaggccagccatggtggctcaggcctgtaatcccagcactttgggaggctgaggtgggtggatcatttgaggtcaggagttcgagaccagcctggccaacatggtgaaaccccatctctactaaaaatacaaaaattagccaggtatggtggcacgagcctgtagtcccagctacttgggagactgagacacaagaattgcttgaacctggagggtggaggttgcagtgagctgagatcatgccactgcactccaacctgggcgacagagtgagactctgtcttaaaaaataaataaataggccgggcgtgatgcctcatacctgtaatcctgcactctgggagactgagacaggcagatcacctgaggtcaggagtttcagaccagcctgtccaacatggtgaaaccccacctttactaaaaatacaaaaattagctgggcgtggtggtacgtgcctgtaatcccagctactcaggaggctgaggcaggacaatcacttgaacctgggaggtggaggttgcaatgagccaagatcgtgccactgcactccagcctgggtgacagagcgagactctgtctcaaaaataaataagttacttagaacattttgataaacttttacagtgaaactcaggatagctcaatacccagaacatttattaatttacctaagagtagcaaaaataggttgaaagccttcctataacagtggaaattcttaagactcaatcccatagaagatagttgaaatatcattgtgataatccaaacagaccgtttgtgtgattaggtgacaaaaacaagcatagttgacttagaaagacagagctatgtctagagccccttggtatgaaaatttgcctggaggtattgttggctgatgctgaaggctgccagctgtgtggtctgtgcttcacagaattgcaggcttcactgccctgggttgtttcagtcgattttattttgcttttggctgtgtaggcaaactctgtcctatgtaggatgtagtaattaacaatttagaaaaaaaaaaaaaatcacagttttggtctgtgtctgaattgcccatcacccagcctttaccagaaatttctgaagctttgaggatcctaattttatgttaattccgttaagacatacaaccttttgcaaattaatagtatattttttaattgatatattaacattggttgtaatttatattatggaatatatgcttatgataaatatcactatactaatatataaagcaacttcttatgatgaatattggtatattagtatatgttttaacaatacttaggccaggccccgtggctcatgcttgtaatgcactttgggaggccaaggcaggcagatggcttgagctgaggagttcacgaccagcctgggcaacatagtgagacctcatctctacaaaacataaacaaaaacttagccaggtgcggtggcacatgcctgtagtctaagctacttgggaggctgaggtgggtggggcgggggggggtcccttgagttcaggaggttgaggctgcattgagctgagatcatggcactgcgcttcagcctgggagacagagcaagaccctgtctcaaaaaaaacaaacaaacaaaaaaaaaactttttttttaaatagttgcaggtggctgcagtggtagcccctgtagtgattaaccttgaaatcacatatgttttgaagtggtcagtatctttatttctgtgtattttctattgccctactttttatactttaaaattcagcaggagtagtagtttgggaatgttaaaattgcattattaatgaaatggtatttataggaagagaatatattaatacttcttcaaattttatttttaattttgtagaaagaagtttaattcttgacacttagttgtatggaacctaagactttattaattatctggactagtgattattgaatcaaaatgggcatgaatgagctctaatattaatatcacaggttgttgaatgttttataaaagtaattgctgatctttttttggtggtcgtatttgcatttttatatattaaatcctttcagaggccttagtagaaagatggtgattgtgttacagagcactccatggtatataaagaaatgatcttaagtactttattacagtgtttataggtgactcttacaacttgtgttaccttgacatagcttttttgttcgtttattttaaatcacag

SEQ ID NO: 862 - DNA, 186 bp, Homo sapiens
cgtccccgccggacctggagcccgggctggaggtgggcgcggggctggcggtgcggctggcgagggtgctgcgggagcccgccttcctcgcgggcagcggcgcagcctgcggggcgctgcttctcgggctctgcgccgccctctactggcgccggaaacagcgcaaagagctcagccactacacgg

SEQ ID NO: 863 - DNA, 271 bp, Homo sapiens
ggagggagcatggccacctcccaccccaacaccaccgccactgtcctgaaactcccgaatatcgccacctccctttcctttgctggcctcttcaggctctccgtccccaacgctcacctgctctccctcaggccacccatgggccttggccccgccccctactcatggctggcagattcgtggccccacccatctcgaagcccctcggcccaggaacccaggggaagctgctgccctagcaatcctgacccggacgacagatattacaacg

SEQ ID NO: 864 - DNA, 140 bp, Homo sapiens
gccacccatgggccttggccccgccccctactcatggctggcagattcgtggccccacccatctcgaagcccctcggcccaggaacccaggggaagctgctgccctagcaatcctgacccggacgacagatattacaacg

SEQ ID NO: 865 - DNA, 700 bp, Homo sapiens
gtgagctcccggcctcggagcggacggatccgggagggagccaggcggcccatggggaggggcaggggcttagccgctggcgagtgaggaccgggtcgggagaaaggggtcgcacctggagttcagcctcttgggtaggggcgggatacgtggggcgactcgaggagctgccaggactagggagggctgcgggccaagacggggcgggatctggatgacgtttgcctctaagacgccacgaggaggccaggctttgcaaccatctccataaagaaggggcaagttcgaggacggaaagcccactcaaagggcggggggcggggcctggcaagagggggtgtggccaggatcccaggcagtaaattgtgcggcggggtctggatggaaaggcggggcccgctgaaagaaggcgatccgagttctgctacttcctagtaagggacgtctctggagagattctgaggtgtttgaggtcagtggttttcaatcttggttggctacacataggaatcacttgaggggcttgagaaaaataccgacacctgagtcccacccccgagaaattctgatgaaatgggtccagggtgcagcctgagtggtggaactgggaccggggcctaggcgtggacaagtataggggtatttctgacccttctcctcatttcacctcttctttctcccacgggttcctttctggaag

SEQ ID NO: 866 - DNA, 278 bp, Homo sapiens
gtgaggagttctcattccctcacctggcttcagcgcacttctcccgacctactggggcaaaccgaagggcgcccgggagcccggtctctctgaggttggtcagtccctggggaggatgtgagctggggaagcctctcagacctacctccaccctggtttaggatgtaaggcttgtgtgggggaagaagttgatcccgtgggatttccctttgtcttccattctgttgtcctctatgtttctgtctctgcttccgggcctccctctttcttctctgcag

SEQ ID NO: 867 - DNA, 658 bp, Homo sapiens
cgtccccgccggacctggagcccgggctggaggtgggcgcggggctggcggtgcggctggcgagggtgctgcgggagcccgccttcctcgcgggcagcggcgcagcctgcggggcgctgcttctcgggctctgcgccgccctctactggcgccggaaacagcgcaaagagctcagccactacacgggtgagctcccggcctcggagcggacggatccgggagggagccaggcggcccatggggaggggcaggggcttagccgctggcgagtgaggaccgggtcgggagaaaggggtcgcacctggagttcagcctcttgggtaggggcgggatacgtggggcgactcgaggagctgccaggactagggagggctgcgggccaagacggggcgggatctggatgacgtttgcctctaagacgccacgaggaggccaggctttgcaaccatctccataaagaaggggcaagttcgaggacggaaagcccactcaaagggcggggggcggggcctggcaagagggggtgtggccaggatcccaggcagtaaattgtgcggcggggtctggatggaaaggcggggcccgctgaaagaaggcgatccgagttctgctacttcctagtaagggacgtctctggagagattctgaggtgtttgag

SEQ ID NO: 868 - DNA, 365 bp, Homo sapiens
ggagggagcatggccacctcccaccccaacaccaccgccactgtcctgaaactcccgaatatcgccacctccctttcctttgctggcctcttcaggctctccgtccccaacgctcacctgctctccctcaggccacccatgggccttggccccgccccctactcatggctggcagattcgtggccccacccatctcgaagcccctcggcccaggaacccaggggaagctgctgccctagcaatcctgacccggacgacagatattacaacggtgaggagttctcattccctcacctggcttcagcgcacttctcccgacctactggggcaaaccgaagggcgcccgggagcccggtctctctgag

SEQ ID NO: 869 - DNA, 234 bp, Homo sapiens
gccacccatgggccttggccccgccccctactcatggctggcagattcgtggccccacccatctcgaagcccctcggcccaggaacccaggggaagctgctgccctagcaatcctgacccggacgacagatattacaacggtgaggagttctcattccctcacctggcttcagcgcacttctcccgacctactggggcaaaccgaagggcgcccgggagcccggtctctctgag

SEQ ID NO: 870 - DNA, 228 bp, Homo sapiens
gtcagtggttttcaatcttggttggctacacataggaatcacttgaggggcttgagaaaaataccgacacctgagtcccacccccgagaaattctgatgaaatgggtccagggtgcagcctgagtggtggaactgggaccggggcctaggcgtggacaagtataggggtatttctgacccttctcctcatttcacctcttctttctcccacgggttcctttctggaag

SEQ ID NO: 871 - DNA, 184 bp, Homo sapiens
gttggtcagtccctggggaggatgtgagctggggaagcctctcagacctacctccaccctggtttaggatgtaaggcttgtgtgggggaagaagttgatcccgtgggatttccctttgtcttccattctgttgtcctctatgtttctgtctctgcttccgggcctccctctttcttctctgcag

SEQ ID NO: 872 - DNA, 144 bp, Homo sapiens
ccaagtgaacccaaaaaccaagaagaaaagaaactgtcccaggtgctaaatgagttgcaagtatcacacgcagagaccacattggaactagaaaagaccagggacatgcttattctgcagcgcaaaatcaacgtgtgttatcag

SEQ ID NO: 873 - DNA, 39 bp, Homo sapiens
atgcttattctgcagcgcaaaatcaacgtgtgttatcag

SEQ ID NO: 874 - DNA, 30 bp, Homo sapiens
ctgcagcgcaaaatcaacgtgtgttatcag

SEQ ID NO: 875 - DNA, 371 bp, Homo sapiens
ccaagtgaacccaaaaaccaagaagaaaagaaactgtcccaggtgctaaatgagttgcaagtatcacacgcagagaccacattggaactagaaaagaccagggacatgcttattctgcagcgcaaaatcaacgtgtgttatcaggtgcaaggaaagatggtacaggaaggggatggataacaggaacgtgggaaccactcacaggactgggaatgaagcaagacctaagtttccagggctgataccaggtgatgtgctatcctgagcaaacacacaatggctgtcctttgaagaacttgaggactcacacatgcccacggcaccttggcactaggagccagtgatggggccagcccatgccaatggcaagc

SEQ ID NO: 876 - DNA, 266 bp, Homo sapiens
atgcttattctgcagcgcaaaatcaacgtgtgttatcaggtgcaaggaaagatggtacaggaaggggatggataacaggaacgtgggaaccactcacaggactgggaatgaagcaagacctaagtttccagggctgataccaggtgatgtgctatcctgagcaaacacacaatggctgtcctttgaagaacttgaggactcacacatgcccacggcaccttggcactaggagccagtgatggggccagcccatgccaatggcaagc

SEQ ID NO: 877 - DNA, 257 bp, Homo sapiens
ctgcagcgcaaaatcaacgtgtgttatcaggtgcaaggaaagatggtacaggaaggggatggataacaggaacgtgggaaccactcacaggactgggaatgaagcaagacctaagtttccagggctgataccaggtgatgtgctatcctgagcaaacacacaatggctgtcctttgaagaacttgaggactcacacatgcccacggcaccttggcactaggagccagtgatggggccagcccatgccaatggcaagc

SEQ ID NO: 878 - DNA, 451 bp, Homo sapiens
gtgcaaggaaagatggtacaggaaggggatggataacaggaacgtgggaaccactcacaggactgggaatgaagcaagacctaagtttccagggctgataccaggtgatgtgctatcctgagcaaacacacaatggctgtcctttgaagaacttgaggactcacacatgcccacggcaccttggcactaggagccagtgatggggccagcccatgccaatggcaagcgtaaggcttctgggttcaaattttgccagtcctaggaaccaccctacctcaatgatagcacaactagtcttggaggggtctgcaaggaaatcaaaccttcttctagtgggtgaacctgcccagctaaggatagcagtcttcttgacctagccagtgccacattttttatgctctttggttttaggccactgagatagaaaagttcagacattattttgtttcag

SEQ ID NO: 879 - DNA, 224 bp, Homo sapiens
gtaaggcttctgggttcaaattttgccagtcctaggaaccaccctacctcaatgatagcacaactagtcttggaggggtctgcaaggaaatcaaaccttcttctagtgggtgaacctgcccagctaaggatagcagtcttcttgacctagccagtgccacattttttatgctctttggttttaggccactgagatagaaaagttcagacattattttgtttcag

SEQ ID NO: 880 - DNA, 94 bp, Homo sapiens
gtggcaccttcattggggagtactgaatttcagccacttgtgcagtcaacaacacttctacctgaagcctcccatgaccagtttgtggctcaag

SEQ ID NO: 881 - DNA, 5786 bp, Homo sapiens
gtatccttttagtgaagacattctaccttcaaaaagaaaaatgacaagttggtccagacagatattttgaaagtaaatgtctaaagaacaaaattttaatgaaataagttgtagaccattatgaaatacatttagaaccaatatatcagaaattaataaaataaatgctcttaactaataaatggaatttggctcttaaataaatagtccaattcctgtgtggctccttattaggcgctcgtaggtatttgacatttgaatttgggaactgatgggtataacttaactttattttttcccttcttttgagaaaacactttgctacaagtaatccacttgaaagtaaagcgattctggttttaagtattttctaaggctatgcttccatttaaaggcacataaaatgtattgagtctttattttattagaaatgcacaatatacaacttgggacttatttttattaatggcaatatataaattttgctccttgtgctgggaactgcttccaaccctgctgtgcttcaaatttgcaactttgctttttttttttttttttaaattctagagagtatataagccttattcagtagcattaaatttttgacttgaaaggactatactatctaaaaagaaagtaattttaaacactggcatacatataagtatatgcagaaaaaatactttctgaaacatttagaaaaacttgctgaattaaaactttgaactttcattacaatatttgttccaataatttcctaaacagtgttccatattggtttttagtaattcatgttcactatatataaaattatttaactgtagaaaatactcatttgatcttcttaagaacaaaaggagcaaactcagattatttaaatggctcaggacatagggcatgaaatgaaattcgatcatgaatttcatgaacatttatctctaaaagcatgttgccttactctgatttttaacatctttattgagatataattcacataccatataattcacttgtttaaagtgtatactttattggttttaagtatattcagagttgtgcaaccgtcaccacgatcaattttaggatatttccatcatcttgcaaaaaaaccctatacccattagcagtcactccctgtctcccccattcttggcactctacggaatcactaatctactttccttctttatagatttgcccgttttggacattttgtatgaatggaatcatataacatggtcttgtgtgactggcttctttcacttagtgtgctgttttcaaggttcatccatgttctagcatgtatcagaacttcatttatttattgacaaataatattccactgtatgaatatattacagttacccattcatcacgtgatataggcatttgtgtggatatacaggctttctgttttttgtttggattacctttgattttaaatttattttattttcaagtattaacgctttttttttttttttttttttttggaggcagtctcactctgttgcccaggctggagtgcagtggcgcaatcttggctcagtgcagcctctgcctcctgggttcaggagattcttctgcctcagcctcctgagtagctgggattacagaggtgtgccggtacacctgcctaatttttgtatttttagtagagcttgggtttcatcatgttgcccaggctggtctctaacccctgacctcagatgatccacctgccttggcctcccaaagtgctgggattacagacatgagccaccatgcccgtccacaaatagtatgctttcaatgtatatttatgcaattttactctttgccaatcatttcagcacatatatatgaccaaaaaaaaaaaaaaaagcatataaaagaaagaatacccacagaaaggggaggcatgaacagaggatgaatcctcacaattttttggtgatatatgacactatcaggtatattccttttttttcaaaacttggaaataagagatcagggtgtcaaatgtcctccttagttttacaaaataaattagcaagaaaattgaaaaaatatgtatcaatttatattctgaactagctctctttacagaaaaattcaaaaaaggtttctatatatgcttgctctagaagtgctgaagatatgtaatacatattttatgaatactgaaagatttcccttgaaattgtttggacaattttcattagaattatctcaatttaattttttccatttttatttccaaagatttatcattattttttaagagacagggtctagctctgtcacccaggctggagtgcagtggcatggtcatagctcattgtagtctcgaacacctggactcaagtaatcctcctgtctcagtttcccaagtggctgggattacaggcgtaatatttgaggggaaaagaacacaaactctcatgtaaaaatgagcagaaaacatgaaaagataattcacaaaggacctaaaagtagcctttatctttggaaaaatattatacaaattaatactacccgaagatacttttttatttattaaattgccaacaattaagtattggcagtacattcttttggcgaggctgtggaaaataagcactttcatacattgttagagaaaatgcaaattagtataattttggaagggaatttggcaatagataacaaaactatgtatttacctttgattaaacaattccacttctaggaattctcttttatttatctccagcaatataaaaatacatatgtacttgataatttagcaagcattgtttgtaattataaaacatggaaacaacacaaatgcctgtaagtagaaggatagtttttgatagatatataacaatatatagataatgataaacatataacaaaattacttataaataaaatttatttttaaaataacaatggagaactacagctattagaaagagggggctgggcacagcagctcacaccaataatcctagaacttttggaggctgaggtgggagatacttttcacgatagtgagactgtatctctacaaaatataaaataaattagccaggcatggtggcacacacctgtggtctcagctactcaggaggctgaggtgggaggagcacttgagcccaggctttgaggcttcagtgagccatgattgcaccagactccagcctgggcaacagtgagaccatttctccaaaaacgaaaaaaaaaaaaaaaaaaagaggggaggatatcttcaaacagatatggaccaaattttaggaaatattgtcaagtgaagaaagaagcacaatgataaagagtatttatagtttatgatatttacagttttctacttttgcatatgaaagaaggggaaatttaaaatacgtgtatctatttgtgtagaaagaaaacaggaaggaacagctggaaatgaatgagattaattatgagaatgggtgggagttagttaggaaataagagaggatgggaacagtgtagaagagattgaggggtgggatagtgacccttctctgcatgtatcttcttgtataggttgacttttataaccatgtatgttttacttgctgaaaaaaataaaatcaacaaaaatgggaaacaataacatggaatacaaaccaattaatccagctacatttcacatgaatagcattgaagtgagagaggaagtaaccccagtaactctcagacatatttttaggactttagtcctcagactattggcaaaatgaactgtaaccaagcattgaactctagttactagttttattttttgcagtattattagttagaaattctgaaactacttattgtgttcataaggcaaggcaaataagtaaatatattgtagacaatgaaagccagaatttttactttcacataacggaaattacaaatatggaagggaaggaagatgtttaatgttggattatatttggagtgttggattatatttggagctttcagtatgaatcaattattttgttttttaagagatgaggtctcattctgtcatccaggctggaggacagtgctgtgatcatagttcactgcagttgccacctcctgggctcaagcgatcctcccacctcatcccgagtagccaggattaaaggaatgtgccgccatgcctggttcatttttaaatctttttgtagagataggtttctgtatgttgctcaggctgatcttgaactccttgcctaaagtgatcctcctaccccagcctcacaaaattctggaattacaggcaaattaatgatttttaattcgtagataaaatatgtttatgtgcccaggggtatgtatgtgcatgcatacgtatatacacacacgttttctagcttagaaacaatgacactctaaatagcaatgtatacatttagtgcccaaatcttgctttccaaactccattctccactttagggaatcgacactttggaacaaatatccaattttagagcttggacgaggaaagaacaagatgaacctggaacatcttgctgtgccagaaagtaagggaatgctcaaaggttaatggaggtgttcactaatgtagggtgcaggtaccttattactgttctaaagtctaaaagtattttggagaaaagggagctctcatacagtgttgttgggaaccactgtggagaacagtatgcaggttcctcaaaaactaaaaatagaacctaccctctgatccagcaatccagctgctgagtatatatctaaaagaaaaaaaaagtatatcgacgagatagctgcactcccatgttgattgcaacgccattcgtgatagccaagatagggaatcagtctaagttccgtcagcaaatgaatggataaagaaaatgaaccatatatgtacacaatgaaatattactcagagaaaagaatgaagtcctgtcatttgcagcaacatggatggaactggaggccattgtgttaaatgaaataagccaggcacagaaagacaaatattgcaactcatatttgggaactaaaaaaaaaaaaagttgaactcatgaaaatagagagtagaatgagggttaccagaggctaaagagtggagagccagagataaagaagggatggttagtgggtacaaaatacagttaggaggaataagatctagtgttcagtagcacaacagggtaactatagttaacaataatttattgtatagttcaaaataactaaaagaatggagttggaatgttcccaacacaaagaaatggtaaatgtttgaggtgatggatgtcccagttaccttgatttgagcattgcacatagtatgcctgtatcaaaatatcatgtgtaccccataaatatgtacaatgattatatatccataattaaaaatttaaaaataataaaaatagtaagattttactctgaagaaaacctaaagattatttgaatttggacacacctttggcccctcgagtttcagaaaaaggattgtaaatcatctttttgttctcagtgtctgaatacgtggggcatgaagtcatgttctgccctttctgacctgtctcttctgcatacgacaatgtccgtgtgtacacatctacacatctacatccacacatggtggaaggtggaggtcaggagtagtaggggtagcctgacccctaacctcaaggttaagatgagccaagaagctaaggcaattccccaactatacattatcattttcaggaactttcctatgattataagaacttttgagtattgtacatagctgtaaggtaaataataattcttatgtttattttcaataatag

SEQ ID NO: 882 - DNA, 166 bp, Homo sapiens
gtggcaccttcattggggagtactgaatttcagccacttgtgcagtcaacaacacttctacctgaagcctcccatgaccagtttgtggctcaaggtatccttttagtgaagacattctaccttcaaaaagaaaaatgacaagttggtccagacagatattttgaaa

SEQ ID NO: 883 - DNA, 5714 bp, Homo sapiens
gtaaatgtctaaagaacaaaattttaatgaaataagttgtagaccattatgaaatacatttagaaccaatatatcagaaattaataaaataaatgctcttaactaataaatggaatttggctcttaaataaatagtccaattcctgtgtggctccttattaggcgctcgtaggtatttgacatttgaatttgggaactgatgggtataacttaactttattttttcccttcttttgagaaaacactttgctacaagtaatccacttgaaagtaaagcgattctggttttaagtattttctaaggctatgcttccatttaaaggcacataaaatgtattgagtctttattttattagaaatgcacaatatacaacttgggacttatttttattaatggcaatatataaattttgctccttgtgctgggaactgcttccaaccctgctgtgcttcaaatttgcaactttgctttttttttttttttttaaattctagagagtatataagccttattcagtagcattaaatttttgacttgaaaggactatactatctaaaaagaaagtaattttaaacactggcatacatataagtatatgcagaaaaaatactttctgaaacatttagaaaaacttgctgaattaaaactttgaactttcattacaatatttgttccaataatttcctaaacagtgttccatattggtttttagtaattcatgttcactatatataaaattatttaactgtagaaaatactcatttgatcttcttaagaacaaaaggagcaaactcagattatttaaatggctcaggacatagggcatgaaatgaaattcgatcatgaatttcatgaacatttatctctaaaagcatgttgccttactctgatttttaacatctttattgagatataattcacataccatataattcacttgtttaaagtgtatactttattggttttaagtatattcagagttgtgcaaccgtcaccacgatcaattttaggatatttccatcatcttgcaaaaaaaccctatacccattagcagtcactccctgtctcccccattcttggcactctacggaatcactaatctactttccttctttatagatttgcccgttttggacattttgtatgaatggaatcatataacatggtcttgtgtgactggcttctttcacttagtgtgctgttttcaaggttcatccatgttctagcatgtatcagaacttcatttatttattgacaaataatattccactgtatgaatatattacagttacccattcatcacgtgatataggcatttgtgtggatatacaggctttctgttttttgtttggattacctttgattttaaatttattttattttcaagtattaacgctttttttttttttttttttttttggaggcagtctcactctgttgcccaggctggagtgcagtggcgcaatcttggctcagtgcagcctctgcctcctgggttcaggagattcttctgcctcagcctcctgagtagctgggattacagaggtgtgccggtacacctgcctaatttttgtatttttagtagagcttgggtttcatcatgttgcccaggctggtctctaacccctgacctcagatgatccacctgccttggcctcccaaagtgctgggattacagacatgagccaccatgcccgtccacaaatagtatgctttcaatgtatatttatgcaattttactctttgccaatcatttcagcacatatatatgaccaaaaaaaaaaaaaaaagcatataaaagaaagaatacccacagaaaggggaggcatgaacagaggatgaatcctcacaattttttggtgatatatgacactatcaggtatattccttttttttcaaaacttggaaataagagatcagggtgtcaaatgtcctccttagttttacaaaataaattagcaagaaaattgaaaaaatatgtatcaatttatattctgaactagctctctttacagaaaaattcaaaaaaggtttctatatatgcttgctctagaagtgctgaagatatgtaatacatattttatgaatactgaaagatttcccttgaaattgtttggacaattttcattagaattatctcaatttaattttttccatttttatttccaaagatttatcattattttttaagagacagggtctagctctgtcacccaggctggagtgcagtggcatggtcatagctcattgtagtctcgaacacctggactcaagtaatcctcctgtctcagtttcccaagtggctgggattacaggcgtaatatttgaggggaaaagaacacaaactctcatgtaaaaatgagcagaaaacatgaaaagataattcacaaaggacctaaaagtagcctttatctttggaaaaatattatacaaattaatactacccgaagatacttttttatttattaaattgccaacaattaagtattggcagtacattcttttggcgaggctgtggaaaataagcactttcatacattgttagagaaaatgcaaattagtataattttggaagggaatttggcaatagataacaaaactatgtatttacctttgattaaacaattccacttctaggaattctcttttatttatctccagcaatataaaaatacatatgtacttgataatttagcaagcattgtttgtaattataaaacatggaaacaacacaaatgcctgtaagtagaaggatagtttttgatagatatataacaatatatagataatgataaacatataacaaaattacttataaataaaatttatttttaaaataacaatggagaactacagctattagaaagagggggctgggcacagcagctcacaccaataatcctagaacttttggaggctgaggtgggagatacttttcacgatagtgagactgtatctctacaaaatataaaataaattagccaggcatggtggcacacacctgtggtctcagctactcaggaggctgaggtgggaggagcacttgagcccaggctttgaggcttcagtgagccatgattgcaccagactccagcctgggcaacagtgagaccatttctccaaaaacgaaaaaaaaaaaaaaaaaaagaggggaggatatcttcaaacagatatggaccaaattttaggaaatattgtcaagtgaagaaagaagcacaatgataaagagtatttatagtttatgatatttacagttttctacttttgcatatgaaagaaggggaaatttaaaatacgtgtatctatttgtgtagaaagaaaacaggaaggaacagctggaaatgaatgagattaattatgagaatgggtgggagttagttaggaaataagagaggatgggaacagtgtagaagagattgaggggtgggatagtgacccttctctgcatgtatcttcttgtataggttgacttttataaccatgtatgttttacttgctgaaaaaaataaaatcaacaaaaatgggaaacaataacatggaatacaaaccaattaatccagctacatttcacatgaatagcattgaagtgagagaggaagtaaccccagtaactctcagacatatttttaggactttagtcctcagactattggcaaaatgaactgtaaccaagcattgaactctagttactagttttattttttgcagtattattagttagaaattctgaaactacttattgtgttcataaggcaaggcaaataagtaaatatattgtagacaatgaaagccagaatttttactttcacataacggaaattacaaatatggaagggaaggaagatgtttaatgttggattatatttggagtgttggattatatttggagctttcagtatgaatcaattattttgttttttaagagatgaggtctcattctgtcatccaggctggaggacagtgctgtgatcatagttcactgcagttgccacctcctgggctcaagcgatcctcccacctcatcccgagtagccaggattaaaggaatgtgccgccatgcctggttcatttttaaatctttttgtagagataggtttctgtatgttgctcaggctgatcttgaactccttgcctaaagtgatcctcctaccccagcctcacaaaattctggaattacaggcaaattaatgatttttaattcgtagataaaatatgtttatgtgcccaggggtatgtatgtgcatgcatacgtatatacacacacgttttctagcttagaaacaatgacactctaaatagcaatgtatacatttagtgcccaaatcttgctttccaaactccattctccactttagggaatcgacactttggaacaaatatccaattttagagcttggacgaggaaagaacaagatgaacctggaacatcttgctgtgccagaaagtaagggaatgctcaaaggttaatggaggtgttcactaatgtagggtgcaggtaccttattactgttctaaagtctaaaagtattttggagaaaagggagctctcatacagtgttgttgggaaccactgtggagaacagtatgcaggttcctcaaaaactaaaaatagaacctaccctctgatccagcaatccagctgctgagtatatatctaaaagaaaaaaaaagtatatcgacgagatagctgcactcccatgttgattgcaacgccattcgtgatagccaagatagggaatcagtctaagttccgtcagcaaatgaatggataaagaaaatgaaccatatatgtacacaatgaaatattactcagagaaaagaatgaagtcctgtcatttgcagcaacatggatggaactggaggccattgtgttaaatgaaataagccaggcacagaaagacaaatattgcaactcatatttgggaactaaaaaaaaaaaaagttgaactcatgaaaatagagagtagaatgagggttaccagaggctaaagagtggagagccagagataaagaagggatggttagtgggtacaaaatacagttaggaggaataagatctagtgttcagtagcacaacagggtaactatagttaacaataatttattgtatagttcaaaataactaaaagaatggagttggaatgttcccaacacaaagaaatggtaaatgtttgaggtgatggatgtcccagttaccttgatttgagcattgcacatagtatgcctgtatcaaaatatcatgtgtaccccataaatatgtacaatgattatatatccataattaaaaatttaaaaataataaaaatagtaagattttactctgaagaaaacctaaagattatttgaatttggacacacctttggcccctcgagtttcagaaaaaggattgtaaatcatctttttgttctcagtgtctgaatacgtggggcatgaagtcatgttctgccctttctgacctgtctcttctgcatacgacaatgtccgtgtgtacacatctacacatctacatccacacatggtggaaggtggaggtcaggagtagtaggggtagcctgacccctaacctcaaggttaagatgagccaagaagctaaggcaattccccaactatacattatcattttcaggaactttcctatgattataagaacttttgagtattgtacatagctgtaaggtaaataataattcttatgtttattttcaataatag

SEQ ID NO: 884 - DNA, 120 bp, Homo sapiens
attgcgccaggctgagcgaagccgccaatctgctgagttggacaaccggctcttcaaacaggactttggagacaagatcaacagtctgcagctggaagtcgaggagctcaccaggcagcg

SEQ ID NO: 885 - DNA, 140 bp, Homo sapiens
ttcatgtggctcacatccagattgcgccaggctgagcgaagccgccaatctgctgagttggacaaccggctcttcaaacaggactttggagacaagatcaacagtctgcagctggaagtcgaggagctcaccaggcagcg

SEQ ID NO: 886 - DNA, 4192 bp, Homo sapiens
gtaaaagtcctgtttctttaatgaaacactttggattgtcagtgctgaagtgaaaagaatgtgctgtacattcggcaaatagaaaatacatgaaattcttccaaattagcatcagacattctggtagaaaaaagccagttgaatgttatgtgtgttttctaaggtatgactgaaatgtttttaggaaatgtcaatcacttgactagcctttaaaaaaaaaaaagaaaggtcagccttttatgactgttttgaacatcagaactcttaatccatgtcagagtcatgtgttagaggaaggatacttaaaagcatggaaggactcttaaatgtatgtatgtaattctgtgattttattgttcatcactgaagtctttgaatacttggatgctaggggatatagaggcactgagagataggtgtcctccaaggatctattctggatctttctctcccttctttaacccttttctcttatctcccttttctttctcctgggtagttctgtagcttccactgtcacctccagtgtgttttcccagctcttaccttcatctggagaccagtcttgagttttcatcctttgggcagctatcttccaccagtatctacaattcagtctgcccaaagcacatcttcttcctatgctactctctttctgtgcttatgtgaaaccaccattttctctctggcaacttagcagccaagagaaatggctgagtcttcaaggatgaatgtgacgtggtacccaaggtcatttgatgtttctacccttaacacctgtttgtcacccttcttgcacttgagcaaaactaaactgctggtccctgtacttcccatttttcccatttatttctttcccaatagttccaccaattagaaatgtcctaattcttcccactcccttattcgtcagatacatttttaagtttaggctcaaatgccacctccccagagtttcctctgatacctctttgcagctagaaatgatctgtctttctgggaactcccatagcttcatactcatatctatctatactgcttatggcacttctcactgtctactgtaccttttaactctttatatatgtctcctccgatgcgagtgtaagctccctgagattagttaacgaatcttttaagttcccgtattagatctgtcgcagtgccttgaatatacaagcattcattcagtagatatatgaatgaatggattaatgggtgatttcttatattcagatgattcttaaccagtaagggtcctgaacagcagtgcatattaatgttaactcaaaacttaatggcaaatttataaataaacctgaaacctcttacatagccaaatacaaatgtatcagtctacctaggaaagatggttaggtacttgctcataaacagttatatgtttatgatttaacaaaatgattttactgttcataaattgtgcttttgaaatgaaatgtatcaaatttcttttcaatgatgttttgacttggaatttaaagcaaacagaaagagaataatgacttatctctttgagtattaagctgacttattctcttgctatttttgtgtttcctgtttatccattttctcattctcctttcacttcattgtcatttttattttatttagtgaaaaggatttggtgaaacaggcaaagaccttaaatagtgcagcaaataaactgatcccaaaacatcattaggcatttttaagttggtcacgtcgcaagtccgatatcacaacttaattgtaaaaggaagaaatctgaaagttactacatttaagctctgattctatataaaatgtcaccaaaaagttgactttgaatttgttggacttttaaaaaaccagttggaaatataggttgggtttttttcttattgttttctccccagggttagaaaaattggtataagttcctaattaaaagctgaataaactttgagaaattatttctgagttgaccaataaataaaaataccactttctttaaaaaagcctagggaattgaagctctgtacatatactaatgatgcctttacaacccagtccttgataataccagattctcggtgcattgttcatgtctgtatctgcaagcctgttctgccattgcagtgtgatgaacctagaggtaactaccatgtgaacttgaactcttctaaaatagttctgtgtctcttagaccatgaccccttttcacttttgttatataggtttaatccccaagccaaggatagtacttagtatttcactacacttctattctcagtaaccaagattgcttgcaactttttttgccttggtgacttttgaaaaaaaaagaaaagaaaaagcagcatccttatatttctttaaaatacatagaaataaagttagtaattaggtaacctatgataacataataatgtggacgcctggggaaaccctcctcatgtttgtcatcttctacctctgccgttttcctgcaattccgcttcctacttaggcagttcagagagaacaattctaataaaaacactcctctcctattaacaaaaaatgatgcagtacccatttttcgtatcctgcttttcttatattggagtaaaaaggacagggtatagacatgaatgatgatattctgcctggcctgtcatttcttacctggaaacatttacttaagagtttctgttactttttgttcagatggggatttgctaaaggttctgggaagctaataattgaattattagaaaaacatttcagaataggaagtaaatgataaacttatattctttattattatttagtacaaaaatagattcccagtagatatccacaagcaatattagcagggcttctgtttctaagtgaccacagactaaccctttctaggctttaacattgtaaataatcctataaacagtttgattttttaagatgatttttgatttgaagagacaggctttacataagccttcattccttcaaaaggtcctgacaaaatacttgggtttttttctctttttttcattctggtatgctttgcagcatttcagctgctttggtggggacacagataaccccttcgcttccagctcttaaaattctttatctttttcttggcaaaaccagaattaagagtgtaagatagattccatgtgtgcttatataggtccctgcacagattggacttgaaccaaaattaagtccaaagaacatatgtttagaccaacttcatggaagtggaagatcctgtgctcttgaacttattttaattcttataatttgcacctatataaacaaagctcctactgtattcttctcttcatcaaccttttgtggtgatgggttgccttttctacgagcatttggaaggagtgatcaaataccgaaattgaactttctaaaacctacacatagcatgcgtttaaattctattatataaagccccaagtgctttaccttctaaaacatgcttctctataggtgcaaagttataagatatgtagaagaaaacatccatcagaatcttctggagaatatggtcagagtcttaaacaggcccagtgctgagttctttgtccacttagtcacacatcttttgtgggaatgggaaaggaaggagacagccaaactctgacaaaggcttttccttatagaataacccaaagcctaggtgagggttgatatataatgtcccatgatttaatatatgtggtttgggggaaaggacaagaaaaaactataattccacatataagaaggtagttgcccatttacaagttccagttatgtgtgtaaaacagaaaaattaagtaccaaacctattaggaaatttttttaaaaagtggatttaacttaaattactgtgtacttgaggttggctttggatatggattttctaaaaagtgatgttttattgtttatcatctaatggctgtaaactgtagtactagaataaaaaaaatggaaaatcagcttttcctctgcctggttcaccttcatcttacttttctttagaatttgtttcttctccatcttttcccccccataatttcttcacctgtgtcctgcaaagtttttttcctctctctgtctctctgtgcattcttccttgggttattttattttgtgttgtgaacttggtcttcttccccaccatggcttttgttttttatcacaagttcatgtggctcacatccag

SEQ ID NO: 887 - DNA, 4172 bp, Homo sapiens
gtaaaagtcctgtttctttaatgaaacactttggattgtcagtgctgaagtgaaaagaatgtgctgtacattcggcaaatagaaaatacatgaaattcttccaaattagcatcagacattctggtagaaaaaagccagttgaatgttatgtgtgttttctaaggtatgactgaaatgtttttaggaaatgtcaatcacttgactagcctttaaaaaaaaaaaagaaaggtcagccttttatgactgttttgaacatcagaactcttaatccatgtcagagtcatgtgttagaggaaggatacttaaaagcatggaaggactcttaaatgtatgtatgtaattctgtgattttattgttcatcactgaagtctttgaatacttggatgctaggggatatagaggcactgagagataggtgtcctccaaggatctattctggatctttctctcccttctttaacccttttctcttatctcccttttctttctcctgggtagttctgtagcttccactgtcacctccagtgtgttttcccagctcttaccttcatctggagaccagtcttgagttttcatcctttgggcagctatcttccaccagtatctacaattcagtctgcccaaagcacatcttcttcctatgctactctctttctgtgcttatgtgaaaccaccattttctctctggcaacttagcagccaagagaaatggctgagtcttcaaggatgaatgtgacgtggtacccaaggtcatttgatgtttctacccttaacacctgtttgtcacccttcttgcacttgagcaaaactaaactgctggtccctgtacttcccatttttcccatttatttctttcccaatagttccaccaattagaaatgtcctaattcttcccactcccttattcgtcagatacatttttaagtttaggctcaaatgccacctccccagagtttcctctgatacctctttgcagctagaaatgatctgtctttctgggaactcccatagcttcatactcatatctatctatactgcttatggcacttctcactgtctactgtaccttttaactctttatatatgtctcctccgatgcgagtgtaagctccctgagattagttaacgaatcttttaagttcccgtattagatctgtcgcagtgccttgaatatacaagcattcattcagtagatatatgaatgaatggattaatgggtgatttcttatattcagatgattcttaaccagtaagggtcctgaacagcagtgcatattaatgttaactcaaaacttaatggcaaatttataaataaacctgaaacctcttacatagccaaatacaaatgtatcagtctacctaggaaagatggttaggtacttgctcataaacagttatatgtttatgatttaacaaaatgattttactgttcataaattgtgcttttgaaatgaaatgtatcaaatttcttttcaatgatgttttgacttggaatttaaagcaaacagaaagagaataatgacttatctctttgagtattaagctgacttattctcttgctatttttgtgtttcctgtttatccattttctcattctcctttcacttcattgtcatttttattttatttagtgaaaaggatttggtgaaacaggcaaagaccttaaatagtgcagcaaataaactgatcccaaaacatcattaggcatttttaagttggtcacgtcgcaagtccgatatcacaacttaattgtaaaaggaagaaatctgaaagttactacatttaagctctgattctatataaaatgtcaccaaaaagttgactttgaatttgttggacttttaaaaaaccagttggaaatataggttgggtttttttcttattgttttctccccagggttagaaaaattggtataagttcctaattaaaagctgaataaactttgagaaattatttctgagttgaccaataaataaaaataccactttctttaaaaaagcctagggaattgaagctctgtacatatactaatgatgcctttacaacccagtccttgataataccagattctcggtgcattgttcatgtctgtatctgcaagcctgttctgccattgcagtgtgatgaacctagaggtaactaccatgtgaacttgaactcttctaaaatagttctgtgtctcttagaccatgaccccttttcacttttgttatataggtttaatccccaagccaaggatagtacttagtatttcactacacttctattctcagtaaccaagattgcttgcaactttttttgccttggtgacttttgaaaaaaaaagaaaagaaaaagcagcatccttatatttctttaaaatacatagaaataaagttagtaattaggtaacctatgataacataataatgtggacgcctggggaaaccctcctcatgtttgtcatcttctacctctgccgttttcctgcaattccgcttcctacttaggcagttcagagagaacaattctaataaaaacactcctctcctattaacaaaaaatgatgcagtacccatttttcgtatcctgcttttcttatattggagtaaaaaggacagggtatagacatgaatgatgatattctgcctggcctgtcatttcttacctggaaacatttacttaagagtttctgttactttttgttcagatggggatttgctaaaggttctgggaagctaataattgaattattagaaaaacatttcagaataggaagtaaatgataaacttatattctttattattatttagtacaaaaatagattcccagtagatatccacaagcaatattagcagggcttctgtttctaagtgaccacagactaaccctttctaggctttaacattgtaaataatcctataaacagtttgattttttaagatgatttttgatttgaagagacaggctttacataagccttcattccttcaaaaggtcctgacaaaatacttgggtttttttctctttttttcattctggtatgctttgcagcatttcagctgctttggtggggacacagataaccccttcgcttccagctcttaaaattctttatctttttcttggcaaaaccagaattaagagtgtaagatagattccatgtgtgcttatataggtccctgcacagattggacttgaaccaaaattaagtccaaagaacatatgtttagaccaacttcatggaagtggaagatcctgtgctcttgaacttattttaattcttataatttgcacctatataaacaaagctcctactgtattcttctcttcatcaaccttttgtggtgatgggttgccttttctacgagcatttggaaggagtgatcaaataccgaaattgaactttctaaaacctacacatagcatgcgtttaaattctattatataaagccccaagtgctttaccttctaaaacatgcttctctataggtgcaaagttataagatatgtagaagaaaacatccatcagaatcttctggagaatatggtcagagtcttaaacaggcccagtgctgagttctttgtccacttagtcacacatcttttgtgggaatgggaaaggaaggagacagccaaactctgacaaaggcttttccttatagaataacccaaagcctaggtgagggttgatatataatgtcccatgatttaatatatgtggtttgggggaaaggacaagaaaaaactataattccacatataagaaggtagttgcccatttacaagttccagttatgtgtgtaaaacagaaaaattaagtaccaaacctattaggaaatttttttaaaaagtggatttaacttaaattactgtgtacttgaggttggctttggatatggattttctaaaaagtgatgttttattgtttatcatctaatggctgtaaactgtagtactagaataaaaaaaatggaaaatcagcttttcctctgcctggttcaccttcatcttacttttctttagaatttgtttcttctccatcttttcccccccataatttcttcacctgtgtcctgcaaagtttttttcctctctctgtctctctgtgcattcttccttgggttattttattttgtgttgtgaacttggtcttcttccccaccatggcttttgttttttatcacaag

SEQ ID NO: 888 - DNA, 158 bp, Homo sapiens
caccagctgtacgtagcctcgcggagcgcggtggcccagatcgcgttgcaccgctgcgctgcccacggccgcgtctgcaccgaatgctgtctggcgcgtgacccctactgcgcctgggacggggtcgcgtgcacgcgcttccagcccagtgccaagag

SEQ ID NO: 889 - DNA, 283 bp, Homo sapiens
actgtgtgacctgaggcgtaagacctcagtgttcccatctgtcgagtggaagaagggatccctgaccgatgggaggcaggcgtggggtcgccctcggtcagcccagagcccctcgtgccccctagcaccagctgtacgtagcctcgcggagcgcggtggcccagatcgcgttgcaccgctgcgctgcccacggccgcgtctgcaccgaatgctgtctggcgcgtgacccctactgcgcctgggacggggtcgcgtgcacgcgcttccagcccagtgccaagag

SEQ ID NO: 890 - DNA, 248 bp, Homo sapiens
gtgagtgaccaggatgggggtcggggtgggatggactgagcttgtgcctggcgcgtcccaagcctctggccccttttggtagtttgcagtcccgggtttgagtacaggctctggctttgttagactgtgtgacctgaggcgtaagacctcagtgttcccatctgtcgagtggaagaagggatccctgaccgatgggaggcaggcgtggggtcgccctcggtcagcccagagcccctcgtgccccctag

SEQ ID NO: 891 - DNA, 123 bp, Homo sapiens
gtgagtgaccaggatgggggtcggggtgggatggactgagcttgtgcctggcgcgtcccaagcctctggccccttttggtagtttgcagtcccgggtttgagtacaggctctggctttgttag

SEQ ID NO: 892 - DNA, 89 bp, Homo sapiens
accgcgggacagtgcagaaggtcattgtgctgcccaaggatgaccaggagttggaggagctcatgctggaggaggtggaggtcttcaag

SEQ ID NO: 893 - DNA, 129 bp, Homo sapiens
catccccagccccactgaggccctgcccggcccgttccagaccgcgggacagtgcagaaggtcattgtgctgcccaaggatgaccaggagttggaggagctcatgctggaggaggtggaggtcttcaag

SEQ ID NO: 894 - DNA, 628 bp, Homo sapiens
gtacccactgctgctcccggcctctcccacgctgggcccaccgggtgcggggtgcagatccttggggctggggcttgccctgctagggcttgctgcaagctcatcagagtcacttcttcatcctcatcctttggtgccttctccctattgatgggataacagaggctaggggtgagaaaaccccattcccacttccatccccaggggcccaggagaacagggacactgggcatctggggacttatgtatgtatggcaggaaaggggtggagacagatggtaggcacctccaggatacagaggccatacacatgctcgtgtgtgcacacacatgccacagtgcaccccctacagttccagcagcccaaacacaggagaatgcatgccccagtgtcctgttctcagcagggcccaaaatcagggtctgggttggtgggggcagaccatggccatgaccccctatgtcctgggccagtcccctttgacctggggaaactcttccaccttggcacaaagctccagctccaatgccctaggggggtttgggccctggtgggggaaggggctgaggctggtaccccttccccagcatccccagccccactgaggccctgcccggcccgttccag

SEQ ID NO: 895 - DNA, 588 bp, Homo sapiens
gtacccactgctgctcccggcctctcccacgctgggcccaccgggtgcggggtgcagatccttggggctggggcttgccctgctagggcttgctgcaagctcatcagagtcacttcttcatcctcatcctttggtgccttctccctattgatgggataacagaggctaggggtgagaaaaccccattcccacttccatccccaggggcccaggagaacagggacactgggcatctggggacttatgtatgtatggcaggaaaggggtggagacagatggtaggcacctccaggatacagaggccatacacatgctcgtgtgtgcacacacatgccacagtgcaccccctacagttccagcagcccaaacacaggagaatgcatgccccagtgtcctgttctcagcagggcccaaaatcagggtctgggttggtgggggcagaccatggccatgaccccctatgtcctgggccagtcccctttgacctggggaaactcttccaccttggcacaaagctccagctccaatgccctaggggggtttgggccctggtgggggaaggggctgaggctggtaccccttccccag

SEQ ID NO: 896 - DNA, 374 bp, Homo sapiens
gcatcagacactggcgctggccggggcgctggcggtgctgggctgctcggggccgctggaggagcgcgcagccgcactgaggggactggtagagctggcgctggcgctgcggccaggggcggcgggggacctgcccgggctggctgcagtcatgggcgccctgctcatgccccaggttcgtggggagcagggactggaggaagctggagtgcgggtgactgggaagactggagaggaggcgtgctcagatctcttctcccaggtgtcccggttggagcacacgtggcgccagctccgaaggagccacacggaggctgcgctggcctttgagcaggagctgaagccgctgatgcgggctctggatgagggcgctg

SEQ ID NO: 897 - DNA, 175 bp, Homo sapiens
gcatcagacactggcgctggccggggcgctggcggtgctgggctgctcggggccgctggaggagcgcgcagccgcactgaggggactggtagagctggcgctggcgctgcggccaggggcggcgggggacctgcccgggctggctgcagtcatgggcgccctgctcatgccccag

SEQ ID NO: 898 - DNA, 397 bp, Homo sapiens
acccttgccctccacctctgcaggcatcagacactggcgctggccggggcgctggcggtgctgggctgctcggggccgctggaggagcgcgcagccgcactgaggggactggtagagctggcgctggcgctgcggccaggggcggcgggggacctgcccgggctggctgcagtcatgggcgccctgctcatgccccaggttcgtggggagcagggactggaggaagctggagtgcgggtgactgggaagactggagaggaggcgtgctcagatctcttctcccaggtgtcccggttggagcacacgtggcgccagctccgaaggagccacacggaggctgcgctggcctttgagcaggagctgaagccgctgatgcgggctctggatgagggcgctg

SEQ ID NO: 899 - DNA, 198 bp, Homo sapiens
acccttgccctccacctctgcaggcatcagacactggcgctggccggggcgctggcggtgctgggctgctcggggccgctggaggagcgcgcagccgcactgaggggactggtagagctggcgctggcgctgcggccaggggcggcgggggacctgcccgggctggctgcagtcatgggcgccctgctcatgccccag

SEQ ID NO: 900 - DNA, 190 bp, Homo sapiens
gtgagccagcagcttgtaatcttggttgggggaggccaattccccccacttcccaagatctccaaacagctccccactcatggttccccagggaagaagggagatggggcaatgccacctcctgtcccccctcacccctgcattacaaacctccccacttcccccagacccttgccctccacctctgcag

SEQ ID NO: 901 - DNA, 167 bp, Homo sapiens
gtgagccagcagcttgtaatcttggttgggggaggccaattccccccacttcccaagatctccaaacagctccccactcatggttccccagggaagaagggagatggggcaatgccacctcctgtcccccctcacccctgcattacaaacctccccacttcccccag

SEQ ID NO: 902 - DNA, 71 bp, Homo sapiens
gcagtgccagcagttacccctgtggacgaggagagctcagacggggagccagaccaggaagctgtgcagag

SEQ ID NO: 903 - DNA, 2241 bp, Homo sapiens
gtaatgtgacatctggcagtgcttgcagaagcccctgggcaggctcccctgcaaccagcgaaaggtcacctctgcccaaggaggtggtagagtgcagcttcaacatttgtgtggtctctttgctcaagccagatggcatgttccaccccacatggaagtaacagaagactacccagaaaatgtcatttctgtaagcaccattggaagtcccctaagtgacagcaataaccataagaactttttctttcctccctccttcttccttgtcccctgccttcatattgcaactctgatagtattcacaaggcacaaagcctgctcgtacctgccaagaactgtttactgaaaaggaattggagatgtgggatgacagtgatcctagctagtctggccatggacctctggcatggacttttcctttccaggagaatgaatacctcttgtactgtttgctgtgtgcttcttccacccccttgtaccaacaaagagatattgaaaaagagaatatgggattcgggccagggacagatgcaaatatccattgtttacagaaccttgttgagagatgcctaactcacagagaacggcagtgaccatcaggcatgctgtactgttcatttggcctcagttccgttagccctggtccttagctccatgcatgcccccttgtgggagttgattttcttattatccggggagggggtttcaccagaatccagcatgtattttcccagaaatacaggtgttcttcaagattatatgttttttcctttgagggaagttgaaataaaatggttttcatgggcttttggggaactttgggtgtctttatccaatggttattaaaacattaatggcttactctttggcaagttcacataacactgattactctacagtctgttaactgattttagctgaaaggggcaagatagttaagaatgaaatgagaccattttttaagaacctgccagttgctggctaggactctcatcctatccccagtagctctgtgtgagagctgctattcagaaagcagctggtcctatgtggaaagaaaaccatggcaaacaggggtgttggcaggtgggccagctccttctacagcttggccaatagaaggaaaattctggtaacttttttttttccttgatgctgttgtttctatagtttgctgataagagggtatataaggttacaaatgggccctactgggtcatgaagaaatgagaaatcaggaaatttactgcctttctaccttaaaagagacagcaatattttatcttctttgtcttagactttccttcctccaggtctaccttctttcttctttagaccaacatttcaagggtataatgcccatcagttttgatgtaataaaaaaggtgtagtgcctcttttattcatgcctccagaagagcagcagcggtggaggaagtcatccaccagacaaagagggacaatatcttattgatggtattaactaagtgctgggtctgaaagatcttccgaataaaagccatcagtttgggaactcttcgtcttgtgagactcttctgtttttattttttgccttgctttttccctccctaactaaacatttcatgtggttttatttcttcatcctccacagaatgttggttccccaaggacaacatcagtttttcttctctgatgattgagttatagtcaccaagcgagagggaaagggtggttttggaattcatttatcctcaaatggaaggatcagttttctgtgacctgtagtgaagaaagtctcaaacctggggcctgtgagatcgagagacatgcacagagtccttctgaatatctccccaggttcatctctaggaatagtccttagggctcatttcctctgacttgtattttggaaatttggagggaaaagatgaataaattaacatggagaaaataaattcttctaccgagtagaatgaagcaaggaaaagtgatctcatctttgtgagctagatctactttctctcttctcttcaatggctattcttaggttcaaaattcagccacttcattgtcaagccaacttctgttggccagttagacgtgtctcacttccatccaggcagggatctgtttgccatcaagccttcgtgagctctggcactatttcattgagtgctttggattaacttctaatgcttcttgtggaggaatattcctgtctgtcttttttactatgaaatgtgctcctgcttgttgcag

SEQ ID NO: 904 - DNA, 261 bp, Homo sapiens
gcagtgccagcagttacccctgtggacgaggagagctcagacggggagccagaccaggaagctgtgcagaggtaatgtgacatctggcagtgcttgcagaagcccctgggcaggctcccctgcaaccagcgaaaggtcacctctgcccaaggaggtggtagagtgcagcttcaacatttgtgtggtctctttgctcaagccagatggcatgttccaccccacatggaagtaacagaagactacccagaaaatgtcatttct

SEQ ID NO: 905 - DNA, 2051 bp, Homo sapiens
gtaagcaccattggaagtcccctaagtgacagcaataaccataagaactttttctttcctccctccttcttccttgtcccctgccttcatattgcaactctgatagtattcacaaggcacaaagcctgctcgtacctgccaagaactgtttactgaaaaggaattggagatgtgggatgacagtgatcctagctagtctggccatggacctctggcatggacttttcctttccaggagaatgaatacctcttgtactgtttgctgtgtgcttcttccacccccttgtaccaacaaagagatattgaaaaagagaatatgggattcgggccagggacagatgcaaatatccattgtttacagaaccttgttgagagatgcctaactcacagagaacggcagtgaccatcaggcatgctgtactgttcatttggcctcagttccgttagccctggtccttagctccatgcatgcccccttgtgggagttgattttcttattatccggggagggggtttcaccagaatccagcatgtattttcccagaaatacaggtgttcttcaagattatatgttttttcctttgagggaagttgaaataaaatggttttcatgggcttttggggaactttgggtgtctttatccaatggttattaaaacattaatggcttactctttggcaagttcacataacactgattactctacagtctgttaactgattttagctgaaaggggcaagatagttaagaatgaaatgagaccattttttaagaacctgccagttgctggctaggactctcatcctatccccagtagctctgtgtgagagctgctattcagaaagcagctggtcctatgtggaaagaaaaccatggcaaacaggggtgttggcaggtgggccagctccttctacagcttggccaatagaaggaaaattctggtaacttttttttttccttgatgctgttgtttctatagtttgctgataagagggtatataaggttacaaatgggccctactgggtcatgaagaaatgagaaatcaggaaatttactgcctttctaccttaaaagagacagcaatattttatcttctttgtcttagactttccttcctccaggtctaccttctttcttctttagaccaacatttcaagggtataatgcccatcagttttgatgtaataaaaaaggtgtagtgcctcttttattcatgcctccagaagagcagcagcggtggaggaagtcatccaccagacaaagagggacaatatcttattgatggtattaactaagtgctgggtctgaaagatcttccgaataaaagccatcagtttgggaactcttcgtcttgtgagactcttctgtttttattttttgccttgctttttccctccctaactaaacatttcatgtggttttatttcttcatcctccacagaatgttggttccccaaggacaacatcagtttttcttctctgatgattgagttatagtcaccaagcgagagggaaagggtggttttggaattcatttatcctcaaatggaaggatcagttttctgtgacctgtagtgaagaaagtctcaaacctggggcctgtgagatcgagagacatgcacagagtccttctgaatatctccccaggttcatctctaggaatagtccttagggctcatttcctctgacttgtattttggaaatttggagggaaaagatgaataaattaacatggagaaaataaattcttctaccgagtagaatgaagcaaggaaaagtgatctcatctttgtgagctagatctactttctctcttctcttcaatggctattcttaggttcaaaattcagccacttcattgtcaagccaacttctgttggccagttagacgtgtctcacttccatccaggcagggatctgtttgccatcaagccttcgtgagctctggcactatttcattgagtgctttggattaacttctaatgcttcttgtggaggaatattcctgtctgtcttttttactatgaaatgtgctcctgcttgttgcag

SEQ ID NO: 906 - DNA, 101 bp, Homo sapiens
tgtcgggcatccctgcctcaaagctggttgaagctcatggaacctttgcctctgccacctgcacagtctgccaaagacccttcccaggggaggacattcgg

SEQ ID NO: 907 - DNA, 255 bp, Homo sapiens
gtgatacgggcatgaaaaccaggcttgaggacatcacaaccccaaggggctgtgcctccttccaggagtcctgccaagcccagaagttgtgctcttggccttgcgtgctcatctcggaggcggcagcaacacttcgctttggcttgaatttcagtgtcgggcatccctgcctcaaagctggttgaagctcatggaacctttgcctctgccacctgcacagtctgccaaagacccttcccaggggaggacattcgg

SEQ ID NO: 908 - DNA, 2430 bp, Homo sapiens
gtgagccctctgtgagtcgcacacattctttttctcccacggaggctcgggtgcctgtttctcccagggaggctcgggtgcctgtttctcacaggggatgctcgggtgcctgtttctggggacggccaaaacctatcgcttatgcttcttccttgggactttttttgagccaactagttagggctttgttcccaaggaaaatgtcctctgggtgtttaaaggccactgcttgttctcctgcatacctgcagagctgtgtattttgggcagaagttgacattgttttgccaatctggtgtgatgatctctttttttcttctctcttttaagaagtgtattatggaatttttttgagcacacacaaagagagcaatgtaacgaaccgtcctgtcctcatcaccagcacacagccagttcttcctgcgtcctcaccaccttcttccaaatccccagattattttgaagcaaatctctcacatcatgaatttaatctagaaataatctataaacacatgaatggatagctctagagaatactttaaaaacaactccggccgggtgccggattacaggtgtgggatcacacctgtaatcccagcattttgggaggccgaggcaggtagatcacctgaggtcgggagttcgagaccagcctggccaacgtggcaaaaccccgtctctactaaaaatacaaaaaattagccaggcgtggtggtgtgtgcctgtaatcccaggtactcgggaggctgagacaggagaatctcttgaacccagcaggcggaggttgcagtgagccgagatcgtgccacttcactccagcctgggcgacagagggagattctgtctcaaaaaaataaataaaaataaaaataattaaaaaataaaaacaactctgatagtgattcacactgaagaatcactagtaattccttaatatggtcacacttagtctgtggtgatttcttgaccgtatccatatggtgcccaaaccagcgattcacaggttgtgccaacttctggccgtgcacctaacggaagcacttggtggggccttttccttacgtgcagtgatgcagacaggtgctgggacagtcagctctccgggagccaggctcccggagagactgctgatgtgttgtcagttaaaaagaggtggcaccttggctccaggaatgtgtttccttgccagaaggatcccctgacttggaaccacagaggcagcagcggatgccccatgttggtgggctcttctcccagaggtgcagcagggcaggccttgtgggaaggtgggagctcctggctgtgagattcagcactgctgagttagggcagcgacagggacttgggaagcctcctgcagctgggaccctggctgtgccaccgcagcctttcagaaccagttaatactaacacaactttcataagaagtcactttttgtctgtttctaccaagcaattcttttggaatttatgatatttatatcctcattttaacttggtatctgtagaatagaagatatgttcctggatattagatataaatttttgagacagggtcttggctctgttgcccaggctagagtgcagtggcatgatcatagctcactatagcctgaactcttgggccgaagtgatccttttgcctcagcctctggaatagctgggactacgggcatgcactaccatgcctggctaattaaaaaaattttttaagacaagtctcactatgttgctgaggctggtctcaaactcctggcctcaagtgatcctcctgccttggccttccaaagcactgggattacaggcatgagccactgcacccagcctggtattaggtgtaatttttttttttttttttgagacagaatctcgctctcttacccaaactggagtgcggtggcacgacctcagctcactgcaacttccacctcccgggttcaagcgattctcctgtctcagcctccccgagtagctggcactacaggtgcctgccaccacatctggctaatttttgtatttttagtagaggtacggtttcaccatgatggccaggccggtcttgaactcctagcctcaaatgatctgcccacctcggcctcccaaagtgctgggattacaggtgtgggccactgtgcccggctggatataattttatttgagcttttatcaaatggtttttcgtactgagttttgacaggctttgttttaaccgtgatttggctccagctaggtgcccctttgctcccctgccttattctggttgatggcgcatgtaggtgatacgggcatgaaaaccaggcttgaggacatcacaaccccaaggggctgtgcctccttccaggagtcctgccaagcccagaagttgtgctcttggccttgcgtgctcatctcggaggcggcagcaacacttcgctttggcttgaatttcag

SEQ ID NO: 909 - DNA, 2276 bp, Homo sapiens
gtgagccctctgtgagtcgcacacattctttttctcccacggaggctcgggtgcctgtttctcccagggaggctcgggtgcctgtttctcacaggggatgctcgggtgcctgtttctggggacggccaaaacctatcgcttatgcttcttccttgggactttttttgagccaactagttagggctttgttcccaaggaaaatgtcctctgggtgtttaaaggccactgcttgttctcctgcatacctgcagagctgtgtattttgggcagaagttgacattgttttgccaatctggtgtgatgatctctttttttcttctctcttttaagaagtgtattatggaatttttttgagcacacacaaagagagcaatgtaacgaaccgtcctgtcctcatcaccagcacacagccagttcttcctgcgtcctcaccaccttcttccaaatccccagattattttgaagcaaatctctcacatcatgaatttaatctagaaataatctataaacacatgaatggatagctctagagaatactttaaaaacaactccggccgggtgccggattacaggtgtgggatcacacctgtaatcccagcattttgggaggccgaggcaggtagatcacctgaggtcgggagttcgagaccagcctggccaacgtggcaaaaccccgtctctactaaaaatacaaaaaattagccaggcgtggtggtgtgtgcctgtaatcccaggtactcgggaggctgagacaggagaatctcttgaacccagcaggcggaggttgcagtgagccgagatcgtgccacttcactccagcctgggcgacagagggagattctgtctcaaaaaaataaataaaaataaaaataattaaaaaataaaaacaactctgatagtgattcacactgaagaatcactagtaattccttaatatggtcacacttagtctgtggtgatttcttgaccgtatccatatggtgcccaaaccagcgattcacaggttgtgccaacttctggccgtgcacctaacggaagcacttggtggggccttttccttacgtgcagtgatgcagacaggtgctgggacagtcagctctccgggagccaggctcccggagagactgctgatgtgttgtcagttaaaaagaggtggcaccttggctccaggaatgtgtttccttgccagaaggatcccctgacttggaaccacagaggcagcagcggatgccccatgttggtgggctcttctcccagaggtgcagcagggcaggccttgtgggaaggtgggagctcctggctgtgagattcagcactgctgagttagggcagcgacagggacttgggaagcctcctgcagctgggaccctggctgtgccaccgcagcctttcagaaccagttaatactaacacaactttcataagaagtcactttttgtctgtttctaccaagcaattcttttggaatttatgatatttatatcctcattttaacttggtatctgtagaatagaagatatgttcctggatattagatataaatttttgagacagggtcttggctctgttgcccaggctagagtgcagtggcatgatcatagctcactatagcctgaactcttgggccgaagtgatccttttgcctcagcctctggaatagctgggactacgggcatgcactaccatgcctggctaattaaaaaaattttttaagacaagtctcactatgttgctgaggctggtctcaaactcctggcctcaagtgatcctcctgccttggccttccaaagcactgggattacaggcatgagccactgcacccagcctggtattaggtgtaatttttttttttttttttgagacagaatctcgctctcttacccaaactggagtgcggtggcacgacctcagctcactgcaacttccacctcccgggttcaagcgattctcctgtctcagcctccccgagtagctggcactacaggtgcctgccaccacatctggctaatttttgtatttttagtagaggtacggtttcaccatgatggccaggccggtcttgaactcctagcctcaaatgatctgcccacctcggcctcccaaagtgctgggattacaggtgtgggccactgtgcccggctggatataattttatttgagcttttatcaaatggtttttcgtactgagttttgacaggctttgttttaaccgtgatttggctccagctaggtgcccctttgctcccctgccttattctggttgatggcgcatgtag

SEQ ID NO: 910 - DNA, 111 bp, Homo sapiens
tacctgaagctgcgggagcgaatgcagatacagaaggagatggagcggctgcgcttcctactgtcggatcagtcattgctgctgcttcctgagtaccatcagcgagtagag

SEQ ID NO: 911 - DNA, 174 bp, Homo sapiens
cccttgtcctcagtgcacccctgctaaggggcaaggagaaggctgacgggtggctctctgcagtacctgaagctgcgggagcgaatgcagatacagaaggagatggagcggctgcgcttcctactgtcggatcagtcattgctgctgcttcctgagtaccatcagcgagtagag

SEQ ID NO: 912 - DNA, 147 bp, Homo sapiens
gtaggaccctgggtggtaactcccaagctgggagtaggggcttttcctctgtggtcccctgtagactgaccgcccccatctcagcccttgtcctcagtgcacccctgctaaggggcaaggagaaggctgacgggtggctctctgcag

SEQ ID NO: 913 - DNA, 84 bp, Homo sapiens
gtaggaccctgggtggtaactcccaagctgggagtaggggcttttcctctgtggtcccctgtagactgaccgcccccatctcag

SEQ ID NO: 914 - DNA, 126 bp, Homo sapiens
ttactgtaatgaatgtatgttggatccagactgcggtttctgctacaagatgaacaaatcaactgtcattgactcctcctgtgttccagttaataaagcatctacaaatgaggcagcctggggcag

SEQ ID NO: 915 - DNA, 378 bp, Homo sapiens
tctctcagatccaagcctccttcagctcaaagtgacttccaaagttgctgtggccaaaagagggagaaatcgaagagaccagccagctctcacctggctcagcgcatgtcactttccttggccaaaacaagtcccaaggccccaagcttactgcacaagagagtggaaaatgcagagaagcacatggaatccagtatatggtgagcaccagttgtctctgccaacatgacggtaactcttttcatttttcagttactgtaatgaatgtatgttggatccagactgcggtttctgctacaagatgaacaaatcaactgtcattgactcctcctgtgttccagttaataaagcatctacaaatgaggcagcctggggcag

SEQ ID NO: 916 - DNA, 32765 bp, Homo sapiens
gtgagattccattatgttcttcttcctttacatgactctggtaacttttttgcttgcttttaacttttttaaagttgtagagatgagtaggagcttgctgggcatccaggcttatgtaagaagggaagaaaatgggaaaggtggtagagaggggcccctaggaagaggaatagcttgtgcagatgtgtgagtgtaaggaattaaggagagagtgggttgttagacacaatcttggtgatgtttctctggaaattaaaattagggattgatactgaatctaagcaggaattcagaaaagctattttagatcatatacaattcagtcacctctgtgttccaagcaaagtaaataactttaatcagtaatcaaacttttacaagatgcacatgccctctgaatattctgacaatttggactgatttgcatggctatcctcttattcatttaaacagaaggaaagttttccctcagtactgaggctctttcagaggatcaggaagtaaaaagtgatggtgaaagaaaacaaaatgttctaatggctagctgcaggcctaagagctcattaaatctaacagtgtacacactatgtgataaatagatcgaaaagtagataaatggatagatggactgagaacacataaatgaaactttgagtgattggacacatcgattaatatatttggcagcagagcttcaaagttttaaactggactttagccaccataaagtctagcaatccctttaaaacatatagatagaataagacctagccttaacaaaaatgtatattcctttagcttgaaatagatggacgcaagtctcaaatcaatgagtaaatgatttattaactcatacaaccctatatgaaattaaaacattataccctaaactccacttggtattcatttagagcatccagttgagcgtgaatttatggtggctgttcattacaacagtgaggaagatatattggttccaaattgtgatctatgtgcctttggaaaataggcatcatagcacgacttttattttactgataagtttgtttattattggctcactgactttcatagtctttttattgttctaagaagacttaagggtgtcttcatagtagaagttaaccatagcatctttatttggacatctgcctcaattgctagaaatgcatattctacttttctttttcttgatggatattttacttatatgtttttaacacagttactttgaaaaagtattttaaaaattactgtcatttgagaatcatagaatattctccagatctaatgtctgatgtagatgtattgttcagaaatactgttaggtcaactaaagtcagaaaatcacctaaaaattattagaaaaagttctttgaacttctgatataggaaaggaatgactgtaagtttttagtgatttacataatgaaatagttttcctgacattgactttaaagtttaaataaaaatatttattgcccaagtatatctcactgcacagcagtttatgatcatcagtctgttaatccttatgatgtaaggtattatcatctaactcatattttaatattcaattttaatgaggtaagagaagtgatacagcctacctttattcttattacaaaaataagcagccatttgtgaagatagaaccaaattttaggtgtccttcgggagtcagtggatatgaaaaacaattatttattgtatgagtaacatattaggctttgtgggaatttgacagtatgtatttatagtctaagtgattttgtaaaatatggctgcagtccgcttactgggtttttatggttaaaaccatctataatcctctgctctaccagctgagcagtaattgactgtattagttattttaaaataactaaaagagtagaattggaatgttcctaacacaaacaagtgacaattgcttgaggtgatgaatatccccattaccctgatttgatcattacacattgtatacttgtattaaaatatgacatgtaccccataaatatggtccactattatgcatacacaataattaagaataaaaaccatctatatacatttcccctttccttaagacaaacaggaaaagaatcacataataccttaagatgagtgaagttcactttgtaaatgtagatagtatgctttccccatggagtgatccgtataggaaaatttagcaaatgaaacagattttaaaggagaagtagtttaatatcttagtaacatcatattctattctattagtgggagcacaaattgttcttcattttagaaagtgatatggttctgcctaataaaagttaagtgcctatgtccattgactcagcacgtccacttgtagaaatctatagaccacagtgatgagtatgcagttcattcttactagagaagatttaagaaagtaaatggttaaagaacaatgattcttcttgattttaattcaataaatattggttgcataccaggccaaaaatattgtaggttagagctccctaatgacttgagattcaagagatcgacaaccctaaataattttcaatgaggacatctcctttttagaatattttaagtttttgattgataatgtattttccaaggcctgattcaattctctggactgaatgtattaaagaatgtctttcagaacaatgagaacatagggacacaaggaagggaactaactacacacactggcgcctgttagggggcagtggtgggggaagggagagcttttggataaatagctaatgcatgcggggcttaatacctaggtgatgggttgataggtgcagcaaaccaccatggcacatgtttacctatgtaacagacctgcacgtcctgcacatgtatcctggaacttaaaattaaatttaaaaaaaaacaccttttagatctgcttttaatagataaaagtgtgcacaaagataaagacagatgcaagttgctatagaaaatgtttggccacctgtataaaagctgtcatagggtcccagctgcagctagaagaaataacgctagcatgagtatcatctgaatcatatatctttatgagagttcacacacatatttctttttttcacacccataattccaatatgaccttcagttccacactctcaaattactaatgttctattcctttcatttccaattcaaaatattttctcataagagctagccaagatttgaggaatcaaacctttcctatgtacgcttccctcaaatacttgacgtattattatttatggtgtgatctcagtatatgtaaatcactatcataaaacatttaaaagtagacagatatttcctaaagcatacagttgtagaatttcaaggtagccttgccctagggtttttatcttattcacttattatttcttcatgcatctaaatatattatggatcacctaccataggattatagtaaggataaattaacatatggaaaatgccttaaacagtgcttggcacataataagcactcaataaacattacagtcattgttagaattaataaagcctgtaatagaagatgaagttgggatgatggcactcagagaagattaccttgagaatgggatgtttgtactgagctcttaaaagaagagtggagtatgtcacacagaaagaatggcaggtacaaagatcctgcaaggcagtaaggaacgtggcaagtgcaaggaactgaaagaagatgactatggggtcagagaagattcagataagactattaagacagatcagagccaaatcatgtagagcctcagaggtttttgatcttcagtctaagaacgtaaatccatggaagaattttaagcaggggtgtgccttgaccacattttgaattctaaactgtctctgggtgggtgtgggtgccaccaagagcatgtgttcatgtagggagactggttttttacagttgtctatgagagagatgacagttgcctggattatggtggtgacattggagataagcaggtagacagattctcagtgtattaggagagaaaaatcaataggaaatttaaaataaataattaactgtggccataggaggaaggagtctttggttggttctcaatttctgcatgagaaaaaaggtggactaaatcataaaaataagatgcagcaattggaagatgtaagaccatgcgtgcaattttggacatgtggaatctcaggtgtccatgaaccaacatcagctgggatattgaataggtatttgggaaaactggcccgtagttggaggagagttctagaatgaagaattattatccatgcatgataattaagtccatagacatgggcaacatcttgttcacaactaagatctttatcaagactctagctacctttgcaattcataatctatttgtaaaccactagtagtttactaatcaattgggcagtatctctccattcttcaggcttttaatcccagcatagaatcataagctattcatgctggaaggccttaaatgtaacctaattcaagcctttcatcttacacctacacttacatcttacttagtttccttactgaggtccaaataagtcacactcctctcctagggcacacagactaaccacctattctttaggcttctcttgtccccatacagaccttccttttttagctaacacagttctttaggagttattgttaatatgaaaccaacgacacaacagcttctttttctattcctttcaaaccttgctcttcttgctttggaccaaggacatggtttttctgttaagatgacttgtacaattaggtaattcaaggaatttaatgatgcctagcatattacctctttgatacagatcttgctatattttagactctgcttgagtagaaattgacaaaagggactatgcctctagttcattatactttttctttttaatacttctcaattaaggccagacgcaatggctcaggcgtgtaatcccagcactttgggaggccaagtcaggcggatcaccaaggtcagcagtttgagaccagcccggccaacatggtgaaaccccagctctactaaaaatacaaaaaaaaattagccaggtgcggttgtgggtgcctgtaatcccagctactcgggaagctgaggcaggagaatcacttgaacccaggaggtagaggttgcagtgagctgagatggtgccactgcactccagcctgggtgacaagagggagactctgtcttaaaaagcaaacaaacaaaaacttctcaattaagagtcttaaccagggtcatctgcagaggtacttaaagtcacctgttttccctttccagcggtcagcctcaccaggacagtggcatgttgttttgaaatgctccccaggtgatgccagtacatcttccattaagaaccactgccataatgctatcacttttttttttttttttttcagaaaaaaaaaaaaaactgccagctttctttctttttctttttttttggtttttgttttgttttgttttttgcttcttgaacattgttaaaccaagcataagaatatgatcaatgtggttctttttctgtatagtgatagtttcacattttcctcttcagatgaagttccccaaaatccaaattgacaaactgtggcttcatctgtagatggtggtgacactggttttgtgaaacagtatgcccctcataaattagtcccttcaaagttcatttccaataaaaattcattttgtattcactacactgccttttcttctccttttgccagccttgtgttatttaacaaacgcatcattaacatgagcactgtaagactgtcagattcgatcataaaacttttatgcaaccttagaaatgtgtaaaaacggtcgggcacggtgcgtcacacctgtaatcccagcactttgggaggccaaagcgggtggatcatgaggtcaggagttcgagaccagtctggccaacatagtgaaattccatctctaccaaaaatacaaaaaattagccaagtgtggtggcaggctcctataatcccagctactcgggaggctgaggcaggagaatcgcttgaacctgggaggcggaggttgcagtgagccgagatcgtgccattgcactccagcccaggcaatagtgcaagactccatctcaaacaaacaaacaaaaagaaatgtgtaaaaaccctattagcccctcttttttccccagtatttgacatcctggtaatagtgtgtttagcatcagtaattcatagcatcttgacagtgaatataatattatgctgtgaattgaaacaactttccatttgtgttaaacatttttttttcttactaatttcctataaaatgaatctgtttcaatttttttggcatggtggcacaagctaatataccatgaggttactattaataatgctacagtagaaaacaatgttgtatgtgttactaatatctacagacccattggagataaagataaatgtacataagtcaattaaaaaggaaaatgaaagttggaacaaaaagtccacataaatctcatcctgtgaccttattgccaaataactgcacatatcttttgctaacacttaaataaatacccagtgtgctgaatttgacacctggagaggattctgtccacctgtcatggaaggatacaagagcttcttggaggaagtttgccatttatgggacatattctttgagttcgccataactttttaattttgatgcctaggcttttagccacagacttacaaatcccccacttggcaagacttgctacccaaaccttggttttttgttttgttttgttttcctatagtcaaaaaatgcttcttgggaagccagaaagacaagaaggaggactcaagattaggtttgcaaagatgaaggaaaagcatttcagggagagggaatatcagggaatgtgtacaggtcctaagcagggagtatggcttcttcaaagaattgaccaacaagactgggtcataacgagcaagcaagagaatggcaccaaaataaactggatagcaggccaatgacagaacatctcaggaccttatacaccaggagaattttggacattatcttagaatactgagaagccttcaaagggtaataggatgagaatgacattatcagatttgtgtttttaaaagatcagtctggctgcagagtggaaaattgattacagacagacaaatggtgatgaagggagaaaggttaaaagaacttagtagcctaggcaagaaataacgcaaccttgatggtgacagtggatatagagaaacgagatattttggaggggaatggcaaggctgggtgattagctggataatagatgaaaataaatgctttagaaactggaaaatacttagggcaagaggaatataggatccgaaacctcactgtggtctacttagcaacataattttaggcatgtaaatctggagaccctttcctttgctctcaagttaaatacaacagtcacataatgagcacagtacttagtattttctgtaatttatatccttatttgaaaggtaattttcattccttcttgaacttaaaagacttctgagaaaggtgtttctgaggttgtccatttaggtctgaaataacagaacaagataaagggggaaaaacatgtatctctgataatccatgggacttatattcttattctagaactcttcattgcagtgaacacatgaaaccaacttggagttttattcctgtttcaagtaaatccacttaaaatagcatctgcataaacaaatgaaataaactatccaggactgtgacagcaattgactggaatcagcgtctggtgtattttcttataataaagaccaagaaaaccttacagaaaatataaatatgaaacaaggcccctaaaaaacttaactattctttaattaagtttgtatgaaacgaaaacaattcagctattaacacttaaaacactctggtatgttaagttggagtatttcccatcatgttgtaaaagcacgttacataaccttgctacgtgttccttgtctgaatagtaggaaaatacctattgctatggaccaaatgtggtttatttaaaaacaaagcataggggctgggcgcagtggctcatgcctgtaatcccagcactttgggaggccgaggtgggcaaatcacgaggtcaagagatcgagaccatcctggccaacacggtgaaaccccatctctactaaaaatacaaaaattagctgggcatggtggcatgcgcctgtagtcccagctactagggaggctgaggcaggagaaacgcttgagcccgggaggcagaggttacagtgagccgagatcacgccactgcacaccagcctggcgacagagtgagactccgtctcaaaaaataaaataaaataaataaaataaagcatagcaaagaggttaaaagaacctcttcagtgaaagtaacttggaaaactatgattttgattggctgggtgtttgggtggatggatggatggatgaatggatggatggatggatggatgcatggatagatggatgaagggttgctattgataagagaaggtagatggtgctgactaaaggaagtttttttagtataattttcatcctggaacttaggtatatgtggcaaaatttggcaacaccttgttgctatccaagagttggtgatttaggaagcatccaagcctttgtttcttcaaagtttacttctactcatggctacagcatgattagcaataccttctatgggcatgctagtagacccagcagttcaagcctgcaggtctctgggcataaaacaggtcacatagtgtttaggccatccctcagtgactcttttagattgttgtgtggtgctaataagatagtgttttcctaatattagtaagtaaataaataccaaaaaatataggtcacatgtctcttcaactgtaacatccagattgtatattgattaaattagaagactagaacaatgaaataatgtatcctgaacaacctggttttagtagctgaaagtctgcaattgtgtaagttctatacagcttaggaaatcgaagaatatagtactttagaaaaaacatttatgcacatttgtagttaattattttaataaacatttttgaaagttgcagtaggctggggtattgagatttaaaaacaaacaaacaacaacaaaaaaaacagccttcctcctcatggagctcacagctatgagggagaaaaatgcagatacgtaattgcaaaacagtgtaatgaaggctgatagatgtatcagagcatgacctggcataattcatttccccagggccatgacagaaggcttcctacatgagagtccttaaaattctcattattttggatccttttatagtgttctttaactgcataaaataaattttataaaagtacaaagcaactcaattatattgaaatacaggtgccagaatacttttaaaaataaacttgttatataaaagtacaaggcaaatcaattatattgaaatacagttgccagaatactttaaaaaataaagttattaaatagtaatgtatgtacttctttattaacacattaagtaacaaatatagccgcaagtctaataccatagtttcaacaccatagtgaatgtaaatggtatttggagatttctgcaactaccttaatgggatatgaaaatatgtgacttctgttgttgccagtagtttactgcctaccttcctaactgaaggaaatgctaaatttcagtaaaaggttaatgaaatagagatgtaattttcttttcatccaagtttacaggccccatattaaggacccgtcacagaggagggagcttgatctgatttttcaatggtgagttggagtttctcagaccaatgaaaatggagaagccacccaggcatgacagcgaactgtgcaaaagcggaaaacagatttgcccttcaagaaaattataaagcttgatactgctggagaaagggccaccaggcacaggatgatgcagaaggagaggaaaggccttggatactaggtcaaggcttgagtgaggaagggaagccagtcaacagcatcaagcaaggagggtaccatgatcaaagctgagctttacaaagagttttctgtgtgagttttgggatatagattggagggagaagagtctggcagccccagagagagattgtgagagtctgagattatctcatgatggtaagcatgaagacaaagctatttttggaaatattacaaataaatgttaaaggcaaagtatgagggaaaaggcgtttgggcaggcagttcaattttatgaatactcagtgccgattatgtggccccagccaatatacctagcaggatggagggggcataattctaagcaggctttttattttaaaataataatagtttctgttaactaagctcttacaatattcaagtattattcatattctttttgaatattacctattacccttaaactttcctgaggaagatactgttattattattattattatccaattttacagataagaaaactaaggatcagacggattatatcatttgcctaaagtgatgtaactggtatgttgcagagccattttgttctgtccacctgcctcccttagtcaagctaatggcctttatttttttttttgcttatgtcaatactatccaaagcctgtgaatattgtaggaaatgctaagtatcagttacccaagaagcaaagagaagagttttaagcccctcatattgaagggctaggtatttaaacactaggattttattttaacaaaatactgccctgaaaatcaagtaccaaatgatgaaaatcactaaaacaagagtttttaatgaaattttaccctcactacacatgccatttaattgaactaacataaaactctttcagaggtatttagtggccaaagttccttatgtaacataaatgaaattctgggttgctgcacagattcctaaacagatatagattatgggattattttctttaaatttacttctgatcacttcaccttctcagcaacccagatactggcaaagtggaagatagcttgatgaaacaccaggctgtagcagtctgactaaagcttttacagatttctaggaaaattacttaacaaaaaaaaaaagaaagaaagaaaaggaaggaaggaaggaagaaaggaaggaaaaagagaaagaaagaaagaaaagaaaagaaaggagaaaaaaatgttgcccagcttagaagtgagaggactaggtttccaaatccctgctttaagaccttgtcacaattaggagcaattccctttttttctcccaggcttatttttgattttttttttaaagagtgttagaattttggggaccctgagaaatctgtcataaagatagtatatcataaccactgttatctttccaaagtattgccaaacagcacttagatcacccacagtggttcagccttctgctagtaagatgagatgcctttattttccacaaaggatatcaagccctgaaccccacccagagagcaaagaagacacagaggtagttgcttgcaagtcaacaccattctttgtgagcgtaactaggcaatggctttgttactggtggaggatcttgaatatgagttgtccaggttcttggcgttttgagcaaagaattggacaaaacatacaaacaaagcaatgaaggaatgaaacaacaaaagcacagatttactgaaacaaaagtaaactccacagaatgggagcagactcaagcaagcgactcaagagcattggttacagaattttctgggtttaaatactctctagaggtttcccattggctatttagtttacaccctatgtgaatgaaggagtggcccacaaccagtctaattcgtctcggaaggctaccaatcagaggctgatgttacaaagttataccgctatgcaaatgaagacgaggtcacaaccaatctgattggtttcaggagaggaccaatcagaggtactttccatttttcatctgcaatgcagaaagggtggaggttacaaagggagtagcctctgatccttttgttccttgagcgtggaaagttggggttttccttttgatttagttctagaagtcagcatgaatcagccttaggttccctgcctccagaccctattcttcttcttcacctagatattctaaccttttgttaccttccaagaaaaaatgattggtactagcaatgggcagccacaggtttgttatcttctgtgagtcatgatcaatgaacaagtcctctttattctctaagcaatgctaaaacactaagcaaaccagtaatttcttgacagatttgtcacaggaattttgtaagcactttacatttgttacactgtagaaagtacatgtggattttagtcttacaactgattacagtcataatttgtgtggcagtgtttagacaactttaggcccataaagggaaatctgaccagcatttctcagaacaataccagagacgggtccatctttatttctcccttatggactcagtttgaaaacacggattcatgtgactggatgtctgatcaagatgctgttatttaccatgctagttattttatacaaacctcataacaagcagtattagataattagaaatcactttatgcatcttaaccttacccagcctcacacacacctgtgttttagtcctttctaaaccacaaatcccctgcaactgaaaatgattccataacattttccaacattgcattgttctgtgatgatagggtataaaagatatataagacattgttcccatcctcagagaagtttcagtttgtacaaaagaaatacacacaattgcctattatttatattttagcacaagggaaaataatctcatttttaaaaattcttgacacagggaaatagatggaaaataaattttgaaaacttatttttaaaccatgtaggagtacttaatttgcagtgatcaatgactcaaagctcagcatgtcttaaatattccatattgctaagcagctgataatacaaatccatccttcattccgctgcttttctcttgatgtatctagcataattggtgttttcctatgtgtgtatctgaattgcatatttcacagttactgtagaaacctattactccttggcatttagcatggatgataatgttgctccttcagtaattttagcctagaccaaacatttttgaaatggtgttgtacattagggccatcttgcttatagattaataaaatcactaacctttacactaaaaaaagtgcactgctcatttttaataattatcaatatataaagttattgtcagttaagagtcagaatgcattttttaattctcattcttccttttgtttttcttcagcctaatatgatttttatgtcataaatccattctcattagtcttcacaaacagaaaagttatttcataagaagaactgagtagcgtttttctaatttgtccattttggaaacaaatgaaatatttattttaactgattagtgtttctataaacatttaactttggctggacacggtgactcatgcctgtaatctcagcactttgtgaggccaaggcaggtggatcatctgaggtcgggagttcgagaccagcctggccaacatagtgaaaccccatctctactaaagatacaaaaattagctggatgtggtggcgcacacctgtaatcccagctactcaggaggctgaggcaagagaattgcttgaacccaggaggtagaggttgcagtgagctgaaatcgcaccactgcactgcagcctaggcaacaaagcaagactccatctcaaaaaaaaaaaaaaattaactttgtggggcctaaatattcagctcttcctgatatttcatttttatcattgtaaaatggatacattattatggcgatagatatcttcacaaaaattccgtgtgatataataaacatttgaaattgaatatagttattcacttcctaaaacaacaaatcttggcctgtgtaatcaaatttggcaagaatatattatcatccttattcatatatgttttacaattatgtgttgtgctatagctaaacacataagtaaatatcaataaatgaatgtgtaaatttttggcaattaccgtatactaatgttggcacagatacaattattgttaactttattttcatgttcatataacttaagtgtgtatgttttggcttgctatatatgactagagtaaaattcagaaacctaagcatcctaagttagtattattgcttgttatagctggaatttcagtgtatactaaagtgatcttcttttcttatgcaaactaacaatgagtgccatggctcagttcaactgcagagcaattacaagaggagttaatgctatactttctttatatttatctttttaatatccggaggctgccttattttacttaatacctagattgttgaaaaatatatcaatacaatagaaaaactcataatttttaaaactcactcatctaattatgcattaaagtactaactccttttcggttccagtagctacttatggacaaatccactgactcctttattattgtggaaggcttcccaaggctgaggagaaaggagttggttggagtcaagcaggccaaagcagggaacatgacattgcagaaagagggatagcatgtgtgcagaagaaagagagagcttaactacaatttgagttgccttttcaagaaaaatgaggaaagacacagaatccatagattttaaaccataggattaaagtaaaattatatacactaataacaaaaacagaagaagaaacaatattaccctgaaagagtattttaaaaaacaacaacagagctttgaaatctcaccagaaaaaaaagaagggagtagccatataatgcaaaaagtaaggtaggatttttatgaccttgaaatattaaagccttaaaagacagagacaacaaattgaacaaatactagaaaaggctaagaaatctacacataaatgaaactcaaataaacatgaatctatgagattccaagagagacaaacttggtaattatcctgtcagagagaaattggagcaacagaaattgtagcactaaacaaagaagcttaactgctcagttactctataaggaagagtcacaaaggaacaatttaccacctcagtcagagaagcactgagttaagatagaggcagtcatgagcacctcaataaacagcctcacaaagcaaaacaaccttgacaagctagaaaagtcatcatccttgacattactgagcttctgtctcacaaataagaggcaggggtcagccattcttcagtgggtgagattaatgggatgaagcattaactctgagacttttaggtcacctttcatgctgtccaagtaacttggaggaaccagtgtgctcgctaaatgctgcattcaccaatgcacattgagtcactgggagaatcagcattaccaatttgcaatcatatatatacagatactgttagggactctttcccacttgtttttctttttttgaatttttttttaaatctttattttaggttttgtggtacatgtgaaggtttgttatatagacaaacatgtcacaggggcttgttgtacatattattacatctcccaggtattaagctcagtacccaatagttatcttttttgttcctctccctcctcccaccctccctgctcaagtagaccccagtgtctgttgtttccttctttgtgttcataagttcttatcatttagctcccacttataagtgagaccatgtggtatttggttttctgttcctgtgttagtttgctaaggatgatagcctccagctccatccatgttcctgcaaaagatgtgatctcgtccttttttatggatgcataatattccctggtgtatatgtaccacattttctttatccagtctttcattgaagggcatttatgttgagtccatgtctttgctattgtggatagtggtacaatgaacattcccatgcatgtgtctttatggtagaatgctttacattcctctgcatatatacctagaaatgggagctgggtcaaatggtagttctgcttttagctctttgaggaattgccatactgctttccacaatgggtgaattagtttacactcctaccaacagtatattagcattcccttttctccacaacctcaccagcatctgttattttttaactttttaataatagccattctgactggtgtgagatggtttctcattgtggttttgatttgcatttctctaatgattagtgatatggaatttttttcatatgctccttggctgcacgtatgtcatcttttgagaggtgtctgttcatgtcctttgtccactttttaatggggttgtttttcttttgtaaatttgctaagttccttataaatgctggatattagacctttgtcagatgcatagtttgtaaatgttttttcacattctgtaggttgtctgtttactctgttgatagtttcttttgctgtgtgcaagcttttaggtttaattagatcccacttgtcaatttttgtttttgttgcaattggttttggtatctttgtcatgaaatctttacctgttcttaggtccaggatggtattgcctaggttgtcttccagggttttcagagctttgactttcccacttttcattctttcatttggcacacattactgaatgctaaccatgcaccaggtactgcatttgtgccaggtgttaaggaaacaaagcatgagatatagcctctcatcagaagtaggaaatatcttaggtttttatttacattttgaacccgtacacaagtatatatttagagagatgttggagacttgggtagacttgctttttcagaatatattcaaaaataagccaaaatattttttaagcatttgaaaaaaatacttgtaccacttggaatcatggtaggctgtatattacagaagaacccaaaataacagtggcttaagcaaggaagaagtctttctctctctctgtcatgtgaaataaactcaagggtaaggagttggggaccaatgtgctacatctagtatcatcaggcatccaggctcctatccttttactgtacccatacaaatgtctttcataagttcaccacatgggccagggtggctgcaggagttctaccagcatagcattcctgtgaagcaagccagaaggaaaggcagaaagagcagctcttcccagctgaatcagctccctttgaagtcttcctgaaatcccatgcaatacttctcattggacagaattaatcccttggccatatctagttgtaatgtgaactgggaaatgtattcttttgtctagcagtcgggaggagggaggtggagccacaatgtgcccagttaggaatcacatttctcttaaaaaggaggagggaagaatgaatgtagggataggccactagcaatctttgctacaacagtacagctaggggatatgttaattttatgagacatttatgagtggttctgcttgacagcaggaagtacaaatcaatggaccaaatagggattcacctactttcacgatttagttctctctgtgctcattagaagtctaaagtcaactttgcaggtgacaagaaatgtggttgtcttaaatatttaactctagctttgcaaagtaaaaggaatcattaatatctctttcatttgtcctgtttccttggcctttgaaaccagtgaaacagctaccttttgttgtgtttgttcaaaatgagtgatctgaacaaatgagtgatttccttatcttttcaaaaagaatggtcacagtatctgccatttattatatagttaacattgtgtggatcactttactaagagctttgcatggattctcttttatccttcagaaagactgagatagatgctattattttccccattttaccagtgacactgaggcttaaacaaattaagtgaggctgggcattgtggctcatgcctataatcccagcattttaggaggccgaggccagtggatcttttgagcctaggagttcaagagcagcctgggcaacgtggcaaaatcccatttctccaaaaatacaaaaaattagccacacatgttggtatgtgcctgtagactcagctactcaggaggctgaggcaggaggaacacttgagcctggaaggcagaagttgaagtaacctgagattgcaccactgcacccaccctgggtgacagagtgagatgctgtctaaaaataaaaatgaagaagttaagtgaattttagaagatcatatggtttagcggacagcagaaccatgctttaactgagaaagatctttctctagaattcagcccttaaccactaccctcttcattttgaaatttaccaattaaaatgtgatgctcctattgtccaagggagggtgtaatgtaccctttgggagtggacagtaattccttatggtcaaaggtgaataatacctataaaatacctatgttgatatactttaaagtattcaccaccttggtttttctagagcagaacaatgatcttatctatatggttctgaatgtgagcatagttgaatattctaagatgaattgttgattttattttgttttgtttgggcaattgtttttaaggcctctgttacacaggtagatgaacatgagaaaaatcattgaagacaagaagcaaatacagatgagcacttacaaagtaataccctttaggcaaattggagtatatctgtacaatcatatgagaaaatgaagtccattttgaaagctgttcttttctaagcctcctcctttagttagtgagatgaattatccatgtgaacctgaattttccttgaagaaaaggaccactgtgtgctaacattggtattttgacccaccccaacaccacttccctaattcctattggtttcattcaccttgatttaattttatgaaattttgtcagtacagtagggtctagttgtgagagcaaatgattacacagagttgctggcatcagaggacatgatgctatctagggggatgccttcaagctatctcatttcgtctgtgtcacacaacacaacttccaaccaaatgtcattctggggctccaggggctgattgtttctttcacccttcagtaaaaactcactttgtcctccacattcacacatatagtttttcatgaaaatcagaaaaccttctaaccaactatgcaagaactgagaaggaaagcactgtaagttaaaatgtgtttcttcctttgattatgttgtccctgtttgaaacacttataatatgataagcctaatgccaagtgttatagtgtttgacaaaaaatgtaaaacagatttggttaccaaggttctttcttggtgcataggaagatacttgggtaacagatacagaatcattaattactgaagcaaaatagcacaaatgggtcccaaaaagagagtcaattttaagaagtatttcctcagatgcagaaaaaatatagagtgctcactttaaaataacctaacctatattttatatcaacataaagaaaatatattaaaggcaacgtgactgcccatcacaaagaatgcagatactagatattcaaatttcaagttgtgataccccaaacagtaaaaagtaattagttttggataaaagttcttatttctaaatttataacttataaattatttttaactttatcaagtggtcactttaatttttctttttattttaaaagtcatgaatttccattagtccatattaaaaactgcatagtctcttaaattcaattgatctaaaaatgagtatttctaaagcgtattctgttggagacagaatccttgtaatatttcaagcaaaaattaactacttaagaaactaagtaaatttttctttctttaggtatttctttatctttattttaatttgtcagatgagggaagaatataatttccaaaatccatgaaaagctcagactgagttgagtagagaccccacttgcttctttcagtccacttgaagtagcattgaaagctgagtgtatgactataaatccagttgtgtttaaatgagtttgatcttcatggatactaaatacaaaacactttagtcacagatacctcactttcttgattaattatttatattttatatgttatgaatgctttcttttctaaaaagaacactgagttgcttttgaacttttattttcgaactctgaaaagtttatactaaaaattagggaatatttatgggtatgctactaggtatggaaggatatttatgagcctcttagtataagaactttatcgttacattttaaaatagtacaattctaattaaagaatatgtacctcagtgcagtgcttacattaaactttgactccatagctgttactatgaccctaaactgtgaagttaaaggactgtctatctaccctatgccttgaaatttttaaaagttctcaataagtagaaaagctagtgttaggagtactatttagaaatcagcacctgttatcaggtaacacaactagttaactatattggaaggaggcatgtgtgttgcacagctttttagggacacatcaatgtttatacaaatatgaagagagaaagtaaggcttatgtaaaggagttttcagacagtaatgatgagccccaagcaaaactgtgttcttaccttatttttatttatcctttttggtaaagctctatgacctacgtgtggagtgtgtcaccaatataatgatcagtttgtaatgctttggggggaaaaaagcatactgataacttaagacatgtgccagtaatcatatactatagctcagaaccaggatgatatagaaataagttgagctggtatagcagccaggataggataggcattactaatattaaaaaacaataacaaaatctttgtggtttaaagcaacaaacaactctgcttatatctcagatatccaaagtaatagagcctccaccattctgggatgccacctctcacttcaaggcttcaagatttatcacagaggtgaagcatagagctggagagttgagcactagcaataaatgctttggcctacaactattatttcatactctcattgtatggccacatctagtcacttggctacccctaacttcatataaggaattgtattataattctctatctaccttgaaatggagggcaagtagatattggtgaacattatttatatctttcacaatgtatttgctgatttatttggggccaagattccctattattctttctgcaaaaggccatataaaattttcattctgctggctggatcactactgtaagaagtattaatgacagataggcttgtcttagaaaacatcttctcctttggtgatgcccattaaaaatgataaaattcttcaattaacaatttctagcactgatttggaaaacctgactcattctgtaccagtatcattggtcaaagatcaagtacgaaaaagtgtgcacaaacgagtctgtcagtttttcagaaagttaatataaatatcatatgtatagttatatgacccagcaattccacccttgggcatatacccaagagaactgaaagcacgtatctactcaaaatcttctacacaaatgttcatagcaacagttttttttataaaacagcgaaaaaacgtagaaataacccaaataccccatcagctgacaaatagatacatgaagtgtgatatatcctacagtggaatattgtataactgtaaaaaacatgaactactgacaaatgctataatatggctgaaccacaaaaacatgctgggtgaaagaggccagaaacaacagagcacattgtataattacattgatataaaatgtccagaatagcaaatccatagagacaaagagtagattcgtggttgccagggggtgatgaaaagtgggaattgggaagtaaaggatttattcttgagcaatgaaaatgttccggaattggatagtggtgatgcttgtagaactctgaattattgaaatttactaaactgcaagctttaacattgttaaaatggtaaattttatatgaattttatctcagtaaaaaatttttaaaaatatgtgctatagtgagtgatcaccacttttccacgtagaactttctgcctccattttactggggagtgtaaccattgcctcctactgtatcttcacaagacaatacaagtttccaaatctatcagagtgtcacatgttagtcactatgctgatcagttttctcaatggcataactttacatttcaacaaactaaaggctgagtagaaaaaatatctgatttgaagtcagagaacctttattagagacatgagcaagtctcttagctttccaagctttgttttcttcatctgtgaaacaggaatgctcctgcatacttcaccaggataccggaaaagaccagatggtacaatatatgttaaagtactttctgtatttctaatctggtcttctacttttagttttagcttattttctttatattgttcagcctgctttcctttaaataaacttcctgtaaaaatctgaacattggaagtcaacatccttaggttggaaccccagctctgccacatttcagttatgtgaccttgcttaggtagttgaacctctgtaaatctgaggtttttctgtaaaaagggaaataaaaagcctccctcatgatgccaatgtaagaattaaatgagaacatgtaattatttagtatagcctctttgcatggtaaactgtctgtgatattagcacaataaggctcatgataaaattcaccctcaaaaatcttcatagctacaaatactagtcgacttacttggtctgtttgcaaacctaagaatttcagtctcttaagtattccttctaatttttctattctgtctcttcaataatgaataatgtatattgtcaccagagaagattagttactgtttttttctctgaaaaaagcatgttgcacactaattagattatatttgtatgtgttgattatatacaaattatatgcaaatctgattttactctgaaaagtatcaagactgaaaaagttatttatacatgtatgtatatatattatgcacacatttatttacctatatacacatatgtatatgtatatagatatacatttatatacatgttatcttacacatgcaaaattacaattgaggtttttaactatgttgatcaaacattcattcagtgtaacagaaaaacacttaacccccactggagttgacagatttggcaaatacagctctctttttcttccttctccattagagagttcattggtgcattttgttcagatgaaatgcaagaaccaacccaataattcattaaaaggattagacaatcagttgctagaaattccggcctaaaataccaatatatgttaaatcgcaaaagcaaagaaaaaccattctggctactaggctaaattgctgcctttaacagtgctagagccaaatgctcaatctgggcaggagcctggttgcttttaaacagtagacctcactactataaaattttttgcatctaactcaggagtcagttgaatcttagcctcaacgtgtaaggggaagaggtgagaaatatgactcttttacagagttccagatggtcatgtatggatttggtctgagagccgtgaattgtaaggaacaattcatggtgtgattcaagcttcaatcttgttatcttcatggactgaaatggagaacgaggtgtctgatggaactacagagaaagggaactaccaaatcttctatcaatataagtgacattcattcatctcattacttactcaacaggtatttattgagcacttatgtatcaggcaacatggaaatctctaggaataaaagctgtacagggtcttgagaaggtcacaatgcagtaagggaaagcaaacacagcatgaagctgttaagaaatcatggaatgcatgataataatatgagcgttttgtgatactctgacagtatagtgatgcctctgattctgctggggtcaggaagttgcatagaggaacatgagtcttgaagcaaaggaagtataggaaagataaggtggaaagtaacatccagagaaaacaatatgaggaaaagcatgagagcatgtcatattctaaatcctgcagtctctttggactggctagcacccacggcacctatggagaaatggcaagtagagacaggcaagatgggcaggggctaaatgatgccataaaaggagtatgattttcatcctataggcaatgggaagctctttaggatttaaaaagcagagaaatctgatcaggttagatttgaggcagtgtagagagtggagtggacagagtctagaagcaggcccctttagaagactattggaagagcccagctgagagatggctgggataagaatggagagtacaaggctgggcgtggtggctggccaacatggtgaaaccccaactctactaataatacaaaaattagccaggcatggttgcacgtgcctgtaatcccagctactcaggaagctgaggcaggaaaatcgcttaaacccaggaggcggaggttgcagtgagccaagatcacaccattgcactccagcctgggtgacagagtgagactctgtctcaaaaacaaaacaaaacaaaaaaaaagaatggagagtacaggaactatacatgcttgagacatagaattgatagaactggtagctatttaaatatgaatgttctgcaatcatgctcaggtttttagattgggagacacaaaaggaacaataggtttggcaagaaagccaaagattgagctttaggttgttgagtttgagacacttggaaaacatccagataactgggcaattggaagtgtagttctggcacttagagaagagaaacaaaggaaagaaagaggtcatgggggctcagtgtattggttatagcaatggtcatgtaaagttgatatttcccagcaaagcaatgaaagtagatggcccagaacagaagcaaaggagaaagaaaagatgaagatgccactatctgagaggtgggagaaacaaagggaatagtgtcaagcagcacaagggatgagaacattgtaggaaagagggaaaatttttagaaaatcttatcaccaaatgataatagtatgttggaaaagtgctccgagttacccatgagacaaccaccagcaatctctgggagagcagctttaatagagtggagaggataatttgcttcatgaaattagtaccagtaggcccctagccttttaaacttgtttccaactatttactcacgtgtctaagatttttttttattctcatgagtttcctacttacatggttaaacagggagaggaaatcaaccgacatctatgctctggcagggaaagaaggcaggtgttccagagttgttttcagtactgatataggaatctgtccttcacgaggctccaagcaaggcatggagtcgctgtcccgactggtagtggcggtgttctctggtaaaccagattccaagtcacctgctgaagctggtgagagcagtgaggaaggggatagtagagtatggaagtttgggaatagctgttaggggaaagagagtgacattattgcacaaaataggtgtcaattcatgcataaagaaggagtgagtgagcacaattacctgcagaaaatgaaattggacctgtggccatggatcattcctacatctgtgtttgccaccattgattttctgaaatttagggcattctagagacaggcattttaagatcaaacactgttcttagtgctccatctcattgagtttaatgagacatacttaaaaacaaatggaccgttttgcagagggctgagttcacacccagcttcacagagtagaaactaaaaatgttctaaattaactcaaatcaatttttaaaagattttctgagctgagagcacatttggccaagaccctgggtgccacgtgaaacatataaacgattgattgaatgaaaataggccatcctttctcttccttagacactaagcagccttttgtcctgctcttttttactttaattggaagcatttttaggttttagagccagttttgttctaaatatatgaatacttacttttcccctttctgaaaagtcagagattttctccctttcttttttttttttttaatttatttttttttattatactttaagttttagggtacatgtgcacattgtgcaggttagttacatatgtatacatgtgccatgctggtgcgctgcacccactaactcgtcatctagcattaggtatatctcccaatgctatccctcccccctccccccaccccaccacagtccccagagtgtgatattccccttcctgtgtccatgtgatctcattgttcagttcccacctacgagtgagaatatgcggtgtttggttttttgatcttgcgacagtttactgagaatgatgatttccaatttcatccatgtccctacaaaggacatgaactcatccttttttatggctgcgtagtattccatggtgtatatgtgccacattttcttaatccagtctatgattgttggacatttgggttggttccaagtctttgctattgtgaataatgccacaataaatatatgtgtgcatgtgtctttatagcagcatgatttatagtcatttgggtatatacccagtaatgggatggctgggtcaaatggtatttctagttctagatccctgaggaatcgccacactgacttccacaatggttgaactagtttacagtcccaccaacagtgtaaaagtgtttctatttctccacatcctctccagcacctgttgtttcctgactttttaatgattgccattctaactggtgtgagatggtatctcagagtggttttgatttgcatttctctgatggccagtgatgatgagcattttttcatgtgttttttggttgtataaatgtcttcttttgagaagtgtctgttcatgtccttcgcccactttttgatggggttgtttgtttttttcttgtaaatttgttggagttcattgtagattctggatattagccctttgtcagatgagtaggttgtgaaaattttctcccattttgtaggttgcctgttcactctgatggtagtttcttttgctgtgcagaagctctttagtttaattagatcccatttgtcaattttgtcttttgttgccattgcttttggtgttttggacatgaagtccttgcccatgcctatgtcctgaatggtaatgcctaggttttcttctagggtttttatggttttaggtctaacgtttaagtctttaatccatcttgaattgatttttgtataaggtgtaaggaagggatccagtttcagcttcctacatatggctagccagttttcccagcaccatttattaaatagggaatcctttccccattgcttgtttttctcagctttctcaaagatcagatagttgtaggtatgtggcattatttctgagggctctgttctgttccattgatctatatctctgttttggtaccagtaccatgctgttttggttactgtagccttgtagtatagtttgaagtcaggtagtgtgatgcctccagctttgttcttttggcttaggattgacttggcgatgcgggctcttttttggttccatatgaactttaaagtagttttttccaattctgtgaagaaagtcattggtagcttgatggggatggcattgaatctgtaaattaccttgggcagtatggccattttcacgatattgattcttcctacccatgagcatggaatgttcttccatttgtttgtatcctcttttatttccttgagcagtggtttgtagttctccttgaagaggtgcttcacatcccttgtaagttggattcctaggtattttattctctttgaagcaattgtgaatgggagttcactcatgatttggctctctgtttgtctgttgttggtgtataagaatgcttgtgatttttgtacattgattttgtatcctgagactttgctgaagttgcttatcagcttaaggagattttgggctgagacaatggggttttctagatatacaatcatatcgtctgcaaacagggacaatttgacttcctcttttcctaattgaataccctttatttccttctcctgcctaattgccctggccagaacttccaacactatgttgaataggagtggtgagagagggcatccctgtcttatgccgattttctccctttctgaaaagaaaggctagagattgaaaagttaaatatttcttctctgcagctagtaagaaaagaaccatttggttctaactgtacttgcctggactctaatttcctctatttgagtttctaatatatctgcattcagttcccccagcactcacatcccacagtagaggagcatcattggctattgtctaatttccccaagggaaaggtgtctacaattgagaaaaatagtctgaattccaggcacacttatttactacaaactctctaaatattgtaatgtccttttactatgaaattttgcaggctgtgatttcaaagagagctctttctttctctggcttttctgtgtgggcctcaacgaaactggcccttgctgctgttgttgctttctgaaagtgagttatcaaaattactaaccaattccattttgggtgttaatcaaatatttgtggctttcaccacgtggcaatttaaaaaccaggctcagcttaaaataccctttgacaattggttttgccttctttttatttcattctgaaaatgactaatatatttacgtcaattcatctaccccctaaaattattttccataaaccaagtacaaactagcatatgaacctacaagaatgccttgatttctagagctgttgtgcattggttaattcaataaatatatattggtgatccaccctgcagggggctgcatgctgttctacagatacagagttggtaagcatggccttatcccttgggtgctcagaatctattttgcttaccagtcagtaaagagcattgtatgttacaatgagggccatctccatcagctttactaaatgtggattagcctgaaatttaaactgtgtatcaataaggagaactccattttatttaattcattccgcaattccttttataaagcatagtccttatgtaaatatcttcatattcatttctcttataaatgtaaagtttcttaatgtagagcatacctataatttctgcccttgaaattagtatgtaagagtaaatgtttgtgagaagttgcagcattctaataggtttttacactgttaaggtttgtgtgaatttagggttagatcataggtatttctgtctttttctttcatgtacaatcttagaactgggtggattgttagacaatgtgtgctcttgagatagaaaactttgaagtctagaatttagaccttagtccaggtcacactgtggaaggggacaaataggcctaatatctgcttttcaccaaaatagaccaaaagaaaagattttagtctatgcttagagtattcttatgagcattgactttgtgccaatgtatttaaattctcagtttttatatttagaaaaccttaccgaaattcatcaggccacgttcaagaaaggcttaaagagcaaatcttgagtgaaaaatgtaatagccattcctagaagttgttcctttttaaaaatgccattgttaaagctgtcgttataatacatgctctctgtaaaaggtcaattagcagattccccaggatatttaaagttttgtgccaccttctaaatgtcaagttgaagttgggaatcttgtaatatttggaagaattttgccataaaatagtctatatgatgaaaaaacaattccaggtcaaggatgaaagagtggtaggaaatcttgtctttcctccagaagacagaggcagataagggcttagtccagattagcacaaatacagttcccacaccgagccccactccttggaatggaaaggaaattgaacactttttgatacttgacctcctttccctgaacgaaatggtatggaggggcagtatggagtagcagaaggaatagtttttcatgcttttttaataaaagaaaggctttacgcctgcacatacactatggagtatgttttgggagagatttgaaaggataaagggaagaaaataactagtgagacttggtgttggtcctggttatggccagagaaatgaaattaaaagtttggtccatgacttggaacacttgttttcagagcctggaggaaaagaggtgaggacagatatggatgtagaaatctttgtttctgagtttaaatgtgagaaaattcatgcctagtcccttcagttttttgctgagaagatgtaagggagaaaaaataatatctttttttgacctatctcaagagtcataatgggcattactgtaacaaaagagagattaacaagagaaaagcataacaaatgtatttaaccaaagttttatgtgacacagccttcaggcatgaagattgcacccagggaaaactatatatttttatgaacagttgttggaaataagagtggagaacaaaagggtacgatctaatagtaataacctgggaagaactcagtgaggcctgtttgttcagattcttcttggcctctggatatagagaaggaaccctatagactgagggtcttacgacctactttcggaggatgtaggtcagagattttttttttttttttttttttatgaccatgcttcagaggcaaaagtgtggaaaagattagggtgtgagctccaaggtgccatattatggagcagcatgttctgagccccaacaaagacaaggccatcttctaagaaatttgtggaggaataaggattgagatttgaagagaattgtgggtgtttgggaaatctatctattattggggacaggaaaagtttcctggcaacagtgagtatccagccaaggttgaaaactttgaatgtgtatttgtatcaatatgcctggttgtgttatttctctgccagtacagaatagtctagaggttgaaaagtgttcagaaagagccaaacatgaagttctgcagggtggctttaatagagaaacctaaatatgaagacattgaggatctggtgagagtggttagaaggattcacatgaaggttccatagagagggaagcagagccatggagtgagtgagagatcagtggggaatgaatgttgaaggtctctttgaggtagcagagcagttgttcttggagtaaggaagttagggaatttaaaaaaagggcgaaatatctccacaggggatctatataggtgttctagattagggatcagcaaactttaaaagggccagataggaaatattttcagctttgcaggccatatcatttttgttacaacttctcagctctgtccttaaagcatgaaggcagtcataaacaataagtaaagaaatggacatggctgtgtttctgtaaaccttttttacagagtaagtggtacgccagatttttctcaacagttgtagtttgctgatgccaggtcatagatgataataatttccaggatgtggataaatgtaagcagaagtaaagacttagaaatcagggggctaagaaactttaagatgtgtatattgactaaagccatctagatcaggatttttgagaatccgtttgaggctggtgatcatgaattatagaagagctactcatctgctctatagtgtgactccttcagctacatttggctgtgtggctgaagtcacagataaggcaaatgtttgcattcatatagggctaggatttttaccagatgggtataatggaatgatagaggagaagggaaattcaggatattgaaatgatgggaagtggtcagtaagctaaagaaaggagaaaactgataatagcaagtagaggggtcagttaactggtgatcatcaggaggtctaatacccaaatcagcttcacgagggcagtgactgttttattcactcacatgtcccagcacctagcatagtgtgtggcacatagtaggtcacaggaagatcatttaataagcaagcaggaaaagtgggaagttggggtcacgcttggatgagtggtggaggaagttatttgttatggatgacatctcatatgcctgaaatgcacacacaataagttctcagtaattattagcctttatcattatgctttttgaacttttctagggactacatattttcggagaaataaaattgagaataatttctctgcaaatgagtgagttgacctttcccaaatgagtatcatttaaggccattggaacaattagtattgttaaatttaacttcatatgggcagaatacaaaacaaaatactagtagaaattatctcctttccaaattagcctagtctggttctcaaagccagacactcagtgtacttacttctaaagccttcagttgtctagtttagtgtgcttatcaccagtgtggaaaattttatatttacattgctgaatcacctctcagtacatttgaatggcctctcttttgctttttgtctagggctgaagtgtcattcaaaaataggggtgactcaggaagagtttacaggagggagaaggctgaaatgataacaaatc

SEQ ID NO: 917 - DNA, 32765 bp, Homo sapiens; identical to SEQ ID NO: 916

SEQ ID NO: 918 - DNA, 99 bp, Homo sapiens
gttcttcctcatgtgctacctgttcgtgaacctggcctgcgccgtgcagaccctgctacgtacccccaactggcgtccacgcttcaagttctaccactg

SEQ ID NO: 919 - DNA, 647 bp, Homo sapiens
gtgaggccactcagcacgggcgtgaggagccccacaggctgggacactgggtgcctctgccactggtgaggccgctcagcacaggcgtcaggagccccacaggctgggacactgggtgcctctacaaggccagctgctctgggcctgaagaccccagcgcgtccttgactgttcctttgcggagtaagcccctgcgcagctgatgagactgcacctgaggaaggcctctggttacgaggatgcccaggtgtctgcatgtgccttgtacctcccgtggtcagcccagccttcccaggcttggggcgtagcccatcagggctgtgggtcttcttaactcccctccccaggaatcaggcgctgggtggacgcttcagccccttgttgcatgcacagccgaggtgctgtgtgcacgctgggagctggagctatgtactgggttttggagtgacagctcccacaggggcccagggagccacgtcacccctcagaggtggttgagtacagccatggtcgtcaggcgtcagtgactgttttcctagtgttaacagagagttttactgagggaggggcagtgtccgtgtggtggtggctgaggtgtgggggctgcatggcgttgggccgccccgagccacttgccccgcccccag

SEQ ID NO: 920 - DNA, 346 bp, Homo sapiens
gttcttcctcatgtgctacctgttcgtgaacctggcctgcgccgtgcagaccctgctacgtacccccaactggcgtccacgcttcaagttctaccactggtgaggccactcagcacgggcgtgaggagccccacaggctgggacactgggtgcctctgccactggtgaggccgctcagcacaggcgtcaggagccccacaggctgggacactgggtgcctctacaaggccagctgctctgggcctgaagaccccagcgcgtccttgactgttcctttgcggagtaagcccctgcgcagctgatgagactgcacctgaggaaggcctctggttacgaggatgcccag

SEQ ID NO: 921 - DNA, 400 bp, Homo sapiens
gtgtctgcatgtgccttgtacctcccgtggtcagcccagccttcccaggcttggggcgtagcccatcagggctgtgggtcttcttaactcccctccccaggaatcaggcgctgggtggacgcttcagccccttgttgcatgcacagccgaggtgctgtgtgcacgctgggagctggagctatgtactgggttttggagtgacagctcccacaggggcccagggagccacgtcacccctcagaggtggttgagtacagccatggtcgtcaggcgtcagtgactgttttcctagtgttaacagagagttttactgagggaggggcagtgtccgtgtggtggtggctgaggtgtgggggctgcatggcgttgggccgccccgagccacttgccccgcccccag

SEQ ID NO: 922 - DNA, 471 bp, Homo sapiens
actccgaggcgcgggctgcgggcggcgggcggcgggcgcaccatgccctccttcgacgaggcgctgcagcgggtgggcgagttcgggcgcttccagaggcgcgtgtttttgctgctgtgcctgacgggcgtcaccttcgccttcctcttcgtcggcgtggtcttcctgggcacgcagcccgaccactactggtgccgcgggccaagtgccgcggcgctggccgagcgctgcggctggagcccggaggaggagtggaaccgcacggcgcccgcctcccgcggcccagagccccccgagcgccgcggccgctgccagcgctacctcctggaggcggccaacgacagcgcctccgccactagcgctctcagctgcgcggacccactcgccgccttccccaaccgctcggctccccttgtgccgtgccgcggcggctggcgctacgcccaggcccactccaccatcgtcagcgag

SEQ ID NO: 923 - DNA, 681 bp, Homo sapiens
actccgaggcgcgggctgcgggcggcgggcggcgggcgcaccatgccctccttcgacgaggcgctgcagcgggtgggcgagttcgggcgcttccagaggcgcgtgtttttgctgctgtgcctgacgggcgtcaccttcgccttcctcttcgtcggcgtggtcttcctgggcacgcagcccgaccactactggtgccgcgggccaagtgccgcggcgctggccgagcgctgcggctggagcccggaggaggagtggaaccgcacggcgcccgcctcccgcggcccagagccccccgagcgccgcggccgctgccagcgctacctcctggaggcggccaacgacagcgcctccgccactagcgctctcagctgcgcggacccactcgccgccttccccaaccgctcggctccccttgtgccgtgccgcggcggctggcgctacgcccaggcccactccaccatcgtcagcgaggtaagggcgccccggccctttggaagccggcgggagaggacgatgctggctcccaggcggacaagccgcgtgtgagacgctggccgccaggggaggtcggtggagacggggaccggtcggctacctctggggacagacaggattcagcgcacccttggaagtgccgcgtcgtaaatgctgggaaaagcctttcgttatctgcctgagccc

SEQ ID NO: 924 - DNA, 32765 bp, Homo sapiens
gtaagggcgccccggccctttggaagccggcgggagaggacgatgctggctcccaggcggacaagccgcgtgtgagacgctggccgccaggggaggtcggtggagacggggaccggtcggctacctctggggacagacaggattcagcgcacccttggaagtgccgcgtcgtaaatgctgggaaaagcctttcgttatctgcctgagcccgtgagttaatgcacagatactttggtttcgggtgtgaacaaaaactttcttcgaagccgagttgtaaacgcctggcgcacgcctgctcaggagtcaaagacccagcaccgcgttccttatctttgaggtgtgcgggcgccgtcattggaaattatggttaggtgcgcgatagggaacttcagtctctggggtgagcgacgttggcagttccggattcgcttatggtctccagggtcaaaggaaagggcgaaccaacgtttgaaggcagcagcagcttttttccagttgcccaaatggttactcaaaatgcaaggggacaaaggtcgaggctttcccggggaatggttttggtaaaattgctttggggcaaagagcaacatctgggataagttgggaaaactgaagtattggataaattttagtttttttttctggtaataaattttaggaacatagcgggagggccacagccttccaacgcaaatccccaacccatttacaggcggaggctgctgccggcgggtgggcgggggcgatccccacattttgggcagtcagtgcatttggaagttaggggagcttccttcacccttgccctcagtaatctgtttctgcatccttgctgaaatggaagattgcctctctgtgaggtccagatatagagcagagtcactttgtaataatcggaactcagaaacggcctcaattgagcatgggttgcagagatgagcagttttactgagctttgtctacaatcacagcttaagttaattttaaaaaaagattgaatgtgatcaggtacattaggaaaaaaggtttgtcttttttttgtgataaactttaaaaaatcacctacttgaagagtggggaaaacactggatgaggaggtaggagcgccctttctgccgctgttgctgttggtctggtgagcttatctcgctgcagttgggagtgtcggtggttgcaattgtacatgttttatacgccatgtgctggtgtgttcgcacagtggatggctctatgctatgtgctccagggataaaacccatggcaggacagccaggcgatgtgtgtatgtgtttgggatctttctgtaacgccgtgtgctgctgtgttcgcacagtggatggctctatgctaagtgctccagggataaaaccccctggcaggacagccaggcaatgtgtatgtgtgttcagggtgtttctataatgccacatgcaagtgtgttcgcacactgagtggctctatgctgagtgatctcaggataaacccccctggcaagacagccaggcaatacatatgtgtgttgggatctttaatttctacttaatccatggtaaggctggggactgctttataattggtgatggtctggttagagatttcacagttgaaaggacagggcatggacttggatgagagagggcattatctctgtgagtcgcatctgttaggtggcttcttccactccactcagcagcgctgcctaatgcttacttcccaagtgaaccagaggacccacatggagggcagacagctgatttttggagacatttaaagatgaagaataaaacgagcctcaacaagtgctcaagcgaggtttgcatgagtgagtatgatccatggacatcaaagaagacagacataaaaatctgtaatttaatgctctgacggatactttggaagcattctggagttgcagggttactagcatcccggggttacaataaggtgattttatgaagatcagtggctactaaaatgcagtgtggaatgatggagggtcaggggctggctcggtctccagctggctgtgtggcttgggtgagttactcgccttctctgggcttgtatttttcctctgtaaaattagccattggattcagcccgttacaatgctccaaatgccatcagggtcaccacctggttactgtttggtgtgcccagaacaatgattaaaaagtctttaagaaagtagaatgatattaggaatgtaccccgtaaagccccaaaaaagtttttgaaatatattggagagattcttttttgttttgttttgttttgttttctttgagacggagtctctctctgtcgcccaggctggtgtgcagtggcgtgatctcggcttactgcaagctccgcctcccaggttcctgccattctcctgcctcagcctcccgaatagctgggactacaggcgactgccaccatgcccggctaattttttgtatttttagtagaggcggggtttcactgtgttagccaggatggtctcgatctcctgacctcgtgatccgcccgccttggcttcccaaagtgctgggattacaggtgtgagccaccgcgcccagcctctttttaaattccaaatagttttgtgcttcttttggtttgtttttcatgtttggtttcttaagaggaaaacccccatctattcataaagttcaactatccaaaacaagtcagcaactctctgaattctgcatagctaatattttgctgtctttggttcaactaatttttttctttcaaattctgtctgatgaaaggaactgtagttccatcttcagctaacattatgtatccagtgtatttttataaacttgaagcctaagatacaaatcatgcaaaggggtgaattgggagagtttacaaagtgggcgggatgaccagactccagaatgcctccatatagctataatacttcatccttgcaccatggtgggaggggtatcattgtcctggcttcatagaagagagacctgaggaccttccagggtcccacgccatttatgtagccaaactggattcaaatccgggggccttgattgtaagtcagtccactttcctccataaagtgctcaaaatccttcaagcaagtccatgaaacatagtactcagatctctcacactttataacctgcagaaacctcgttgaaactttgtatttattttcttactatcatggtcctccaatgggctactttgtttcattttacggtgtcaggatccacagtcagccagactggcagatggggaggctgtgctttcatttggtgggaatggttctctagcctcctgatgtgaaagttgcaaaatggtcatttaaatctcatacaccaccttcgcatcttacaacttgagatagttctaagacactaagtcagaaatcaatgccaagggcacatccctttatggccagctcctaatttgtgtctcctgctcaaggcaaggcagtggatttatcacccacattgaacttcctcagtggagacttttctaatgtccgaatctcggccttatcttgttgtcagatattgggcagaataaaatacaatgtaacgcagagaagcgagtctgaccccctgtcccaaatatttcaattcactgcccagggagtgtcttcaagattgatgctaggatttttcaatgcttgctaatatggtatggatgaaaaaaaaagagcttttccctaggctatcactcagagcagggcttcagaacacctttaaaaatagactgaatcacatttgtttttcctttccagatcattttgacttggaatcactttttcccttccagattacctggctgaatctataaaaactgaatccattgtttgtttttattagaagagtgtgtctttcccatactttctgaaacatcaacaattcaacaaaaattttatgttggcccttgtccctcagagtaactagtcctttctgttgatgacaaaagtgttttaatagtgtaataggtttttgttttgttttgttttttgacaaagtctcgctatgtcacccaggctggagagcagtggtgcaatctcagctcactgcaaccttgccccccgggttcaagcaattctcctccctcagcctcctgagtagctgggattacaggcacccgccaccgcgcctggctaatttttgtatttttagtagagacagggtttcagcatattggccaggctgacctcaggcgatctgcttgcctaggcctccgaaagtgctgggattacaggcatgagccactgcacccagcctaatagtttatttttaatggagtgaaagcaggactctaatgagtgaacagccaccccactaggtgtctgattcttggtctaggcagcagaatggccaaacagattcatgcagcaatgctttctggacctcagaacaaggaaaatatttacaataaggaccttcattatgagaatgtgcaagagtatctcctgctcctctctggcagctgatattttggattatcaacatcagttcagctgaagtttatttagcatttattttattctaggcactgggctaggctggggatacaaagatacacgagtctttctcaaaacagcgtgaagcttggcagggaaaattgcagcgataatgtgatgacagtggctgtgggtgtgataaagggtaccaccctctgatgggacagaggagtgaaccagggcagaaagtacattgaccttaacctcaacctctgagtacaaggaggagtccaagaggaaaatatgagggaaaagatgttctattctcacaccctctcatcttcattattttctctgcacccatttattttgtgccctcaggagcagtggttggtgtgcattctcgggtcgcacacacagggtttggaatcaaaagacgagggttggagttcaggaattttcctttttcacaaacatctagggcccttttcagatggtccatggaccacacagagagacaagctgggtgtttcttaatgaggagcatgatgagaatataatgactgggagagaattgccagttccaccaagcacaccctggagactctcagaggggaacattatccctttatcctcagacaggtatcccaaatcttatcagatgaaatgctgctgtttattttcagagagctttgagctctccagggatgggcaactgataataaaatcctggaattaactggggagcgggggaagcccacagctgaaccacactttctgggagtcttggtaaaccttagaaaggagctttgggcaaaggtaggggactccaacagatgttgcagagacatctgtacttttggacccacgggttatttttggcattgacatcttagtagagtggaaagaatacacatgtcctttggtgtcagataaatcttgtcctaaatcccagctcctctattaacttgaagggcaagtcaactgagcatctgcctgagcctcagtttcctcagcactagaatgggtacaagaatgcctgccttagcaattggcttgacatatgcttgcaaagtgcctggtcataggtggtgctcagaacagttggttcctgtgaacacataaagacccttaagccaggtgggagtcaggagggagggaaggaacaggctatgggccagatttgaccctggagctgtaagtttgctgatccctggtctagcataataaatcactgataaatttgccttaaatataaagagtcaaagccttggccagttgtggtggttcatgcctgtaatcccaggagtctgaggccagcctaggcagcattttgagactccaactatacaaaaatattttaaaatttttaaaaaattggccgagtgtggtgatgcatgcctgtagtcctatctactcagaaggttgaacccaggaggtcgaactgtgctgctgtattccagcctgggtgacagaggaagaccctgtctctaaaaaataaaataaaatatctcggacactaatttgctctaaaggctgagaataccgatactttcccactggaccccacaggtaggtcatatttcccagcttcccttgaagctagagaggccacgtgtctgagtcctggtcagtgatgttggggaagtgaatgtggaactgctaagcctggagccggagcaaccttcctcctgcagtccccggaggatggtggaactcttacacggaaggatatgcgttcctggaggcatgcgaggcaggcaggagccccacagctcccctccacaccaattcatctgcacaggaatatgggattgcgaataagaaataagctttattgtgttacacaactgaggcttgggagactgcttgttgcagctcttcctgttaggctgctctgactcatacagcatcttagtgtgcttcctggcagggcacaggtcacgaggctgtgggcacctgacaaaatggtatggaggctggtgcctctaagagcatcctcccctaggtctggtacacaaggtctctgtgcctccaccccatgtctccgcctatagaggcttttccctctcttagcccccggggctcccactctccaggcagtcaccctgggacatgtgccacagctgtcctccccttgggctcttgtgtgcgctgtttcctttcctttcctcaaaatacctgtctttcctcggccgggcacggtggctcacacctgtaatcccagcactttgggaggccaaggtgggcagatcacgaggtcaggagatcgagaccatcctggctaacacggtgaaaccccgtctctactaaaaaaaaaaaaaatacaaaaacgattagccaggcatggtggcggctgcctgtagtcccagctaccggggaggttgaggcaggagaatggcgtgaacccgggaggcggagcttgcagtaagctgagatcgcaccactgcactccagcctgggcgacagttagagactctgtctcaaaacaacaacaacaacaacaacaacaaaaaacttgtcttttctcatgaggctgttccgttttgtacctttacacacaccaattccagacacaccttccccactgctgcctctacccagggctgggcttggcttcctttatctgtctagctgccttccctctactcatcttgtgctcactgcctcatcagactctgaggtgctggagggccggcgctctgccctcctagcctaacgcagtgtttggcaaatatttgtgattaaattaatgaatgaaagagaaagggattccttggcacgtgtaatgctttttatgaccatggctaggccaaccctggaattggctttcagagattaacccaggccctctaccgatggtgttgcttcctgttgactcctaacgccgattccttgcctcatcctccgccttcatcatcttctgccttgcatccatgaggtgtgatcagtcacagggtgaacaatcatcggcggccatggccgcccgcagacctctggagcaggaggaaaacaggcctccactttacttgactcctatctgctcatggggtctgtgtccgcagaatcctaatgtagggggtgtgacctggaacatgaaagggacaggaaggaatagaactgctggctctttggggccataattttaatgtgctgacgtccattgtgcagaagagacttttcccagctgtcctggcaccacacagtagtctgtgtcatcaatcgagcctgctccagggcagctgggcacaggtgcaaggcccggtgcagggaggagcactgaagggcctgggctgagcagctcccagggtgcagcgctgtccccttcatggctatggagtggggagcaaacaccacctaccttccaaaacaaactaaaacctttccaacattctgcctcggttttttccccaccccctcttaaatcataaccaagaaaggacatgtatttatattctgtgaggaaaaagcaaagttttaatggtctttggtgtggctttttaaaatgataaatgactgttgagcttgtcaaatcatggctaatactgttttatctgggtgagatcagtaacagctttttaagggttaccatgctgttatttctcttcgtgttggtaataaagcaaaataactctgtggctggtacttgtgtgataatagagaaaattagtgaggggtgaagtttaggggcttagaagaaggtgaataaataaatgtaatttaaacaattctggggcaggcatccatcccaccttccttaacatctgctctagattctagtgccctgtagagtccaaggaggggagctgtccttgactgtgagcatagtggaaaccactggatggaggaagggtaggcacaagcctggacctgagaaacaaaggcacctattctgctttcaaattcagtcctgggagagcaggtgacctctgtcataggactgctatagggcaccagcagtggagataaccaagtgataagcaagtctttggctttccattaacagagaccactggtcccaacatggaaaagcgtcccagaagcctttcccagttgctgcgtccacctagcatacacacaggatggctctgatttcatgacacttctgccaacgggaagctttgggcaatcgacagcacaaaatgaaagacaacatgtgtgcttccaggctagtggggagggacgccgtaagctgatgcttctgagacagaaaccgaagggacaaggtgccaggagctcctatactaaaaactgtttgtagcacatttatggggattaagtggttgtggtgaaaacagcctgcacgtttaatattgatgacgttttaaaaagcaatgcactgcaaatatctgttgagaaatgaatgccctttaattgttcacaaatgagtatcttaaagaaaatacccatagagaagtcacctggatagttaaaaacattaactacccagggtagaggagaaaattagattgaaactaattcagattaatttggcatcaactttaaagaaatcaaataaataaatgtccaagttattagagtgtaagaaagtgttccaggaaccttttccacagaggttcttgatcttcctgtgtggcagttagtgggaaattatgtgacaaatttatcacatctcttgtcagctcctagcatccttgtaagattgctacaattccctatccagtctgtatctaatagagcatacataatgatttttattttaattccaaccaagttgaatacattataaaaccaaataaaattgtctatttatcaactccagagatcattagataataacaatttattgttgcagagttttgtgaaaaaattatcaaattttagatccaaactggtttagtgtagtgtattgctaaggcaaataggtggctaagaacgtagacttcctagttttgtggatgcaagcaaatggctgaatttgagggtttttgagctctggactagcccagtcctgagatttcctggttttagtggggagacttaggtaaataaggcattcaaagtgcttgtcctgttgtctgagatatgtaagtagctggtgatgatcatagatgctgacaacagatactgagaaagttgactcagagaggcagcttgggcctggaaattcaggcaaatggcaagcccctagggctgagggaagcgtgctttaggcagggcaccaagattccaatactaaggacgtggccagggtccactctctggagctggtataaactggagcttagtaatgaaaactagggaaaggcccagggtagaggtcggagctaccagatttggcaagatttctcaagcccccgtggattcagttgtgatatagagtgaacaatccccccatccgggtggctctggggacaaatgagaaacatgcaggaaccgctgagcatgtggaaggtcctgggcacatgccagttccctccttcttgctctttgtcactaactgtggtgcccaagtcctccccttgcctggtctagtctggggttgctggatgtggactcactcagaaccccacacttctttccaattgcagtctgagcagagggacgctgggacagagccctggactttcctaaaaccgggaaatcccaggacaggactagaccagagctcagtgagggctgaagactcagctgtggggctgcagggcttgaactccatcgcatgttttctcatgagcctggaaatccttcaataaatatgaacaacaaaagtgccccaaaggtgctgtgttagaaaggcacccatctggctcatgcctgtattctagttgagtcaataaggcaaatttaccttatgttgtttgtgggcagttgcaatggtcctataggcaatgaaaacatcagatcacagtttgcttgtgttgctgtgagaatctgacctcaaagaaaatactcccccaacccaaatccaaatctatgaaatgaagacacagcagttgtggtggggcactaattatgaatgttgagcttcaggttagggttgaagtaaatttgggctaaagtgctttatatattgagcattccaattctcataacattgaatagacactaaaacttaatttacgaaagtagtttaatagccaatggggacaaaaatttattcttacagttatcaatactcacttcctgcttagaaacttgttttcttccttaattaccagaaaacagagtacatttaataatcaatcatactaaatttaaaattagggaaagagagcttatggtgttcagcaaaaagggaaatatcaaaaaagacatcttagcatctggattttttggccaaaaggagagcctgcagtttaattaatggtctacatcaaacaggatattttatgaagcaatagaaagctgtaattaaatctagccttctggatttgatacatcacaaaaccaggagataaaaacaacagaaaattggtgatagggttgaaactcaaccttgttcaagaagcattcacaatggaagctgttgacctatattctatatactttacatttcaacagatagtctatgtttgaacagtgatttttttatatgtgaagattttctgtaaagaactgtattaacatttgtaaacagagtccaagaaaaattaattatgactccttttttggatttcacattggtacagcatgacctttaactcattatcttattacaactattagaagaatagtaaaaacatatttcatatacttttcaaatatttataatcatagtattctttttataatagttttcaattcttatttgatagcatgctatacaattatttttccttactaaactttcatagacatttcacttaaatgatttttctttttttaaaccatataacctgtcaaagtataaaagacacatacaagcggccgggcacagtggctcatgcctgtaatcacagcacttcgggaggccaaggtgggtggatcacctgaggtcaggagttcgagaccagcctggataacatggtgaaaccccgtctctactaaatatacaaaaattagccagccgtgatggcaggctcctgtaatcccagctacctgggaggctgaggcaggaaaatcacttgaacccaggaggtggaggttgcagtgagccaaaatcacgccattgcacttcagcctgggcaacaagagcaagactctgtcttaaaaaaaggatatatacaaggtacaaattatttgaattagtctatattgatctcccttttcattctctcagtttctctttattaaacctctttctcttaagaacataaacaaacaacaactactagaaaagctttaaagtccagcattagtcaaattgaagtactgtcctgacccggaaagcattatccaagaaagtgcatttcaaggccacctttcctaaaccagtctcaggaaggtccacgctctatttccctttgcaaaagcatttaagttaatgctgatatatgatttgtatttattaactcccccccgccccaaccaatgtagtcttttttaccttaacctattattgacttggtgacaagatatagagtgatcatggagctgggatccatgttcctatgtgtcatcagttagaagaatgaagaggccaagggagtcattctaatatttatatggaagaataaaggcccagaagcaggtaaatcattctaaaagaaggggtagggagtaagaggagggcttcctctaccagaaattaaagtgaaattccaagccaaagtaatcagaacagcatggtattggaacaagaacagacaagtggaccagtgaaaagatcagagcacttggagactgactccacccaggggaacatcatatacaataaggatggcctcataactccatggggagaggatggattgttggctaactgatgttgagaaaagtaatgactcatcagatatggagaatgatcaatctgcctatcaccatgtacaaaggtggactcagggtgaattgaagacttaaatgtcaaagtaaaaggtaatattaacaaaggaacatacagagaaacatgacaaggtcagggaaagactttttaaagaaaagtataagccaaaaatggattatctagattatatcagatttctgcctcatgacagataccatcagcagagttaattaagtgatgacaatgatactgagtagagccatgctactctaatcaagggtcgttatgggagttatacaatgcatattgtacaatgcatattgaagccaaaggcttcaataatgttcactgtgtgctcaacactgttgtagacacttgacatgtgttcaactcacttaatccctacccacttcatgaggcatgtgccatttttgtagattttttttagaggaggaaaggaaggtacagagagattagataatttgtccagaatctggagctgcaggataggagacttggaaaagaaattgcaatgtctgaaccaacaagtaattaactgacatctctagaacaggaaaagaagttctgtaaatcaacaagtaaaagatagcaagtcttgcagaggaatcagcaaaggatacagatagttttcatgagaagaaacttctccaaaaggcgactaagcacatgaagaaatgtgtgtgtctggggagctttccccttctaatactaggtcagtttctgtgtggtaacttgagaatacaatgaaacatcgtttaaagtaacctgtggcatgttactggtaccttgcaggctaaatacatcctaagtgtgctaatactgcagataccttgatccccttaggacagttgacccaagccttcccaggagctgtttacctgggggtgtcacctggctgcaaaacagggatgaacaatgcacagatttcaggggtcacccagggatgctgcgacctcagaacacgtcacatggaagatgcctctcagtttccatctgaaaagcctggtattaatccaataattcaatcaccaaatttagtagttgcattccccagattttcttttgggcaatccacagtttgtagaatgcttttctgtgttcccaggttcagaatttcagggattgcttctgtcttcaaggagcacttcagcttcctggttaggaagagaaggtagcagacgtgtagaaaaccctctgcgagactctgctctggcagttttatgggtaggcgcaggcctgcctgaaaccaaacgctttcctttttccttcaccctttcccgttgttgtctttttggttcctttggtatggtagtgtctccatgtgagtttccagggaagcagaggctgaagcgagggcgtgggagctgtttcatgcattagactctctggggagcagccacagggaggggactgagggacaccgcgggatgtccagagaggccggtccccagcgggtgggggcgggccagacggtgcggagggggagaggaggaagactgtgtccagggcatgagccttctggcattgtgggttcccccacgctccagcgccggaggggacccaggcggcaccagcgcgttaggctgcccccgggagcagtgctgcaggagccccgagctcgaggtggtgccggcagccgcgcgctcagagctccaacagggctgggccgcggccaaggagccaggagggtgcacgagaacgtcccatccagggacccacggatacttcgttcctgccagggtctcctttgggccgacagagttgtctctaattgagtgcaggcagccccggagcccgccgagagctgaggctgggctgggctcccggggactcgggcagctatttcaggcagacgcggggcatcgcgccccaatgcgcacagtgttgccgaggggcagaaagagagggtctcagcctaagccaggtggaaggtccgagaagaggctggaagggggcgatggtccagcaggagctgggatgaacaagggctggaagagcaggtgggagttccaggtgagggaagtgacctggaagcggagcagaggtcgcagctggcccctgctgggcctagtctcgcttctgtcgtgaccccttgtctaggaagatcccatcgcgaaggcctcatgagtcccacgtgaccggcacgcctgtgaggcaggaagctcagagtccaggccccgtgcccctctttgggggctagagcttctcccaggtgcaggcagcctgttcacaagagcggggccctcctgggtgaggcctcaggctccggttgtcacccctggcaggcgtgtgcccagcttagatccacctgcagctggctctgaacgctggatggggctgggttggggttttcctgtggcctggggtgagtcccagcaagccaccaccatccttgcccactccccacaggacagagcatagaccctgttcctaatcctcccaggccacactccgcagaatgctgcttctctgtttccaagcgcctgcatgtcttgcatcccctgccaccatcttttgtccgcctgaaggggcagccccataaaccttacttagacatgtccctgcccccagcacaggggctgccttcaagaccgcctttgtctgtggggtttttccttgatgactgttcagcatgccggccccactttcttctgcttgcatctggggttctcccaggctgaccagctgtccccacttgctgggagtgaaggggtttcctgggatacgaactttcagtattaaaaccaggagagtcccagacaaactgggacaattggtcaccctaactgacccacaagtagaaaaatgattcataaaatgtataataatgaaaagctgtgaattatttgcatgtataatagagggagaacatggttaaataaatgtggtgtagccatttgaaatagctactacagggatgaggaaacaatacctataaaataacacagaaatgttgatgacatattaaggaagaagaagtctgggttatacatttgtgcaaactgtatgatttcaaccatatttgtacactccatgtggtagatgggttgttggaaggtaaagactggctgcataggggccctaaaggtgagagcttttcaatactgctgcttacgctttcttcttaactaattcagatattattttgccaaatgcagagccaggaggtgtgaagcagccttcatggtggcaccacatgtgacacagatgagtagatgggtgcagcgttgacaataactgcagtcatattgttcatcttgatgggatttctgagtaacaagtcaaagatgcagaaattaaagtatacaaattggattgggttttcagtaaaggaaaaggcaccaaatcgtttctcagtaaggcacagtaaagggaggctatcaaaacctattgttagtaaaagtacctattgatgatctcttaagcaaaattgttacctagttgtccacgtgaaggaaaggactctctgaaaagagggggctgtttagagaagaatcaagcctctggcaccagaggggactccccagttaggaaactgttgtaacaaaaggactccatcgctcagagcaggatcagatgataaatcaggctgaaatggtataagaaacctacaattaccttcctccatatgaataattgaaaaggcaatggcttcatttaggttgtaatctgacttacagcttttaatagctatgctctgttaaagtgtacacattatcttttaccttattgagtttatattgctttatatcaatataatgatttttttactatgtaaaaaaatacacttacatagtaagtatatttacatagtaaaatcaataattttttttactgtgtagcaaaatacacttacttgattcatgaaccattaagtttttaaaatctgtgtgagataatgtattctctgggtttattttgactactgaaaatttctagtcacaagacattatagctagatacattccaggtgtttttaaatgttaaactgtcttcagcatcagaaatggcctcatgaggtaagtcattattttcccctattttcaaggatggaattgaggctgggagcagttttgtgactcacccaagttaagatgtcatgaaaaattgtttccttgcaaggtctgccacaccctaaaccaatgtcctgtcccaatccacctgacttgagggctgttagattttagatgtcagaatcacatggagggcttgtggaaccagactgctgggcctcactggagtttctgatccaatgggtctggggtagggcctgaaaatttgcatttctaacacttgcagttcccagatgttgccgttgtcacaggtcttgggaccacactttgaggatcactggtctagaaggaggcttgtattagctagtgatttttttcattgtgatgatgatggctaaccttacacttgaacaaaaaatgtggctttctttaaagaaaatcatcagaagttcagttctttaaaattcagctactactcactgacatggtgtattaccctgttctcatgctgctaataaagacatacctgagactgggtaatttataaaggaaagaggtttaattgactcacagtacagaatgtttggggaggcctcaggaagcttacgatcacggtggaaggggaggtaaacacttccttcttcacatggaggcagcaaggagaagtgctgaacaaaagggggaaaagtctcttagacaaccacgagattccatgagagctccctcactatcatgagaacagcagcatggggtaaccacccctgtgacacaattacctcccaccaggttcccccatgacacatggggattatgagaactacaattcaagataggatttgggtgggaacacagccaaaccatatcattccactcctgtcccctcccaaatctcatgtcctcccatctcaaaacacaatcatgccttcccaacagtcccccaaattcttaacttattccagcattaactaaaaagtccaagtccaaagtctcatctcagacaaggcaagtcccttcaacctatgggcctgtaaaaccaaaagtaatttagttacttcctagatacaatggggatacaggcattgggtaaatacagccattccaaatgggaaaaattggccaaaataaaggtgctacaagccacatccaggttacactgatgcaagagatgggctcccacagccttggacggctctgcccttgtggctgtgcaggatacagccccgtcccagctgccttcatggctggcattgagtgtgtggcttttctaggcacacggtgcaagctgtcagtgaatctaccattctgggttctggaggacagtggccctcttatcacagctccaccaggaagtaccctagtagggactctgtctgagggctctgaccccacatttcccttccacactgccctagcagaggttcttcatgagggctgtgccccacaatacacatctgcctggacatccatgtgtttccatacatcctttgaaatctagatggaggttctcgaacctcaattcttgtcctctgccaacccccgggaccaacaccacatgaaagctgccaatgcttagggctgagacctcctcagcctggattccattgtccactatcagcattttggtcaaagtaattcaacaagtctctaggaacttccaaactttcccacatcttcctgtcttttgagccctccaagtctctaggaagttccaaacttttccacattttcctgtcttcttctgagccctccaagctgtttcaatctctgcttgttacctagttccaaagttgcttccacatttttgggtatccttgtagcagcaccccattctctggagtaccaatttactatattagtccattcttatgctgctaataaagatataaccaatactgggtaatatataaaggaaacaggtttaattgactcatggttctgcagggctagggaggcctcaggaaacttacaatcatggtagaaggggaagtaaacatgtccttcatcacatggtggcagcaagaagtgctgagcagaagggggaaaagctccttagaaaaccatcagatctcgtgataactcattcactattatgagaagagcagcatggaggtaactgcccccatgattcaattaccttccgccaagttcatggggattatgggaactagaattcaagatgagatttgggtggacacagcaaaaccatatcacgtggtttcttttactgaagcattttcccctccactgcaacttgcatacctgtattgcaactttcaagtgctataaaaatagcacatacccccatcaggcattgatagcacctccatgtgcagattttgaaggtaactgaaacttcctctgccctgacaggccatgctgctgctcagtgtcttccgctgctgtctccaagtggtgttcttgtcatcctggaagccctgccttgggccatgcctgaaatgcactaatatgctcatttgtgaggtagtacagagtggtcagggcatccaggcacatcatggatgatggggcactgttacgggtgctgggacactgccatgaacaagaggcccaggtccctcccctgtacctctgtagtcggtgccagcctcatgccattcagctaccttcacccataatgtccctgcaccctctctgttgagtctacctcctcttcctcctccatccagcctaggtctctggcccagttcttcagcccatatcttccagtggccccactgcccttcccactggcctgcctgggctgagagcactgctggagacaccactcccagtacatgctgctctgtcctctctagttcccggtgtcctgatattgcctgatagtcatgttgagtgtcctgacgtccactctggctctccagactctgttctctgccaacttccaacctgcccctccccactcataccctctccccctactcttagcaaaccactcactctccacttccctgagaaaatagaaaacttggaataatacgcttcttcgatgtcctgcaccaggacaatcaacttctctatctctgctcccatagcttccttctaaccccacagcagaagagttataatactgccccctgttgaaagcttattttccacctgtgctctggtccccacccctcctggcttctcaggtgatttccacctgcctaccacacccttgatgcctgtcttcagtctctccttcactggtgttctttgcttgtccacccttaaacctgcttaagttcacctgtccacgcttaaacctgcttaagttcacctgctatttaaagcagtgtcccttatccctgtgttcctctgcagctgagcacctgtaattccctgtcataggcacattcatcatctctacattctcaccttccactcactcctcaacctagtgtggtctccatcatccccgccacaccacagaatctgtgcttcccagggtctctgatgaccttgaggttgctgttcactcacctcctcacccctggtcttatgtatcacaccaaagtgtcagctgtgcaaaagccaggaataggattcctactctgtagggacccctgtggctggcgcaggtagctgccatagtcaccggttcatatttcaccgttctgctcatttcgtgctccctggtacatctcttatttcactgcttgcatattctgtccaagctctgataaagccaaacacatttaacagatggacacaactggccatgcttcaggcttctgattcacccatacttccaggagccatgaatctgaaatctggagctggtctgtagaaagcattctatttagtgaaatgttgaaggaattttaggtcaactatcatgtatttcattgtctccaatgccataatttccaagtgcctacttgaacagtagatactttcaggggattttcatatcaatgattgcattttgccattgttctttattttttcagtaatgctccatctgtaaacaacccaaatttcaaagcctgacatagtgtattgacaaattattcctggatgcctgtttttatcaggccaaaatccatagttattctaaaatggatatcatacaaataatgctgctgtagcatgctaacattttccagactattatgaaaatgtttagctcatttacaagtcatgggaaacaatatcggaatttgctactgtgtagaaccattactatagcacttccagtgatgcctgcttgtgatctttattgcccactttatagttctgtattttcatctccattttttaatccttaaatatacaaagtaaaatgtaaatatcttttttgtgggtcttttagaattattttttagcattagcacttgtaaatttactggaagtttcaacaatttgtatttcatgttagataaaagtaaggaagctttcaaagaaaagtctaacaaatataacacatgtacccacctccccaaatgaaaaaatgttagcattttgttgtattttatttagatttttttgcagagaaataagccattatacatcaagttgaaattctacttactattgttgtgcgacaaattatctcaaaacgtagtgatttaaaacaaccatttttttttactcacagattatgagagtcatgaatgccgaacaggcacaagaaggagtgtttctttctgctccacaaagtgcagcttcagataggaaggcttagaggttgggatgacccaatggccagggcaggagccgtcagggtgtcttaatttactgatttggcagagagtagtgctgtcagttgggccctcagttagctgcaacaactgcacatgatacctctgtgtagcttgggcttcctcctagcatggtggctgcagacgtcttacaaagtggttcagagccccacaggtgtgttctataatagctcacaaggcagaagctgcattgcctttcaggacctagcctcagaagtcacactgcctcatttctgctgtattctgtcagttccaggagagtcacaagcccttcctggattcaagggaaagggaattagatgccatttcctgatgaaggtggggcaaagttttgaaagagcatgtgtgggggactcatgccatctttggatagtcccagtctccctcctcaaggacatcaactcttgtagtttgtctccagtccaaacatgtgtgggcactttccctgcatatgtgggtatccacgtgaatgtctcttcattgcttctccatctttctaaaaagtaatcacagagagtcatgaaatccagtgttagaaccaggcattgttaatgctcttatgttattattattcaagctgggctaggggaatgtggcattaataaaacaatatgtacattggatttagttatactatactctctattctaatactttgtaatcattagtaataaatagtagcatattacttcatgtaggattttgcaaagcttaaactattttcacatttgttccttcagtccaggcttcctaaaaataaaatataataagagtcttgagacttaagttcatattttgcatgaatcagataaaataatagatagtaaaatgctttgtaaactgtgcagagctattaagttgccccttatcattaagtttttaagtctgattttctgatattgtaatcctgtcctaggcttcctctcatttctttgctgtaatctttgcttctacctcatttcttgtgtccaaatacaatcagttattcaaggcctggctcaaatgctgcctagaagcctttcctgacacagacctcccagcttacctcctctccctcctctgtgcttttatcgcattctgtgtttctctggtagattatcttttgtattctatttcacgtatcacatcactggggctcacctggaagcttctagcaaaccaaaccccagtctctgtagcccttagtgcacaacaacatgcctcccacccaggagcaggctgtgaaagtctttttattttttaattattatactttaagttctgggatatgtgtgcagaacatgcaggtctgttacataggtatacatgtgccatggtggtttgctgcacccatcaacctgtcacttacattaggtatttctcctaatgctatccctcccctagtaccctaccccctgacaggccctggtgtgtgatgttcccctccctatgtccatgtgttctcattgttcagctcccacttatgagtgagaacatgaggtgtttggttttctgttcccatgttagtttgctgagaatgatggcttccagcttcatccatgtccctgcaaaggacatgaactcatccttttttatggctgcatagtattccatggtgtatatgtgccacattttctttatccagtctatcattgatggacatttgggttggttcccaagtctttgccattgtgaatagtgccacaataaacatacatgtgcagcgtgtttctagtagagtgatttataatcctttgggtatgtacccagtagtgagattgctgggtcaagtggtatttctggttttagatccttgaggaatggctacactgtcttccacaatggtggaagacaatcccaccaacagtgtaaatgcgttcctatttctccacatcctctccagcatctgttgtttcctgcctttttaatgattgccattctaactggcttgatatggtatctcattgtggttttgatttgcatttctctaatgaccagtgatgacaagcttttttttcatgtgtttgttggccggataaatgtcttcttttgagaagtgtctgttcatatcctttgcccactttttgatggggttgtgtttttcttgtaaatttgtttaagtttgtttacaagtgggatgacagtgtaaagtctcccactattattgtgtgggagtctgaatctctttgtaggtctcgaagaacttgctttatgaatctgggtactcttgtattgtgtacatatatatttaggatagttagctctttttgttgcattgatcttttactattatgtaatgcccttctttgtcttttttgatctttgttggtttaaagtctgttatatgaaactctgggatgaaaattattgtcattcagaatgtcgaatactggcccccactctcttctggattgtagggtttctacagagagatccactgttggtctgatggacttccctttgtgggtaacctgacctttctctctggctgccctttacattttttccttcatttcaaccttggtgaatctgacgattatgtatcttggggttgctcttctcaaggagtttctttgtggtgttctgaatttcctgaatttgaatgttggcctgttgtcctgggttggggaagttctcctggataatatcctgaagagtgttttccaacttggatccattctacccatcactttcaggtacaccaatcaaacgtaggtttggccttttcatatagtctcatatttcttggaggctttgtttgttccttttcatgcttttttttgctgatcttgtcttcatgatttatttcattaagttgatattcaatctctgatatcttttcttctggttgattgattcggctattgatacttgtgtatgcttcacaaagttctcatgctgtgttttttagctccatcaggtcatttatgttcttctctaaactggttattctagttagcaattcatataaccttttttcaaggttcttagcttccttgcattgggttagaacatgctcctttagctcagaggagtttgttattactcaccttctgaagcctacttctgtcaattcatcaaagtaattctaattctccatctagttttgttcccttgctggcaaggacttgtgatcccttggcgagaagcagtgtcctggcttttggaatttttagcatttttgccctggtttttcctcatcttcgtggatttatctacctttgatctttgatactggtgaccttcagatggcgtttctgtgtagatgtcctttttgttgatgttgatgctattcctttatgtttgttagttttccttctaacagtcaggcccctctgctgcaagtctgctggagtttgttggaggtccactttagaccttgtttgcctgggtatcaccagtggaggctgcagaacagcaaagatttctacctgtttcttcctctggaagctttgtctcagaggggcactcaccagatgtgagccagagctcttttgtatgaggtgtttgtcaacccttgctgggaggtgtctcccagtcaggaggcatggtggttagggaatcacttgaggaggcagtctgtcccttagcagaacttgagtgctgtgctgggagatctgctgctatgttcagagctggcaggcaggaacgtttaagtctactgaagctgtgcccacagctgccccttcctccaggtgctctgtcccagggagatgggagttttatctataagcccctgactggggcttctgcctttctttcagagaggccctgcccagagaggaggaatctagagaggcagtctggctacagtggctttaccaagctttggtgagctctgtccagttcaaacttcccagaggctttgtttacacggtgagggggaaaaccacctactcaagcctcagtaatgatggacacccctcccccaccaagctcgagtgtcccaggtcgatttcagactgctgtgccggcagcaagattttcaagccagtggatcttagcttgctgggctccataggggtgggattcactgagttaaaccacttggctccctggcttcagccccctttccaggggagagaacagttctgttttgctggaatttgaagcaccactggggtatgaaaaaaactcctgcagctagctcagtgtctgcccaaatggctgcccagttttgtgcttgaaacccagggtcctggtggtataggcacccgagggaatctcctgatctgcacgttgtgaagaccatgggaaaagtgtagtatctgggccagaatgcatggttcctcacaggatggtttctcaaggcttctcttggctaggggagggagttcctcaaccccttgcacttcctgggtgaggcaatgtcccaccctgcttcagctcaccctctgtgggctgcacccactgtctaactagtcccagtgagatgagctggtgcctcagttggaaatgcagaaatcacccaccttctgcatccacctcgccgggagctgcagaccagagctgttcctattcagccatcttgccacctgtgaaagtcttttgaatggatgaatgaataaatgaatgaatgaactgttttttcactggcttcatatgctcatgcctcactaaggttgtagaaaatacaggatcttgaatactttaaagtggcaatgtcttgtgagacagacatcatccctgctgtcccaaaattacccagcgtgtgtggagaggcccctggctttggagatggggggcatttcccttgactcccacctcctcagcaccacagggctcatctctggggacctggctttccagttagagcagacctggatcaagaagggccacaggaaagagaaaagaaagacttggcagtgggagggcagggcgttcaggcctctccagggaagggtgccaacctctggacttagcatgatgtttttaaaagaaatgaatgtgtgtcttgtctctaccttcaacttgtaaggcaagtgcagtgccagaggctggggtatctctgctgcccaggtgcactccacagagacagagcaagagcacgtgcagactgtgctgtccaactcgcatagaaggctgacaaccacttccgtcctaatggggaaagtgaagttggcaaggcagaaatgaccacatgctcacccaaaaccttggtagcagcatgtctttccagaaattttgcaagccagatctggaaatttgatggctttgctcctctttttcctgaaagaaatggaaggaatcaggctcatgaaaagccagatttcacctccatgcacacaaccaggacccttgccttcctgaaatgccccacaggctttcacagaatagatgcagtcttagcagtgggcagcttgcttgttgtctggcctaagtctgagccaagataaagacatataaactgccaaggagacactctattccagaaccttctcttctttgcaaagcaaacataattttaagatcaagatgcataactcttgtaatcaaaagcttacacatttcctagcccccccaccaccctccacccccaagcaatgggttctaagcaatataaactgccaaagtggtgtgtagagggaaataaaaaccagactggtaagataccaacttttttataccagtttcagaaagtgcttatgcagagcaagtgtgggacaatattcaattggcaaaaatatgatgaaagtagctcacttaagaaaggaataaagtcttgtttattgaaagaacagtgacaagtttttttaaattctgaaagtcttgcatatttcctgcactgtatatttacctaagtacaagtgttttaagaatgatctcttgagcctgcttaaatcaagaacgcatatttcagcaatttgaaaaaaattgcatttctttgttcatggctgttctcggggttgagaggtatggacccaggagtcagaggtctgagtttaggcttccacctgctaactagcttggaacctctgactaggtttttaaaccctctaagtcttgggtttctcacctgtagaatgaggataataatcatgtctacctcacagtattgttgggaggacttaatgagatgtagagaaactaatctaaagcctggctcacagaaaggtaatgtgaagtctcaaaaaaagtgaattttacaatagcaaagacatggaaccaacccaaatgcccatcagtgataaagaaaatgtggtacatatataccatagaatactatgcagccataaaaaggaacgagatcatgtcctttgcagggatatggatgaagctagaggccatcatcctcagcaaactaacacaggaacagaaaaccaaacaccacatgttctcactcataagtgggagttgaacaatgagaacacatggactcaggcaggggaacaacacacaccggggcctggttggcgtgggggcaggggggtggtgcggagaggggtgaggggagggcgaacaccaggacaaagagctaatgctcgtgggtcttaaaatatagatcatgggttgataggtgcagctaaccaccatggcacacgtatacctatgtaacaaacctgcacatgtatcccagaacttaaactaaactaaaatttttttttaagtgaattttagccactagattttagagttgaagcatgccatggtacttgtgattaggcatctacctgtgtatttattcacctgaacacctggatgtgtagaataaaaattgctcaattgttgaaggctgctgcatcgctctatgctacttgttctgttaaagtatgttcagggagccagcccagagaggcacctccttttagctctgtgaggccttaaagctgggtcaccatgaagtccctgtatatatattttttgttttaataactccaagtaaccaaatgaaaacaattatttataaaatgtattaagaagtaaatgttatcaatttgggactttgcacaactattattaatgtgacctcaggtcccatgacaaattagaatggcaatcctgggtgagaagttaattttgtcctgaagctggcagaatcaacatgcaccccagttgtgggataggcctgttctctcactccatcacatccaacacctggcaaggacagcttttggtatgctaaagaatttgggaaagatgctgttggtgtaggggcggggagactagaaacaagatctttccatgggcagagctcttcagagcttgataacaaagtttggtctgcagcctttgtcaaataattataaactctccagttgaaacagggaaatgtgggctggcgtggtggctcacacctgtaattccagcactctgggaggctgaggcaggtggatcacttgaggtcaggagttcgagaccagcctggccaatatagtgaaaccccatctctactaaaaatacgaaaattagctgggtgtggtgatatgcacctatagtcccagctactcaggaggctgaggcaggagaattgcttgaacccagaaggtggaggttgcagtgggctgagatcatgccaacacactccagctgatagagtgagactctatttcaaaaaaaaaaaaagaaagaaaaacagggaaacgtttgcaaagcttccatctccaggttgacttcagtcaataatcctattgtcttaaggctggagtggacttccttgaagctctttgcccagaaaaccttgccaaaactctcctaagattattaagagttttctcgagtctcttttcctgattccaatcaactggaaatgttatgaaaataattctgtggtcaagtctcacttactcttgctctcaaacacaatccaccaaaagaacaaaacacaaagtaaaagtggatgcaagacacaagaggaagaggggccctctgcagaggctgctaagcaaacgtaggtttggctcaaagatttttgtttctttgaatcagttcactatttttaacctgtggaaatttgttcactcattctaacagtagcttttgctttgtgaaattggtttatttagtgttatgttcctcctgtaaaccttttcattgtatgtttttctcctaatctaatggtaatcctctcagtgatatgagtaacctggtgtttgtatttaacactccttcaacattcacagaatcagaaaatatcagaacaagaaagccccagccttcaagattgtttgatttgtgttccctaattttatgtgtgaacaaaactgaggctgtgaagattctagaataatatgttgagctcaaaaatatggtagtagaattagaatatagctttctaatatttgtataaaagtcaatgatatttagaagtttaaaaaagatacacattaaactgggaaaatactaaatatttaaattctgtaggctagttttcatattctggaaaggtggattttcatatggcactggtgctggtgtttcatcaggtcagctgtctatgtcataagagggtgttcttattagaaaatgtaggctttggcaagctttaaaaggtacacgtgttactgcatgttctgacgagattttgaaaatctttggcaactgtgctttccaagtggagaaaaagggctaccataatgttgaaagacggaaattaaaatctaatcagatatggtggcccttatcctccaccttagaatttcttttcgtggaatgtctggtggacagtaatatatagaggctcctcgacttaggatgggatcacatccagatacacccattgttaaattgaaaatatcataagttgaaaaatgcatttaatatacctaatctaccagacatcatagcttagcccagcctactttaaattgctcagaatgcttacactagcctgcagtcgggcaaaattatctaacacaaagcctattttgtaataaagggttaaatagctcatgtaatttattggatatagtatcagttgtttccccttgtgatcgcatcactgactgggagttgtggctcactgccacttcccagcatatatgactagcctggaaaaagatcaaaattaaaaaacaaagtacatttctactaagtgcatatcactttcacaccattattaagtcgaaaatcgccaagttgaaccatcctaagttggggaccgtctgtagatcaggcaatccttgacattttatggcggcagattgccaaaagagattggagtctagaagtcctggaagcagccccaacaattacacagaactcagcatcatgccctcacatcaaggcaaggagggagagttgtccctatttttcctttccttgaaagggatagtgaaactcattctgaggtttttaaaaaatgtactttttaatgcttttcctctatctgttttgctctcccttgataccctgtctacatcatgatggctgtggcactgctcctgctccttacatggggtcttagaatgcacaaagctgcccaatatcactttctctgtatttgaggaaaatttctagtagcaaaagaatatcctctgacactcttttcaaaatgccaactaaatgtgatagaactactttttgcaacagtgaagtcccaaagtctctttcttcctgatgggttaatttagtaccttcctttttccaaatcaaagaaccataaaagtcagtgaaaatctgcattattattatcctgtgtgtttagttttgctttttagtacttaccattattaaacacttggcccatttttggctaattgttgtgtaattccaaatacaaaccagtcaccatggattattgcagttagagtcatcagaaagcaaggagctatgactcatgctctgttcttgccatgtttttctgatttgtatttcatttcttacctgtgctcacaagtcacatgaagatcaatacatctgaaatatatatgctgactatgtcaccagattttatttctcccatcattgaatctggacaggcttctttcaaaagtgttgagtcatttttatgtctttatcacactcttctaaagtccttaaaactcctaattatttcagaggattattgtcatataaggtatacaaaatcaattatatgaagaagttgtaatcactataattaaactgaggcttatctagacagatcctgtgtcatatttttcacataatgaggctaaaaactttgtggagaaaataatggatatttatagaatatactcaagtgtatttattttagaaggtctgttagacatttcacaaaagaatctgtaatctacagaaattaccaaattatgttacataatattttaaaaacttgttttagaataagttggaatgtgaggtttataaaacaactggaataataaactgaaattataatttaatttttatacccagtgcatttatttttcttcctatgacttgactatagtttaaaattcttataggtttagtatcccttttttgaaaacaggttttcaatgtgtttctgtaacaataatgaaaagtaaaggcatgtaatctcttttccaaaataaaagattggtttgagaattatgatcatatatacaatgtactaaatgcaaccttttatgatgatgatataaaagattcacagactcacaaatcatatgccactcaactaaaatactaagagaacataactttatctttataaaacatatacataggcataaatacatagacaaaggtctagaaaaatatgcatatcagtgtggaaatgcaagtgatgataatgatttctgttgttttcttctaatttctatagagtcactatgctatttaaattttcaaaaaattaagttatgtgcaataatctttttaaaattatttgttttttaatcagctttttaatctgatgacatagaatgataacgtagtaaatcatagtttctgaaccaaaaaacagggacacatagactgagaagtgccaagttcattttagagattaaaaatacaacggcattgggacttttctagaaaattcaagatatgtggtcacaattgaggtgttcagcttctagagcgaactgaaccagatatctgctaaggctctgatagagaacagctggaagctcagaaaggtaaacataattcaaatattggtgaatatgccagtgcagccgagaaggtgacaggatttgaaaaatgtgccaggacacaatgagaaaggccttggaataaatacaaaaagcccaaactttattctgtaaaagtggggagctactgaaggttttaatcaaagcagggataatctcatttccaaggcaaaaaaacaaaaagaggcattccttcctaataccacatgtaggagctgttcttattctatggtggattattactttagtagtatcttataaagacagtgcctgaaggtcttttatctgtacattgatgtaacacttttcaaaagcatatcagcagacacatttttggaagcatgcattctgaaacttgaacttcaaataggagttatggctgatatcatggagtaaggtaaaacagaagctgactcctctccagtattcaaggctgactgttgtctctggaactgagaatactgggaaaagtgtgagttggacactgtgcacaactctaattaacactgttctaaagggaaagtatatgaatatattgtttaaacactaatagttaaaagttatactacaatatcttcaaggtttaacacataaattgagacacacacttaattaggcctaagaaag

SEQ ID NO: 925 - DNA, 32765 bp, Homo sapiens
gtgagttaatgcacagatactttggtttcgggtgtgaacaaaaactttcttcgaagccgagttgtaaacgcctggcgcacgcctgctcaggagtcaaagacccagcaccgcgttccttatctttgaggtgtgcgggcgccgtcattggaaattatggttaggtgcgcgatagggaacttcagtctctggggtgagcgacgttggcagttccggattcgcttatggtctccagggtcaaaggaaagggcgaaccaacgtttgaaggcagcagcagcttttttccagttgcccaaatggttactcaaaatgcaaggggacaaaggtcgaggctttcccggggaatggttttggtaaaattgctttggggcaaagagcaacatctgggataagttgggaaaactgaagtattggataaattttagtttttttttctggtaataaattttaggaacatagcgggagggccacagccttccaacgcaaatccccaacccatttacaggcggaggctgctgccggcgggtgggcgggggcgatccccacattttgggcagtcagtgcatttggaagttaggggagcttccttcacccttgccctcagtaatctgtttctgcatccttgctgaaatggaagattgcctctctgtgaggtccagatatagagcagagtcactttgtaataatcggaactcagaaacggcctcaattgagcatgggttgcagagatgagcagttttactgagctttgtctacaatcacagcttaagttaattttaaaaaaagattgaatgtgatcaggtacattaggaaaaaaggtttgtcttttttttgtgataaactttaaaaaatcacctacttgaagagtggggaaaacactggatgaggaggtaggagcgccctttctgccgctgttgctgttggtctggtgagcttatctcgctgcagttgggagtgtcggtggttgcaattgtacatgttttatacgccatgtgctggtgtgttcgcacagtggatggctctatgctatgtgctccagggataaaacccatggcaggacagccaggcgatgtgtgtatgtgtttgggatctttctgtaacgccgtgtgctgctgtgttcgcacagtggatggctctatgctaagtgctccagggataaaaccccctggcaggacagccaggcaatgtgtatgtgtgttcagggtgtttctataatgccacatgcaagtgtgttcgcacactgagtggctctatgctgagtgatctcaggataaacccccctggcaagacagccaggcaatacatatgtgtgttgggatctttaatttctacttaatccatggtaaggctggggactgctttataattggtgatggtctggttagagatttcacagttgaaaggacagggcatggacttggatgagagagggcattatctctgtgagtcgcatctgttaggtggcttcttccactccactcagcagcgctgcctaatgcttacttcccaagtgaaccagaggacccacatggagggcagacagctgatttttggagacatttaaagatgaagaataaaacgagcctcaacaagtgctcaagcgaggtttgcatgagtgagtatgatccatggacatcaaagaagacagacataaaaatctgtaatttaatgctctgacggatactttggaagcattctggagttgcagggttactagcatcccggggttacaataaggtgattttatgaagatcagtggctactaaaatgcagtgtggaatgatggagggtcaggggctggctcggtctccagctggctgtgtggcttgggtgagttactcgccttctctgggcttgtatttttcctctgtaaaattagccattggattcagcccgttacaatgctccaaatgccatcagggtcaccacctggttactgtttggtgtgcccagaacaatgattaaaaagtctttaagaaagtagaatgatattaggaatgtaccccgtaaagccccaaaaaagtttttgaaatatattggagagattcttttttgttttgttttgttttgttttctttgagacggagtctctctctgtcgcccaggctggtgtgcagtggcgtgatctcggcttactgcaagctccgcctcccaggttcctgccattctcctgcctcagcctcccgaatagctgggactacaggcgactgccaccatgcccggctaattttttgtatttttagtagaggcggggtttcactgtgttagccaggatggtctcgatctcctgacctcgtgatccgcccgccttggcttcccaaagtgctgggattacaggtgtgagccaccgcgcccagcctctttttaaattccaaatagttttgtgcttcttttggtttgtttttcatgtttggtttcttaagaggaaaacccccatctattcataaagttcaactatccaaaacaagtcagcaactctctgaattctgcatagctaatattttgctgtctttggttcaactaatttttttctttcaaattctgtctgatgaaaggaactgtagttccatcttcagctaacattatgtatccagtgtatttttataaacttgaagcctaagatacaaatcatgcaaaggggtgaattgggagagtttacaaagtgggcgggatgaccagactccagaatgcctccatatagctataatacttcatccttgcaccatggtgggaggggtatcattgtcctggcttcatagaagagagacctgaggaccttccagggtcccacgccatttatgtagccaaactggattcaaatccgggggccttgattgtaagtcagtccactttcctccataaagtgctcaaaatccttcaagcaagtccatgaaacatagtactcagatctctcacactttataacctgcagaaacctcgttgaaactttgtatttattttcttactatcatggtcctccaatgggctactttgtttcattttacggtgtcaggatccacagtcagccagactggcagatggggaggctgtgctttcatttggtgggaatggttctctagcctcctgatgtgaaagttgcaaaatggtcatttaaatctcatacaccaccttcgcatcttacaacttgagatagttctaagacactaagtcagaaatcaatgccaagggcacatccctttatggccagctcctaatttgtgtctcctgctcaaggcaaggcagtggatttatcacccacattgaacttcctcagtggagacttttctaatgtccgaatctcggccttatcttgttgtcagatattgggcagaataaaatacaatgtaacgcagagaagcgagtctgaccccctgtcccaaatatttcaattcactgcccagggagtgtcttcaagattgatgctaggatttttcaatgcttgctaatatggtatggatgaaaaaaaaagagcttttccctaggctatcactcagagcagggcttcagaacacctttaaaaatagactgaatcacatttgtttttcctttccagatcattttgacttggaatcactttttcccttccagattacctggctgaatctataaaaactgaatccattgtttgtttttattagaagagtgtgtctttcccatactttctgaaacatcaacaattcaacaaaaattttatgttggcccttgtccctcagagtaactagtcctttctgttgatgacaaaagtgttttaatagtgtaataggtttttgttttgttttgttttttgacaaagtctcgctatgtcacccaggctggagagcagtggtgcaatctcagctcactgcaaccttgccccccgggttcaagcaattctcctccctcagcctcctgagtagctgggattacaggcacccgccaccgcgcctggctaatttttgtatttttagtagagacagggtttcagcatattggccaggctgacctcaggcgatctgcttgcctaggcctccgaaagtgctgggattacaggcatgagccactgcacccagcctaatagtttatttttaatggagtgaaagcaggactctaatgagtgaacagccaccccactaggtgtctgattcttggtctaggcagcagaatggccaaacagattcatgcagcaatgctttctggacctcagaacaaggaaaatatttacaataaggaccttcattatgagaatgtgcaagagtatctcctgctcctctctggcagctgatattttggattatcaacatcagttcagctgaagtttatttagcatttattttattctaggcactgggctaggctggggatacaaagatacacgagtctttctcaaaacagcgtgaagcttggcagggaaaattgcagcgataatgtgatgacagtggctgtgggtgtgataaagggtaccaccctctgatgggacagaggagtgaaccagggcagaaagtacattgaccttaacctcaacctctgagtacaaggaggagtccaagaggaaaatatgagggaaaagatgttctattctcacaccctctcatcttcattattttctctgcacccatttattttgtgccctcaggagcagtggttggtgtgcattctcgggtcgcacacacagggtttggaatcaaaagacgagggttggagttcaggaattttcctttttcacaaacatctagggcccttttcagatggtccatggaccacacagagagacaagctgggtgtttcttaatgaggagcatgatgagaatataatgactgggagagaattgccagttccaccaagcacaccctggagactctcagaggggaacattatccctttatcctcagacaggtatcccaaatcttatcagatgaaatgctgctgtttattttcagagagctttgagctctccagggatgggcaactgataataaaatcctggaattaactggggagcgggggaagcccacagctgaaccacactttctgggagtcttggtaaaccttagaaaggagctttgggcaaaggtaggggactccaacagatgttgcagagacatctgtacttttggacccacgggttatttttggcattgacatcttagtagagtggaaagaatacacatgtcctttggtgtcagataaatcttgtcctaaatcccagctcctctattaacttgaagggcaagtcaactgagcatctgcctgagcctcagtttcctcagcactagaatgggtacaagaatgcctgccttagcaattggcttgacatatgcttgcaaagtgcctggtcataggtggtgctcagaacagttggttcctgtgaacacataaagacccttaagccaggtgggagtcaggagggagggaaggaacaggctatgggccagatttgaccctggagctgtaagtttgctgatccctggtctagcataataaatcactgataaatttgccttaaatataaagagtcaaagccttggccagttgtggtggttcatgcctgtaatcccaggagtctgaggccagcctaggcagcattttgagactccaactatacaaaaatattttaaaatttttaaaaaattggccgagtgtggtgatgcatgcctgtagtcctatctactcagaaggttgaacccaggaggtcgaactgtgctgctgtattccagcctgggtgacagaggaagaccctgtctctaaaaaataaaataaaatatctcggacactaatttgctctaaaggctgagaataccgatactttcccactggaccccacaggtaggtcatatttcccagcttcccttgaagctagagaggccacgtgtctgagtcctggtcagtgatgttggggaagtgaatgtggaactgctaagcctggagccggagcaaccttcctcctgcagtccccggaggatggtggaactcttacacggaaggatatgcgttcctggaggcatgcgaggcaggcaggagccccacagctcccctccacaccaattcatctgcacaggaatatgggattgcgaataagaaataagctttattgtgttacacaactgaggcttgggagactgcttgttgcagctcttcctgttaggctgctctgactcatacagcatcttagtgtgcttcctggcagggcacaggtcacgaggctgtgggcacctgacaaaatggtatggaggctggtgcctctaagagcatcctcccctaggtctggtacacaaggtctctgtgcctccaccccatgtctccgcctatagaggcttttccctctcttagcccccggggctcccactctccaggcagtcaccctgggacatgtgccacagctgtcctccccttgggctcttgtgtgcgctgtttcctttcctttcctcaaaatacctgtctttcctcggccgggcacggtggctcacacctgtaatcccagcactttgggaggccaaggtgggcagatcacgaggtcaggagatcgagaccatcctggctaacacggtgaaaccccgtctctactaaaaaaaaaaaaaatacaaaaacgattagccaggcatggtggcggctgcctgtagtcccagctaccggggaggttgaggcaggagaatggcgtgaacccgggaggcggagcttgcagtaagctgagatcgcaccactgcactccagcctgggcgacagttagagactctgtctcaaaacaacaacaacaacaacaacaacaaaaaacttgtcttttctcatgaggctgttccgttttgtacctttacacacaccaattccagacacaccttccccactgctgcctctacccagggctgggcttggcttcctttatctgtctagctgccttccctctactcatcttgtgctcactgcctcatcagactctgaggtgctggagggccggcgctctgccctcctagcctaacgcagtgtttggcaaatatttgtgattaaattaatgaatgaaagagaaagggattccttggcacgtgtaatgctttttatgaccatggctaggccaaccctggaattggctttcagagattaacccaggccctctaccgatggtgttgcttcctgttgactcctaacgccgattccttgcctcatcctccgccttcatcatcttctgccttgcatccatgaggtgtgatcagtcacagggtgaacaatcatcggcggccatggccgcccgcagacctctggagcaggaggaaaacaggcctccactttacttgactcctatctgctcatggggtctgtgtccgcagaatcctaatgtagggggtgtgacctggaacatgaaagggacaggaaggaatagaactgctggctctttggggccataattttaatgtgctgacgtccattgtgcagaagagacttttcccagctgtcctggcaccacacagtagtctgtgtcatcaatcgagcctgctccagggcagctgggcacaggtgcaaggcccggtgcagggaggagcactgaagggcctgggctgagcagctcccagggtgcagcgctgtccccttcatggctatggagtggggagcaaacaccacctaccttccaaaacaaactaaaacctttccaacattctgcctcggttttttccccaccccctcttaaatcataaccaagaaaggacatgtatttatattctgtgaggaaaaagcaaagttttaatggtctttggtgtggctttttaaaatgataaatgactgttgagcttgtcaaatcatggctaatactgttttatctgggtgagatcagtaacagctttttaagggttaccatgctgttatttctcttcgtgttggtaataaagcaaaataactctgtggctggtacttgtgtgataatagagaaaattagtgaggggtgaagtttaggggcttagaagaaggtgaataaataaatgtaatttaaacaattctggggcaggcatccatcccaccttccttaacatctgctctagattctagtgccctgtagagtccaaggaggggagctgtccttgactgtgagcatagtggaaaccactggatggaggaagggtaggcacaagcctggacctgagaaacaaaggcacctattctgctttcaaattcagtcctgggagagcaggtgacctctgtcataggactgctatagggcaccagcagtggagataaccaagtgataagcaagtctttggctttccattaacagagaccactggtcccaacatggaaaagcgtcccagaagcctttcccagttgctgcgtccacctagcatacacacaggatggctctgatttcatgacacttctgccaacgggaagctttgggcaatcgacagcacaaaatgaaagacaacatgtgtgcttccaggctagtggggagggacgccgtaagctgatgcttctgagacagaaaccgaagggacaaggtgccaggagctcctatactaaaaactgtttgtagcacatttatggggattaagtggttgtggtgaaaacagcctgcacgtttaatattgatgacgttttaaaaagcaatgcactgcaaatatctgttgagaaatgaatgccctttaattgttcacaaatgagtatcttaaagaaaatacccatagagaagtcacctggatagttaaaaacattaactacccagggtagaggagaaaattagattgaaactaattcagattaatttggcatcaactttaaagaaatcaaataaataaatgtccaagttattagagtgtaagaaagtgttccaggaaccttttccacagaggttcttgatcttcctgtgtggcagttagtgggaaattatgtgacaaatttatcacatctcttgtcagctcctagcatccttgtaagattgctacaattccctatccagtctgtatctaatagagcatacataatgatttttattttaattccaaccaagttgaatacattataaaaccaaataaaattgtctatttatcaactccagagatcattagataataacaatttattgttgcagagttttgtgaaaaaattatcaaattttagatccaaactggtttagtgtagtgtattgctaaggcaaataggtggctaagaacgtagacttcctagttttgtggatgcaagcaaatggctgaatttgagggtttttgagctctggactagcccagtcctgagatttcctggttttagtggggagacttaggtaaataaggcattcaaagtgcttgtcctgttgtctgagatatgtaagtagctggtgatgatcatagatgctgacaacagatactgagaaagttgactcagagaggcagcttgggcctggaaattcaggcaaatggcaagcccctagggctgagggaagcgtgctttaggcagggcaccaagattccaatactaaggacgtggccagggtccactctctggagctggtataaactggagcttagtaatgaaaactagggaaaggcccagggtagaggtcggagctaccagatttggcaagatttctcaagcccccgtggattcagttgtgatatagagtgaacaatccccccatccgggtggctctggggacaaatgagaaacatgcaggaaccgctgagcatgtggaaggtcctgggcacatgccagttccctccttcttgctctttgtcactaactgtggtgcccaagtcctccccttgcctggtctagtctggggttgctggatgtggactcactcagaaccccacacttctttccaattgcagtctgagcagagggacgctgggacagagccctggactttcctaaaaccgggaaatcccaggacaggactagaccagagctcagtgagggctgaagactcagctgtggggctgcagggcttgaactccatcgcatgttttctcatgagcctggaaatccttcaataaatatgaacaacaaaagtgccccaaaggtgctgtgttagaaaggcacccatctggctcatgcctgtattctagttgagtcaataaggcaaatttaccttatgttgtttgtgggcagttgcaatggtcctataggcaatgaaaacatcagatcacagtttgcttgtgttgctgtgagaatctgacctcaaagaaaatactcccccaacccaaatccaaatctatgaaatgaagacacagcagttgtggtggggcactaattatgaatgttgagcttcaggttagggttgaagtaaatttgggctaaagtgctttatatattgagcattccaattctcataacattgaatagacactaaaacttaatttacgaaagtagtttaatagccaatggggacaaaaatttattcttacagttatcaatactcacttcctgcttagaaacttgttttcttccttaattaccagaaaacagagtacatttaataatcaatcatactaaatttaaaattagggaaagagagcttatggtgttcagcaaaaagggaaatatcaaaaaagacatcttagcatctggattttttggccaaaaggagagcctgcagtttaattaatggtctacatcaaacaggatattttatgaagcaatagaaagctgtaattaaatctagccttctggatttgatacatcacaaaaccaggagataaaaacaacagaaaattggtgatagggttgaaactcaaccttgttcaagaagcattcacaatggaagctgttgacctatattctatatactttacatttcaacagatagtctatgtttgaacagtgatttttttatatgtgaagattttctgtaaagaactgtattaacatttgtaaacagagtccaagaaaaattaattatgactccttttttggatttcacattggtacagcatgacctttaactcattatcttattacaactattagaagaatagtaaaaacatatttcatatacttttcaaatatttataatcatagtattctttttataatagttttcaattcttatttgatagcatgctatacaattatttttccttactaaactttcatagacatttcacttaaatgatttttctttttttaaaccatataacctgtcaaagtataaaagacacatacaagcggccgggcacagtggctcatgcctgtaatcacagcacttcgggaggccaaggtgggtggatcacctgaggtcaggagttcgagaccagcctggataacatggtgaaaccccgtctctactaaatatacaaaaattagccagccgtgatggcaggctcctgtaatcccagctacctgggaggctgaggcaggaaaatcacttgaacccaggaggtggaggttgcagtgagccaaaatcacgccattgcacttcagcctgggcaacaagagcaagactctgtcttaaaaaaaggatatatacaaggtacaaattatttgaattagtctatattgatctcccttttcattctctcagtttctctttattaaacctctttctcttaagaacataaacaaacaacaactactagaaaagctttaaagtccagcattagtcaaattgaagtactgtcctgacccggaaagcattatccaagaaagtgcatttcaaggccacctttcctaaaccagtctcaggaaggtccacgctctatttccctttgcaaaagcatttaagttaatgctgatatatgatttgtatttattaactcccccccgccccaaccaatgtagtcttttttaccttaacctattattgacttggtgacaagatatagagtgatcatggagctgggatccatgttcctatgtgtcatcagttagaagaatgaagaggccaagggagtcattctaatatttatatggaagaataaaggcccagaagcaggtaaatcattctaaaagaaggggtagggagtaagaggagggcttcctctaccagaaattaaagtgaaattccaagccaaagtaatcagaacagcatggtattggaacaagaacagacaagtggaccagtgaaaagatcagagcacttggagactgactccacccaggggaacatcatatacaataaggatggcctcataactccatggggagaggatggattgttggctaactgatgttgagaaaagtaatgactcatcagatatggagaatgatcaatctgcctatcaccatgtacaaaggtggactcagggtgaattgaagacttaaatgtcaaagtaaaaggtaatattaacaaaggaacatacagagaaacatgacaaggtcagggaaagactttttaaagaaaagtataagccaaaaatggattatctagattatatcagatttctgcctcatgacagataccatcagcagagttaattaagtgatgacaatgatactgagtagagccatgctactctaatcaagggtcgttatgggagttatacaatgcatattgtacaatgcatattgaagccaaaggcttcaataatgttcactgtgtgctcaacactgttgtagacacttgacatgtgttcaactcacttaatccctacccacttcatgaggcatgtgccatttttgtagattttttttagaggaggaaaggaaggtacagagagattagataatttgtccagaatctggagctgcaggataggagacttggaaaagaaattgcaatgtctgaaccaacaagtaattaactgacatctctagaacaggaaaagaagttctgtaaatcaacaagtaaaagatagcaagtcttgcagaggaatcagcaaaggatacagatagttttcatgagaagaaacttctccaaaaggcgactaagcacatgaagaaatgtgtgtgtctggggagctttccccttctaatactaggtcagtttctgtgtggtaacttgagaatacaatgaaacatcgtttaaagtaacctgtggcatgttactggtaccttgcaggctaaatacatcctaagtgtgctaatactgcagataccttgatccccttaggacagttgacccaagccttcccaggagctgtttacctgggggtgtcacctggctgcaaaacagggatgaacaatgcacagatttcaggggtcacccagggatgctgcgacctcagaacacgtcacatggaagatgcctctcagtttccatctgaaaagcctggtattaatccaataattcaatcaccaaatttagtagttgcattccccagattttcttttgggcaatccacagtttgtagaatgcttttctgtgttcccaggttcagaatttcagggattgcttctgtcttcaaggagcacttcagcttcctggttaggaagagaaggtagcagacgtgtagaaaaccctctgcgagactctgctctggcagttttatgggtaggcgcaggcctgcctgaaaccaaacgctttcctttttccttcaccctttcccgttgttgtctttttggttcctttggtatggtagtgtctccatgtgagtttccagggaagcagaggctgaagcgagggcgtgggagctgtttcatgcattagactctctggggagcagccacagggaggggactgagggacaccgcgggatgtccagagaggccggtccccagcgggtgggggcgggccagacggtgcggagggggagaggaggaagactgtgtccagggcatgagccttctggcattgtgggttcccccacgctccagcgccggaggggacccaggcggcaccagcgcgttaggctgcccccgggagcagtgctgcaggagccccgagctcgaggtggtgccggcagccgcgcgctcagagctccaacagggctgggccgcggccaaggagccaggagggtgcacgagaacgtcccatccagggacccacggatacttcgttcctgccagggtctcctttgggccgacagagttgtctctaattgagtgcaggcagccccggagcccgccgagagctgaggctgggctgggctcccggggactcgggcagctatttcaggcagacgcggggcatcgcgccccaatgcgcacagtgttgccgaggggcagaaagagagggtctcagcctaagccaggtggaaggtccgagaagaggctggaagggggcgatggtccagcaggagctgggatgaacaagggctggaagagcaggtgggagttccaggtgagggaagtgacctggaagcggagcagaggtcgcagctggcccctgctgggcctagtctcgcttctgtcgtgaccccttgtctaggaagatcccatcgcgaaggcctcatgagtcccacgtgaccggcacgcctgtgaggcaggaagctcagagtccaggccccgtgcccctctttgggggctagagcttctcccaggtgcaggcagcctgttcacaagagcggggccctcctgggtgaggcctcaggctccggttgtcacccctggcaggcgtgtgcccagcttagatccacctgcagctggctctgaacgctggatggggctgggttggggttttcctgtggcctggggtgagtcccagcaagccaccaccatccttgcccactccccacaggacagagcatagaccctgttcctaatcctcccaggccacactccgcagaatgctgcttctctgtttccaagcgcctgcatgtcttgcatcccctgccaccatcttttgtccgcctgaaggggcagccccataaaccttacttagacatgtccctgcccccagcacaggggctgccttcaagaccgcctttgtctgtggggtttttccttgatgactgttcagcatgccggccccactttcttctgcttgcatctggggttctcccaggctgaccagctgtccccacttgctgggagtgaaggggtttcctgggatacgaactttcagtattaaaaccaggagagtcccagacaaactgggacaattggtcaccctaactgacccacaagtagaaaaatgattcataaaatgtataataatgaaaagctgtgaattatttgcatgtataatagagggagaacatggttaaataaatgtggtgtagccatttgaaatagctactacagggatgaggaaacaatacctataaaataacacagaaatgttgatgacatattaaggaagaagaagtctgggttatacatttgtgcaaactgtatgatttcaaccatatttgtacactccatgtggtagatgggttgttggaaggtaaagactggctgcataggggccctaaaggtgagagcttttcaatactgctgcttacgctttcttcttaactaattcagatattattttgccaaatgcagagccaggaggtgtgaagcagccttcatggtggcaccacatgtgacacagatgagtagatgggtgcagcgttgacaataactgcagtcatattgttcatcttgatgggatttctgagtaacaagtcaaagatgcagaaattaaagtatacaaattggattgggttttcagtaaaggaaaaggcaccaaatcgtttctcagtaaggcacagtaaagggaggctatcaaaacctattgttagtaaaagtacctattgatgatctcttaagcaaaattgttacctagttgtccacgtgaaggaaaggactctctgaaaagagggggctgtttagagaagaatcaagcctctggcaccagaggggactccccagttaggaaactgttgtaacaaaaggactccatcgctcagagcaggatcagatgataaatcaggctgaaatggtataagaaacctacaattaccttcctccatatgaataattgaaaaggcaatggcttcatttaggttgtaatctgacttacagcttttaatagctatgctctgttaaagtgtacacattatcttttaccttattgagtttatattgctttatatcaatataatgatttttttactatgtaaaaaaatacacttacatagtaagtatatttacatagtaaaatcaataattttttttactgtgtagcaaaatacacttacttgattcatgaaccattaagtttttaaaatctgtgtgagataatgtattctctgggtttattttgactactgaaaatttctagtcacaagacattatagctagatacattccaggtgtttttaaatgttaaactgtcttcagcatcagaaatggcctcatgaggtaagtcattattttcccctattttcaaggatggaattgaggctgggagcagttttgtgactcacccaagttaagatgtcatgaaaaattgtttccttgcaaggtctgccacaccctaaaccaatgtcctgtcccaatccacctgacttgagggctgttagattttagatgtcagaatcacatggagggcttgtggaaccagactgctgggcctcactggagtttctgatccaatgggtctggggtagggcctgaaaatttgcatttctaacacttgcagttcccagatgttgccgttgtcacaggtcttgggaccacactttgaggatcactggtctagaaggaggcttgtattagctagtgatttttttcattgtgatgatgatggctaaccttacacttgaacaaaaaatgtggctttctttaaagaaaatcatcagaagttcagttctttaaaattcagctactactcactgacatggtgtattaccctgttctcatgctgctaataaagacatacctgagactgggtaatttataaaggaaagaggtttaattgactcacagtacagaatgtttggggaggcctcaggaagcttacgatcacggtggaaggggaggtaaacacttccttcttcacatggaggcagcaaggagaagtgctgaacaaaagggggaaaagtctcttagacaaccacgagattccatgagagctccctcactatcatgagaacagcagcatggggtaaccacccctgtgacacaattacctcccaccaggttcccccatgacacatggggattatgagaactacaattcaagataggatttgggtgggaacacagccaaaccatatcattccactcctgtcccctcccaaatctcatgtcctcccatctcaaaacacaatcatgccttcccaacagtcccccaaattcttaacttattccagcattaactaaaaagtccaagtccaaagtctcatctcagacaaggcaagtcccttcaacctatgggcctgtaaaaccaaaagtaatttagttacttcctagatacaatggggatacaggcattgggtaaatacagccattccaaatgggaaaaattggccaaaataaaggtgctacaagccacatccaggttacactgatgcaagagatgggctcccacagccttggacggctctgcccttgtggctgtgcaggatacagccccgtcccagctgccttcatggctggcattgagtgtgtggcttttctaggcacacggtgcaagctgtcagtgaatctaccattctgggttctggaggacagtggccctcttatcacagctccaccaggaagtaccctagtagggactctgtctgagggctctgaccccacatttcccttccacactgccctagcagaggttcttcatgagggctgtgccccacaatacacatctgcctggacatccatgtgtttccatacatcctttgaaatctagatggaggttctcgaacctcaattcttgtcctctgccaacccccgggaccaacaccacatgaaagctgccaatgcttagggctgagacctcctcagcctggattccattgtccactatcagcattttggtcaaagtaattcaacaagtctctaggaacttccaaactttcccacatcttcctgtcttttgagccctccaagtctctaggaagttccaaacttttccacattttcctgtcttcttctgagccctccaagctgtttcaatctctgcttgttacctagttccaaagttgcttccacatttttgggtatccttgtagcagcaccccattctctggagtaccaatttactatattagtccattcttatgctgctaataaagatataaccaatactgggtaatatataaaggaaacaggtttaattgactcatggttctgcagggctagggaggcctcaggaaacttacaatcatggtagaaggggaagtaaacatgtccttcatcacatggtggcagcaagaagtgctgagcagaagggggaaaagctccttagaaaaccatcagatctcgtgataactcattcactattatgagaagagcagcatggaggtaactgcccccatgattcaattaccttccgccaagttcatggggattatgggaactagaattcaagatgagatttgggtggacacagcaaaaccatatcacgtggtttcttttactgaagcattttcccctccactgcaacttgcatacctgtattgcaactttcaagtgctataaaaatagcacatacccccatcaggcattgatagcacctccatgtgcagattttgaaggtaactgaaacttcctctgccctgacaggccatgctgctgctcagtgtcttccgctgctgtctccaagtggtgttcttgtcatcctggaagccctgccttgggccatgcctgaaatgcactaatatgctcatttgtgaggtagtacagagtggtcagggcatccaggcacatcatggatgatggggcactgttacgggtgctgggacactgccatgaacaagaggcccaggtccctcccctgtacctctgtagtcggtgccagcctcatgccattcagctaccttcacccataatgtccctgcaccctctctgttgagtctacctcctcttcctcctccatccagcctaggtctctggcccagttcttcagcccatatcttccagtggccccactgcccttcccactggcctgcctgggctgagagcactgctggagacaccactcccagtacatgctgctctgtcctctctagttcccggtgtcctgatattgcctgatagtcatgttgagtgtcctgacgtccactctggctctccagactctgttctctgccaacttccaacctgcccctccccactcataccctctccccctactcttagcaaaccactcactctccacttccctgagaaaatagaaaacttggaataatacgcttcttcgatgtcctgcaccaggacaatcaacttctctatctctgctcccatagcttccttctaaccccacagcagaagagttataatactgccccctgttgaaagcttattttccacctgtgctctggtccccacccctcctggcttctcaggtgatttccacctgcctaccacacccttgatgcctgtcttcagtctctccttcactggtgttctttgcttgtccacccttaaacctgcttaagttcacctgtccacgcttaaacctgcttaagttcacctgctatttaaagcagtgtcccttatccctgtgttcctctgcagctgagcacctgtaattccctgtcataggcacattcatcatctctacattctcaccttccactcactcctcaacctagtgtggtctccatcatccccgccacaccacagaatctgtgcttcccagggtctctgatgaccttgaggttgctgttcactcacctcctcacccctggtcttatgtatcacaccaaagtgtcagctgtgcaaaagccaggaataggattcctactctgtagggacccctgtggctggcgcaggtagctgccatagtcaccggttcatatttcaccgttctgctcatttcgtgctccctggtacatctcttatttcactgcttgcatattctgtccaagctctgataaagccaaacacatttaacagatggacacaactggccatgcttcaggcttctgattcacccatacttccaggagccatgaatctgaaatctggagctggtctgtagaaagcattctatttagtgaaatgttgaaggaattttaggtcaactatcatgtatttcattgtctccaatgccataatttccaagtgcctacttgaacagtagatactttcaggggattttcatatcaatgattgcattttgccattgttctttattttttcagtaatgctccatctgtaaacaacccaaatttcaaagcctgacatagtgtattgacaaattattcctggatgcctgtttttatcaggccaaaatccatagttattctaaaatggatatcatacaaataatgctgctgtagcatgctaacattttccagactattatgaaaatgtttagctcatttacaagtcatgggaaacaatatcggaatttgctactgtgtagaaccattactatagcacttccagtgatgcctgcttgtgatctttattgcccactttatagttctgtattttcatctccattttttaatccttaaatatacaaagtaaaatgtaaatatcttttttgtgggtcttttagaattattttttagcattagcacttgtaaatttactggaagtttcaacaatttgtatttcatgttagataaaagtaaggaagctttcaaagaaaagtctaacaaatataacacatgtacccacctccccaaatgaaaaaatgttagcattttgttgtattttatttagatttttttgcagagaaataagccattatacatcaagttgaaattctacttactattgttgtgcgacaaattatctcaaaacgtagtgatttaaaacaaccatttttttttactcacagattatgagagtcatgaatgccgaacaggcacaagaaggagtgtttctttctgctccacaaagtgcagcttcagataggaaggcttagaggttgggatgacccaatggccagggcaggagccgtcagggtgtcttaatttactgatttggcagagagtagtgctgtcagttgggccctcagttagctgcaacaactgcacatgatacctctgtgtagcttgggcttcctcctagcatggtggctgcagacgtcttacaaagtggttcagagccccacaggtgtgttctataatagctcacaaggcagaagctgcattgcctttcaggacctagcctcagaagtcacactgcctcatttctgctgtattctgtcagttccaggagagtcacaagcccttcctggattcaagggaaagggaattagatgccatttcctgatgaaggtggggcaaagttttgaaagagcatgtgtgggggactcatgccatctttggatagtcccagtctccctcctcaaggacatcaactcttgtagtttgtctccagtccaaacatgtgtgggcactttccctgcatatgtgggtatccacgtgaatgtctcttcattgcttctccatctttctaaaaagtaatcacagagagtcatgaaatccagtgttagaaccaggcattgttaatgctcttatgttattattattcaagctgggctaggggaatgtggcattaataaaacaatatgtacattggatttagttatactatactctctattctaatactttgtaatcattagtaataaatagtagcatattacttcatgtaggattttgcaaagcttaaactattttcacatttgttccttcagtccaggcttcctaaaaataaaatataataagagtcttgagacttaagttcatattttgcatgaatcagataaaataatagatagtaaaatgctttgtaaactgtgcagagctattaagttgccccttatcattaagtttttaagtctgattttctgatattgtaatcctgtcctaggcttcctctcatttctttgctgtaatctttgcttctacctcatttcttgtgtccaaatacaatcagttattcaaggcctggctcaaatgctgcctagaagcctttcctgacacagacctcccagcttacctcctctccctcctctgtgcttttatcgcattctgtgtttctctggtagattatcttttgtattctatttcacgtatcacatcactggggctcacctggaagcttctagcaaaccaaaccccagtctctgtagcccttagtgcacaacaacatgcctcccacccaggagcaggctgtgaaagtctttttattttttaattattatactttaagttctgggatatgtgtgcagaacatgcaggtctgttacataggtatacatgtgccatggtggtttgctgcacccatcaacctgtcacttacattaggtatttctcctaatgctatccctcccctagtaccctaccccctgacaggccctggtgtgtgatgttcccctccctatgtccatgtgttctcattgttcagctcccacttatgagtgagaacatgaggtgtttggttttctgttcccatgttagtttgctgagaatgatggcttccagcttcatccatgtccctgcaaaggacatgaactcatccttttttatggctgcatagtattccatggtgtatatgtgccacattttctttatccagtctatcattgatggacatttgggttggttcccaagtctttgccattgtgaatagtgccacaataaacatacatgtgcagcgtgtttctagtagagtgatttataatcctttgggtatgtacccagtagtgagattgctgggtcaagtggtatttctggttttagatccttgaggaatggctacactgtcttccacaatggtggaagacaatcccaccaacagtgtaaatgcgttcctatttctccacatcctctccagcatctgttgtttcctgcctttttaatgattgccattctaactggcttgatatggtatctcattgtggttttgatttgcatttctctaatgaccagtgatgacaagcttttttttcatgtgtttgttggccggataaatgtcttcttttgagaagtgtctgttcatatcctttgcccactttttgatggggttgtgtttttcttgtaaatttgtttaagtttgtttacaagtgggatgacagtgtaaagtctcccactattattgtgtgggagtctgaatctctttgtaggtctcgaagaacttgctttatgaatctgggtactcttgtattgtgtacatatatatttaggatagttagctctttttgttgcattgatcttttactattatgtaatgcccttctttgtcttttttgatctttgttggtttaaagtctgttatatgaaactctgggatgaaaattattgtcattcagaatgtcgaatactggcccccactctcttctggattgtagggtttctacagagagatccactgttggtctgatggacttccctttgtgggtaacctgacctttctctctggctgccctttacattttttccttcatttcaaccttggtgaatctgacgattatgtatcttggggttgctcttctcaaggagtttctttgtggtgttctgaatttcctgaatttgaatgttggcctgttgtcctgggttggggaagttctcctggataatatcctgaagagtgttttccaacttggatccattctacccatcactttcaggtacaccaatcaaacgtaggtttggccttttcatatagtctcatatttcttggaggctttgtttgttccttttcatgcttttttttgctgatcttgtcttcatgatttatttcattaagttgatattcaatctctgatatcttttcttctggttgattgattcggctattgatacttgtgtatgcttcacaaagttctcatgctgtgttttttagctccatcaggtcatttatgttcttctctaaactggttattctagttagcaattcatataaccttttttcaaggttcttagcttccttgcattgggttagaacatgctcctttagctcagaggagtttgttattactcaccttctgaagcctacttctgtcaattcatcaaagtaattctaattctccatctagttttgttcccttgctggcaaggacttgtgatcccttggcgagaagcagtgtcctggcttttggaatttttagcatttttgccctggtttttcctcatcttcgtggatttatctacctttgatctttgatactggtgaccttcagatggcgtttctgtgtagatgtcctttttgttgatgttgatgctattcctttatgtttgttagttttccttctaacagtcaggcccctctgctgcaagtctgctggagtttgttggaggtccactttagaccttgtttgcctgggtatcaccagtggaggctgcagaacagcaaagatttctacctgtttcttcctctggaagctttgtctcagaggggcactcaccagatgtgagccagagctcttttgtatgaggtgtttgtcaacccttgctgggaggtgtctcccagtcaggaggcatggtggttagggaatcacttgaggaggcagtctgtcccttagcagaacttgagtgctgtgctgggagatctgctgctatgttcagagctggcaggcaggaacgtttaagtctactgaagctgtgcccacagctgccccttcctccaggtgctctgtcccagggagatgggagttttatctataagcccctgactggggcttctgcctttctttcagagaggccctgcccagagaggaggaatctagagaggcagtctggctacagtggctttaccaagctttggtgagctctgtccagttcaaacttcccagaggctttgtttacacggtgagggggaaaaccacctactcaagcctcagtaatgatggacacccctcccccaccaagctcgagtgtcccaggtcgatttcagactgctgtgccggcagcaagattttcaagccagtggatcttagcttgctgggctccataggggtgggattcactgagttaaaccacttggctccctggcttcagccccctttccaggggagagaacagttctgttttgctggaatttgaagcaccactggggtatgaaaaaaactcctgcagctagctcagtgtctgcccaaatggctgcccagttttgtgcttgaaacccagggtcctggtggtataggcacccgagggaatctcctgatctgcacgttgtgaagaccatgggaaaagtgtagtatctgggccagaatgcatggttcctcacaggatggtttctcaaggcttctcttggctaggggagggagttcctcaaccccttgcacttcctgggtgaggcaatgtcccaccctgcttcagctcaccctctgtgggctgcacccactgtctaactagtcccagtgagatgagctggtgcctcagttggaaatgcagaaatcacccaccttctgcatccacctcgccgggagctgcagaccagagctgttcctattcagccatcttgccacctgtgaaagtcttttgaatggatgaatgaataaatgaatgaatgaactgttttttcactggcttcatatgctcatgcctcactaaggttgtagaaaatacaggatcttgaatactttaaagtggcaatgtcttgtgagacagacatcatccctgctgtcccaaaattacccagcgtgtgtggagaggcccctggctttggagatggggggcatttcccttgactcccacctcctcagcaccacagggctcatctctggggacctggctttccagttagagcagacctggatcaagaagggccacaggaaagagaaaagaaagacttggcagtgggagggcagggcgttcaggcctctccagggaagggtgccaacctctggacttagcatgatgtttttaaaagaaatgaatgtgtgtcttgtctctaccttcaacttgtaaggcaagtgcagtgccagaggctggggtatctctgctgcccaggtgcactccacagagacagagcaagagcacgtgcagactgtgctgtccaactcgcatagaaggctgacaaccacttccgtcctaatggggaaagtgaagttggcaaggcagaaatgaccacatgctcacccaaaaccttggtagcagcatgtctttccagaaattttgcaagccagatctggaaatttgatggctttgctcctctttttcctgaaagaaatggaaggaatcaggctcatgaaaagccagatttcacctccatgcacacaaccaggacccttgccttcctgaaatgccccacaggctttcacagaatagatgcagtcttagcagtgggcagcttgcttgttgtctggcctaagtctgagccaagataaagacatataaactgccaaggagacactctattccagaaccttctcttctttgcaaagcaaacataattttaagatcaagatgcataactcttgtaatcaaaagcttacacatttcctagcccccccaccaccctccacccccaagcaatgggttctaagcaatataaactgccaaagtggtgtgtagagggaaataaaaaccagactggtaagataccaacttttttataccagtttcagaaagtgcttatgcagagcaagtgtgggacaatattcaattggcaaaaatatgatgaaagtagctcacttaagaaaggaataaagtcttgtttattgaaagaacagtgacaagtttttttaaattctgaaagtcttgcatatttcctgcactgtatatttacctaagtacaagtgttttaagaatgatctcttgagcctgcttaaatcaagaacgcatatttcagcaatttgaaaaaaattgcatttctttgttcatggctgttctcggggttgagaggtatggacccaggagtcagaggtctgagtttaggcttccacctgctaactagcttggaacctctgactaggtttttaaaccctctaagtcttgggtttctcacctgtagaatgaggataataatcatgtctacctcacagtattgttgggaggacttaatgagatgtagagaaactaatctaaagcctggctcacagaaaggtaatgtgaagtctcaaaaaaagtgaattttacaatagcaaagacatggaaccaacccaaatgcccatcagtgataaagaaaatgtggtacatatataccatagaatactatgcagccataaaaaggaacgagatcatgtcctttgcagggatatggatgaagctagaggccatcatcctcagcaaactaacacaggaacagaaaaccaaacaccacatgttctcactcataagtgggagttgaacaatgagaacacatggactcaggcaggggaacaacacacaccggggcctggttggcgtgggggcaggggggtggtgcggagaggggtgaggggagggcgaacaccaggacaaagagctaatgctcgtgggtcttaaaatatagatcatgggttgataggtgcagctaaccaccatggcacacgtatacctatgtaacaaacctgcacatgtatcccagaacttaaactaaactaaaatttttttttaagtgaattttagccactagattttagagttgaagcatgccatggtacttgtgattaggcatctacctgtgtatttattcacctgaacacctggatgtgtagaataaaaattgctcaattgttgaaggctgctgcatcgctctatgctacttgttctgttaaagtatgttcagggagccagcccagagaggcacctccttttagctctgtgaggccttaaagctgggtcaccatgaagtccctgtatatatattttttgttttaataactccaagtaaccaaatgaaaacaattatttataaaatgtattaagaagtaaatgttatcaatttgggactttgcacaactattattaatgtgacctcaggtcccatgacaaattagaatggcaatcctgggtgagaagttaattttgtcctgaagctggcagaatcaacatgcaccccagttgtgggataggcctgttctctcactccatcacatccaacacctggcaaggacagcttttggtatgctaaagaatttgggaaagatgctgttggtgtaggggcggggagactagaaacaagatctttccatgggcagagctcttcagagcttgataacaaagtttggtctgcagcctttgtcaaataattataaactctccagttgaaacagggaaatgtgggctggcgtggtggctcacacctgtaattccagcactctgggaggctgaggcaggtggatcacttgaggtcaggagttcgagaccagcctggccaatatagtgaaaccccatctctactaaaaatacgaaaattagctgggtgtggtgatatgcacctatagtcccagctactcaggaggctgaggcaggagaattgcttgaacccagaaggtggaggttgcagtgggctgagatcatgccaacacactccagctgatagagtgagactctatttcaaaaaaaaaaaaagaaagaaaaacagggaaacgtttgcaaagcttccatctccaggttgacttcagtcaataatcctattgtcttaaggctggagtggacttccttgaagctctttgcccagaaaaccttgccaaaactctcctaagattattaagagttttctcgagtctcttttcctgattccaatcaactggaaatgttatgaaaataattctgtggtcaagtctcacttactcttgctctcaaacacaatccaccaaaagaacaaaacacaaagtaaaagtggatgcaagacacaagaggaagaggggccctctgcagaggctgctaagcaaacgtaggtttggctcaaagatttttgtttctttgaatcagttcactatttttaacctgtggaaatttgttcactcattctaacagtagcttttgctttgtgaaattggtttatttagtgttatgttcctcctgtaaaccttttcattgtatgtttttctcctaatctaatggtaatcctctcagtgatatgagtaacctggtgtttgtatttaacactccttcaacattcacagaatcagaaaatatcagaacaagaaagccccagccttcaagattgtttgatttgtgttccctaattttatgtgtgaacaaaactgaggctgtgaagattctagaataatatgttgagctcaaaaatatggtagtagaattagaatatagctttctaatatttgtataaaagtcaatgatatttagaagtttaaaaaagatacacattaaactgggaaaatactaaatatttaaattctgtaggctagttttcatattctggaaaggtggattttcatatggcactggtgctggtgtttcatcaggtcagctgtctatgtcataagagggtgttcttattagaaaatgtaggctttggcaagctttaaaaggtacacgtgttactgcatgttctgacgagattttgaaaatctttggcaactgtgctttccaagtggagaaaaagggctaccataatgttgaaagacggaaattaaaatctaatcagatatggtggcccttatcctccaccttagaatttcttttcgtggaatgtctggtggacagtaatatatagaggctcctcgacttaggatgggatcacatccagatacacccattgttaaattgaaaatatcataagttgaaaaatgcatttaatatacctaatctaccagacatcatagcttagcccagcctactttaaattgctcagaatgcttacactagcctgcagtcgggcaaaattatctaacacaaagcctattttgtaataaagggttaaatagctcatgtaatttattggatatagtatcagttgtttccccttgtgatcgcatcactgactgggagttgtggctcactgccacttcccagcatatatgactagcctggaaaaagatcaaaattaaaaaacaaagtacatttctactaagtgcatatcactttcacaccattattaagtcgaaaatcgccaagttgaaccatcctaagttggggaccgtctgtagatcaggcaatccttgacattttatggcggcagattgccaaaagagattggagtctagaagtcctggaagcagccccaacaattacacagaactcagcatcatgccctcacatcaaggcaaggagggagagttgtccctatttttcctttccttgaaagggatagtgaaactcattctgaggtttttaaaaaatgtactttttaatgcttttcctctatctgttttgctctcccttgataccctgtctacatcatgatggctgtggcactgctcctgctccttacatggggtcttagaatgcacaaagctgcccaatatcactttctctgtatttgaggaaaatttctagtagcaaaagaatatcctctgacactcttttcaaaatgccaactaaatgtgatagaactactttttgcaacagtgaagtcccaaagtctctttcttcctgatgggttaatttagtaccttcctttttccaaatcaaagaaccataaaagtcagtgaaaatctgcattattattatcctgtgtgtttagttttgctttttagtacttaccattattaaacacttggcccatttttggctaattgttgtgtaattccaaatacaaaccagtcaccatggattattgcagttagagtcatcagaaagcaaggagctatgactcatgctctgttcttgccatgtttttctgatttgtatttcatttcttacctgtgctcacaagtcacatgaagatcaatacatctgaaatatatatgctgactatgtcaccagattttatttctcccatcattgaatctggacaggcttctttcaaaagtgttgagtcatttttatgtctttatcacactcttctaaagtccttaaaactcctaattatttcagaggattattgtcatataaggtatacaaaatcaattatatgaagaagttgtaatcactataattaaactgaggcttatctagacagatcctgtgtcatatttttcacataatgaggctaaaaactttgtggagaaaataatggatatttatagaatatactcaagtgtatttattttagaaggtctgttagacatttcacaaaagaatctgtaatctacagaaattaccaaattatgttacataatattttaaaaacttgttttagaataagttggaatgtgaggtttataaaacaactggaataataaactgaaattataatttaatttttatacccagtgcatttatttttcttcctatgacttgactatagtttaaaattcttataggtttagtatcccttttttgaaaacaggttttcaatgtgtttctgtaacaataatgaaaagtaaaggcatgtaatctcttttccaaaataaaagattggtttgagaattatgatcatatatacaatgtactaaatgcaaccttttatgatgatgatataaaagattcacagactcacaaatcatatgccactcaactaaaatactaagagaacataactttatctttataaaacatatacataggcataaatacatagacaaaggtctagaaaaatatgcatatcagtgtggaaatgcaagtgatgataatgatttctgttgttttcttctaatttctatagagtcactatgctatttaaattttcaaaaaattaagttatgtgcaataatctttttaaaattatttgttttttaatcagctttttaatctgatgacatagaatgataacgtagtaaatcatagtttctgaaccaaaaaacagggacacatagactgagaagtgccaagttcattttagagattaaaaatacaacggcattgggacttttctagaaaattcaagatatgtggtcacaattgaggtgttcagcttctagagcgaactgaaccagatatctgctaaggctctgatagagaacagctggaagctcagaaaggtaaacataattcaaatattggtgaatatgccagtgcagccgagaaggtgacaggatttgaaaaatgtgccaggacacaatgagaaaggccttggaataaatacaaaaagcccaaactttattctgtaaaagtggggagctactgaaggttttaatcaaagcagggataatctcatttccaaggcaaaaaaacaaaaagaggcattccttcctaataccacatgtaggagctgttcttattctatggtggattattactttagtagtatcttataaagacagtgcctgaaggtcttttatctgtacattgatgtaacacttttcaaaagcatatcagcagacacatttttggaagcatgcattctgaaacttgaacttcaaataggagttatggctgatatcatggagtaaggtaaaacagaagctgactcctctccagtattcaaggctgactgttgtctctggaactgagaatactgggaaaagtgtgagttggacactgtgcacaactctaattaacactgttctaaagggaaagtatatgaatatattgtttaaacactaatagttaaaagttatactacaatatcttcaaggtttaacacataaattgagacacacacttaattaggcctaagaaagaagtggaatgtaaactcgttgattttattttcataaatgatttattttacaactatgaagaggaataatagaggccttttattagcaaagagattattatgatgtctattttcagccatgatttttctaccaatggaaagtggaactgaaaacctacttagggtgatgtgttggggttgggatcaaagagactactataactgtcctacc

SEQ ID NO: 926 - DNA, 81 bp, Homo sapiens
gtgaacgattttgtgagggataaatttatgcacaaagatggttcggtcccacttgcagcagaaattcttgctggaggctgc

SEQ ID NO: 927 - DNA, 105 bp, Homo sapiens
cttctataaatatttttcttcaaggtgaacgattttgtgagggataaatttatgcacaaagatggttcggtcccacttgcagcagaaattcttgctggaggctgc

SEQ ID NO: 928 - DNA, 1346 bp, Homo sapiens
gtaagtcttttgagttggtgcttcttattaagggattttgtacatactcaagaatctagcaggtattcttataggaaacagcaggtttgttttctcagaggtgctagctaatttgaaagcaggggaactcaccacacacattttttcattattctccatttagcagtggacatccaaaaatgtgataataaacttgaggacttttggtggttgctgccatcattgttgtcatcacagcagtagcagctaaattcccttcagtatctaccatattaggcacatgacgtatattacgttttactggtttaatctcaagcaaagcatgatccacagtttacggataaggaaactgaggcctatcgggcttaagtagcatacctgtgttcacacaaatcatgagtgggagaactagaatttaaaatcacacttgtctgactccagagcatgtctttctattacacctgctgtttttataggattcatggttagggtgtgttctataaagccaaatgtgcagggatctgggttctagttgaagttgatcctttatcagattatttgcccagtgcttggctcacatttgacagatggttgatattcagtttaagcgtttgtggaatatacaaatatttgcatcactaaggccacaaagccccagaaagtaaaactctagctttaggttgggctgcgtagctttggagcctgaaattcttcttttaccattttgttatgtgaccttgagatagctaatcttctctggcctatgtctgccaaaaagatatgactgtttcttaaaatttcttgtactacataccattttgagaatattatattaattaattaatgtaatttatgttctttgagaatccttgaggaatttttagatattgaatttcttctaagctgaaaaagtctgctcagccaaatttatctccatgatgagtactgttttagattaattcttgttagaagacttgaaagtgatttttaatcaagccttataaaacagttttaagttgtaagatgtatgtttttattttgtcactattgtcagtgtgtctcccttcttaagctattctaattgcagaacatatttttggctttcatttatcttttaacttttctcctgaaacatcagtgatgcatatatatttttcattttttaaaactattatactattaagagtacttctcaaactattttaagatctgttaaattgtgcaatttatgattactccaatagactgatagaaaaaaatagcatatattgacagatgcatatttataagtgtttaatgactttctttatatttttcatcagcttctataaatatttttcttcaag

SEQ ID NO: 929 - DNA, 1322 bp, Homo sapiens
gtaagtcttttgagttggtgcttcttattaagggattttgtacatactcaagaatctagcaggtattcttataggaaacagcaggtttgttttctcagaggtgctagctaatttgaaagcaggggaactcaccacacacattttttcattattctccatttagcagtggacatccaaaaatgtgataataaacttgaggacttttggtggttgctgccatcattgttgtcatcacagcagtagcagctaaattcccttcagtatctaccatattaggcacatgacgtatattacgttttactggtttaatctcaagcaaagcatgatccacagtttacggataaggaaactgaggcctatcgggcttaagtagcatacctgtgttcacacaaatcatgagtgggagaactagaatttaaaatcacacttgtctgactccagagcatgtctttctattacacctgctgtttttataggattcatggttagggtgtgttctataaagccaaatgtgcagggatctgggttctagttgaagttgatcctttatcagattatttgcccagtgcttggctcacatttgacagatggttgatattcagtttaagcgtttgtggaatatacaaatatttgcatcactaaggccacaaagccccagaaagtaaaactctagctttaggttgggctgcgtagctttggagcctgaaattcttcttttaccattttgttatgtgaccttgagatagctaatcttctctggcctatgtctgccaaaaagatatgactgtttcttaaaatttcttgtactacataccattttgagaatattatattaattaattaatgtaatttatgttctttgagaatccttgaggaatttttagatattgaatttcttctaagctgaaaaagtctgctcagccaaatttatctccatgatgagtactgttttagattaattcttgttagaagacttgaaagtgatttttaatcaagccttataaaacagttttaagttgtaagatgtatgtttttattttgtcactattgtcagtgtgtctcccttcttaagctattctaattgcagaacatatttttggctttcatttatcttttaacttttctcctgaaacatcagtgatgcatatatatttttcattttttaaaactattatactattaagagtacttctcaaactattttaagatctgttaaattgtgcaatttatgattactccaatagactgatagaaaaaaatagcatatattgacagatgcatatttataagtgtttaatgactttctttatatttttcatcag

SEQ ID NO: 930 - DNA, 229 bp, Homo sapiens
acacgaatgcagagtttgagtccagatcccaaagcccagtacacaagtatctacggagccctcaagaaaatcatgcggaccgaaggcttctggaggcccttgcgaggcgtcaacgtcatgatcatgggtgcagggccggcccatgccatgtattttgcctgctatgaaaacatgaaaaggactttaaatgacgttttccaccaccaaggaaacagccacctagccaacg

SEQ ID NO: 931 - DNA, 706 bp, Homo sapiens
acacgaatgcagagtttgagtccagatcccaaagcccagtacacaagtatctacggagccctcaagaaaatcatgcggaccgaaggcttctggaggcccttgcgaggcgtcaacgtcatgatcatgggtgcagggccggcccatgccatgtattttgcctgctatgaaaacatgaaaaggactttaaatgacgttttccaccaccaaggaaacagccacctagccaacggtattttgaaagcgtttgtctggagttagaaagttctcttcttcaacacgtccctccccagggtgttcctccctgtgacccagccgcctcgacttcggcccgcttgctcacgaataaagaactcagagttgtgtgtgcaatgcacacccagacacacgcacgcacacacacgcgcgcgcacacacatgcttttttctgttcccctccgctttctgaagcctggggagaaatcagtgacagaggtgttttggttttattgttatgtgggttttcttttgtatttttttttgtttgttttgtttttaaacattcaaaagcaattaatgatcagacataggagaaaccctgaatagaaacaaaacttttgaatgctggattcaaaaaaaaaaaaaagttatctggacagcttctttgagactatttaaaaactggtacaacaggtctctacaacgccaagatctaactaagctttaaaag

SEQ ID NO: 932 - DNA, 1985 bp, Homo sapiens
gtattttgaaagcgtttgtctggagttagaaagttctcttcttcaacacgtccctccccagggtgttcctccctgtgacccagccgcctcgacttcggcccgcttgctcacgaataaagaactcagagttgtgtgtgcaatgcacacccagacacacgcacgcacacacacgcgcgcgcacacacatgcttttttctgttcccctccgctttctgaagcctggggagaaatcagtgacagaggtgttttggttttattgttatgtgggttttcttttgtatttttttttgtttgttttgtttttaaacattcaaaagcaattaatgatcagacataggagaaaccctgaatagaaacaaaacttttgaatgctggattcaaaaaaaaaaaaaagttatctggacagcttctttgagactatttaaaaactggtacaacaggtctctacaacgccaagatctaactaagctttaaaaggtcaagaagttttatggctgacaaaggactcgcgcaacgcagaaggcctttcccaccttaagcttccggggatctgggaattttacccccattctcttctgtttgtctgagtctcatctctctgcaagcaagggctgaaatcattttgtttggttgttttgagggagagaggcggggtgggggggtgcaaatctgccagcagctcttacgtaaggcatgttttattggggagggctgagcttttattttctcctctccagtggggttggcttttattgtttcttgtttgggtttggaatggaaatatggatagcagcataaagtacttttattttgacaaaattcatttttttcaacaatggagacatagatttgacccacaataacttctccccctctctttttactctgctcaaaaagcatctctcctcccattacccaaccttggtcataagtgtgcctggctggtttgcagatatttgttctgctttgtaaaaattggccattagtgcatttattgagatgatctctaaagagctatgccctgacctacccctgattctatgacattggggcccttcttttgctgaaactgccttacgtaatggttttactccttgaaagagatttgacggaatccattttatgccaagtgctgccctgcactgtttctgcaatatgtggtgtatgctgtggtgatcttgctgggaatgattataagtgtgtgtgtggtgggggagtgggtattacatgcattgctgaagagtcatcctggtgttcctcattcctcccaccttcccgtggtcattttaattacggggcagtgtcaccgcaaagggaggaaactcaaagccgaaagcaaaattccaggcctgattctggcttttgaggttcctggttcttgaagccaggcctgacccgactctcagatggggtcagtcccgtcgctttgcagactgaccctggaaatctacaaaatgcagattttcctgatttcctcttctcttgcccagttttttttttttttttttttttttttttttaaagcctggattgtaaccagattttcttttttcccccttctcagctgtagatatgatatctcctttcagggccccagcttaagggcaaagtgagttaatgtgtagacaaaggcgagggacaagagagagttaacatctagacagtggaaaaagccatggtgtgtggtttctgggaaccaccaacacttgcaggtttagctttttcccagggttgactacaagaaagaaaaccatgtttttgcaagattaaaatgtggttgagtgtgcctaaattaaccatccccatttttatcatatttccaccatcacttcagggttttaagagtcagtgctcacctgggcggagctggtagtacattttgcttcttagaaagctaagtcctgggttccgtctgattttaggttccaggaacttcctgagaacacccgatcgcagagggtaattttctggagtttgttttgcag

SEQ ID NO: 933 - DNA, 1508 bp, Homo sapiens
gtcaagaagttttatggctgacaaaggactcgcgcaacgcagaaggcctttcccaccttaagcttccggggatctgggaattttacccccattctcttctgtttgtctgagtctcatctctctgcaagcaagggctgaaatcattttgtttggttgttttgagggagagaggcggggtgggggggtgcaaatctgccagcagctcttacgtaaggcatgttttattggggagggctgagcttttattttctcctctccagtggggttggcttttattgtttcttgtttgggtttggaatggaaatatggatagcagcataaagtacttttattttgacaaaattcatttttttcaacaatggagacatagatttgacccacaataacttctccccctctctttttactctgctcaaaaagcatctctcctcccattacccaaccttggtcataagtgtgcctggctggtttgcagatatttgttctgctttgtaaaaattggccattagtgcatttattgagatgatctctaaagagctatgccctgacctacccctgattctatgacattggggcccttcttttgctgaaactgccttacgtaatggttttactccttgaaagagatttgacggaatccattttatgccaagtgctgccctgcactgtttctgcaatatgtggtgtatgctgtggtgatcttgctgggaatgattataagtgtgtgtgtggtgggggagtgggtattacatgcattgctgaagagtcatcctggtgttcctcattcctcccaccttcccgtggtcattttaattacggggcagtgtcaccgcaaagggaggaaactcaaagccgaaagcaaaattccaggcctgattctggcttttgaggttcctggttcttgaagccaggcctgacccgactctcagatggggtcagtcccgtcgctttgcagactgaccctggaaatctacaaaatgcagattttcctgatttcctcttctcttgcccagttttttttttttttttttttttttttttttaaagcctggattgtaaccagattttcttttttcccccttctcagctgtagatatgatatctcctttcagggccccagcttaagggcaaagtgagttaatgtgtagacaaaggcgagggacaagagagagttaacatctagacagtggaaaaagccatggtgtgtggtttctgggaaccaccaacacttgcaggtttagctttttcccagggttgactacaagaaagaaaaccatgtttttgcaagattaaaatgtggttgagtgtgcctaaattaaccatccccatttttatcatatttccaccatcacttcagggttttaagagtcagtgctcacctgggcggagctggtagtacattttgcttcttagaaagctaagtcctgggttccgtctgattttaggttccaggaacttcctgagaacacccgatcgcagagggtaattttctggagtttgttttgcag

SEQ ID NO: 934 - DNA, 199 bp, Homo sapiens
gggagccggggctgctgctgaccaaggtggtaagccagcaacccttcgtgggctaccgcggcccccgagagctgtcggaacggaagctggtgcgcaacgtgcggcaatcgggcgacgtttactacaacaccggggacgtactggccatggaccgcgaaggcttcctctacttccgcgaccgcctcggggacaccttccg

SEQ ID NO: 935 - DNA, 271 bp, Homo sapiens
gtccgaggcagggtttctcggggcggggctggcgcggggccacggacgctttcagatcctagagggagtcaggctgaagaggcgggactttcctgtcgtaagagggcggaacttggagtcaggacttctcacgcgaaggcggggcttctcgattttcgagggggcggggctgactgggcctcctgatccccaaaaggggcggggcgggggcaagaggcggggcctctccttcccgggggcgtggtcacaagcgccggctccctccttgcag

SEQ ID NO: 936 - DNA, 296 bp, Homo sapiens
gggagccggggctgctgctgaccaaggtggtaagccagcaacccttcgtgggctaccgcggcccccgagagctgtcggaacggaagctggtgcgcaacgtgcggcaatcgggcgacgtttactacaacaccggggacgtactggccatggaccgcgaaggcttcctctacttccgcgaccgcctcggggacaccttccggtccgaggcagggtttctcggggcggggctggcgcggggccacggacgctttcagatcctagagggagtcaggctgaagaggcgggactttcctgtc

SEQ ID NO: 937 - DNA, 174 bp, Homo sapiens
gtaagagggcggaacttggagtcaggacttctcacgcgaaggcggggcttctcgattttcgagggggcggggctgactgggcctcctgatccccaaaaggggcggggcgggggcaagaggcggggcctctccttcccgggggcgtggtcacaagcgccggctccctccttgcag

SEQ ID NO: 938 - DNA, 72 bp, Homo sapiens
caacacttcttgttgctgtaaatgaacttcgtaggaatgctcgggctaaaggaatgtcattttacaagtatg

SEQ ID NO: 939 - DNA, 137 bp, Homo sapiens
atgccatctttaaagtttggaggcatgaagtttctgtcttgctgatatgaatgcttttcttttagcaacacttcttgttgctgtaaatgaacttcgtaggaatgctcgggctaaaggaatgtcattttacaagtatg

SEQ ID NO: 940 - DNA, 1200 bp, Homo sapiens
gtatgtactgtcacaaagtatgtctctattcttaatttagtaatatatattcagctgtccattattatagtttgctaagttctgttgattaaagaaaagcaagtgtgggaataggcatctaagctttctctacttttagggagtaaagtctttgcataatgtactgtggttgttctgtaatggatagctgtgggggggtgtgtaactgcgccctgccatgggatggcatcctggcaaggcctcatttctctttgtgtcctgagctgctaggataggctcaagtaggtgactatcagatagatggaagacagtaactgatgtggcatgaaagcgcttagcaagcccaccatatttgtggttatttttaaactatgtggtggtaagaggtgttccttacagttttcactttgcaagcattattccttgattgaacccaccaccactactatcgctgttacttgccgattcactaaaaattggataaataattattttacttatttaaaagggaaagtatgtttcatttttgagtatcataccataatactcaaaacatttgaaatggagtataaaaaacataattaaactgaacttttaaaattagagtttaataatattcaccagaagaatattatttactggctcttgtgagacaaatatttcaaagtttttgaaatacacagctatagcagtatgatgacagagaactgctaatatcagtataaaactgcctgattcactgctgtgctcatgtttacttctgaaacattgtaactttctatgtataatgttcccttcatctatttttaaaattaacattttttattgacagatcctaattgtatatgtttatggggcccctcatctttgaaagtctatgaaatggttataacacaacctgcttcaaaagattgggaggctcagaaatgaatgtggttagtgtggtgctgccaaatagcagctcttcaataaactaaagctgttgttattagtaattatatttaattattatggtttagaactatggggttcattttattataatgattaattgataacaactaattaacatagaacttgtccttattgccaaccctagttttaaaatgttgtgcttatttgtttatcttttgagatgccatctttaaagtttggaggcatgaagtttctgtcttgctgatatgaatgcttttcttttag

SEQ ID NO: 941 - DNA, 1135 bp, Homo sapiens
gtatgtactgtcacaaagtatgtctctattcttaatttagtaatatatattcagctgtccattattatagtttgctaagttctgttgattaaagaaaagcaagtgtgggaataggcatctaagctttctctacttttagggagtaaagtctttgcataatgtactgtggttgttctgtaatggatagctgtgggggggtgtgtaactgcgccctgccatgggatggcatcctggcaaggcctcatttctctttgtgtcctgagctgctaggataggctcaagtaggtgactatcagatagatggaagacagtaactgatgtggcatgaaagcgcttagcaagcccaccatatttgtggttatttttaaactatgtggtggtaagaggtgttccttacagttttcactttgcaagcattattccttgattgaacccaccaccactactatcgctgttacttgccgattcactaaaaattggataaataattattttacttatttaaaagggaaagtatgtttcatttttgagtatcataccataatactcaaaacatttgaaatggagtataaaaaacataattaaactgaacttttaaaattagagtttaataatattcaccagaagaatattatttactggctcttgtgagacaaatatttcaaagtttttgaaatacacagctatagcagtatgatgacagagaactgctaatatcagtataaaactgcctgattcactgctgtgctcatgtttacttctgaaacattgtaactttctatgtataatgttcccttcatctatttttaaaattaacattttttattgacagatcctaattgtatatgtttatggggcccctcatctttgaaagtctatgaaatggttataacacaacctgcttcaaaagattgggaggctcagaaatgaatgtggttagtgtggtgctgccaaatagcagctcttcaataaactaaagctgttgttattagtaattatatttaattattatggtttagaactatggggttcattttattataatgattaattgataacaactaattaacatagaacttgtccttattgccaaccctagttttaaaatgttgtgcttatttgtttatcttttgag

SEQ ID NO: 942 - DNA, 78 bp, Homo sapiens
gtgattccttcaacacccagaatgagccagaagacatgatgaaaaaagagaaaaagtctgaagctctgaatatcagag

SEQ ID NO: 943 - DNA, 116 bp, Homo sapiens
aacttatacacaacacaaggtttcttctttgaatgcaggtgattccttcaacacccagaatgagccagaagacatgatgaaaaaagagaaaaagtctgaagctctgaatatcagag

SEQ ID NO: 944 - DNA, 695 bp, Homo sapiens
gtgcctttcggttgcatcctttggaccgcttggcccttccttcctcctcccacccggtccctttcttctcaccccacgccctctttttcttctgcatgctttttttctgtttttttttttttgttgttgttgttttttttttttttttttttttttttttttaataaatccattccctttacaatcccgctttacttctcttctgccaatttaacatattccccatcccttcttttttctcctggatcctcgggtagccctggcctcttttcccttaccctattctctgtatatgagtattgattttcttggaaatcggtcactattattgggcaacaggcaggactctccaacccctcctccctctcattacttgctgtctgaattttgttgttctccccccctctttgcccatccgtttgtcttcttgggtgttacgggtttaggggctgcaggtgggctcccattcaccctctttttgttttaacttgaaaggatgtgtgaatgaagtccaaaggtggatcacaaggctatttcaaggccaaaatgtactgttctgagctgtgggtgtgcagaagggtctcccttaagctagtagaaatttaaaataacaaaactttattttgagtccattggtttttttttgtttgtttgtagaacttatacacaacacaaggtttcttctttgaatgcag

SEQ ID NO: 945 - DNA, 657 bp, Homo sapiens
gtgcctttcggttgcatcctttggaccgcttggcccttccttcctcctcccacccggtccctttcttctcaccccacgccctctttttcttctgcatgctttttttctgtttttttttttttgttgttgttgttttttttttttttttttttttttttttttaataaatccattccctttacaatcccgctttacttctcttctgccaatttaacatattccccatcccttcttttttctcctggatcctcgggtagccctggcctcttttcccttaccctattctctgtatatgagtattgattttcttggaaatcggtcactattattgggcaacaggcaggactctccaacccctcctccctctcattacttgctgtctgaattttgttgttctccccccctctttgcccatccgtttgtcttcttgggtgttacgggtttaggggctgcaggtgggctcccattcaccctctttttgttttaacttgaaaggatgtgtgaatgaagtccaaaggtggatcacaaggctatttcaaggccaaaatgtactgttctgagctgtgggtgtgcagaagggtctcccttaagctagtagaaatttaaaataacaaaactttattttgagtccattggtttttttttgtttgtttgtag

SEQ ID NO: 946 - DNA, 773 bp, Homo sapiens
aaggaacccaatgtggctcgcgtgggctccgtggccatcaagctgtgcaatctgctgaagatagcaccacctgccgtgtgccaatccattgtccacctctttgaggatgacatggtggaggtgtggagacgctcagtgctgagcccatctgaggcctgtggcctgctcctgggctccacctgtgggcactgggacattttctcatcttggaacatctctttgcctactgtgccgaagccgccccccaaaccccctagccccccagccccaggtgcccctgtcagccgcatcctcttcctcactgacctgcactgggatcatgactacctggagggcacggaccctgactgtgcagacccactgtgctgccgccggggttctggcctgccgcccgcatcccggccaggtgccggatactggggcgaatacagcaagtgtgacctgcccctgaggaccctggagagcctgttgagtgggctgggcccagccggcccttttgatatggtgtactggacaggagacatccccgcacatgatgtctggcaccagactcgtcaggaccaactgcgggccctgaccaccgtcacagcacttgtgaggaagttcctggggccagtgccagtgtaccctgctgtgggtaaccatgaaagcacacctgtcaatagcttccctccccccttcattgagggcaaccactcctcccgctggctctatgaagcgatggccaaggcttgggagccctggctgcctgccgaagccctgcgcaccctcag

SEQ ID NO: 947 - DNA, 770 bp, Homo sapiens
gaacccaatgtggctcgcgtgggctccgtggccatcaagctgtgcaatctgctgaagatagcaccacctgccgtgtgccaatccattgtccacctctttgaggatgacatggtggaggtgtggagacgctcagtgctgagcccatctgaggcctgtggcctgctcctgggctccacctgtgggcactgggacattttctcatcttggaacatctctttgcctactgtgccgaagccgccccccaaaccccctagccccccagccccaggtgcccctgtcagccgcatcctcttcctcactgacctgcactgggatcatgactacctggagggcacggaccctgactgtgcagacccactgtgctgccgccggggttctggcctgccgcccgcatcccggccaggtgccggatactggggcgaatacagcaagtgtgacctgcccctgaggaccctggagagcctgttgagtgggctgggcccagccggcccttttgatatggtgtactggacaggagacatccccgcacatgatgtctggcaccagactcgtcaggaccaactgcgggccctgaccaccgtcacagcacttgtgaggaagttcctggggccagtgccagtgtaccctgctgtgggtaaccatgaaagcacacctgtcaatagcttccctccccccttcattgagggcaaccactcctcccgctggctctatgaagcgatggccaaggcttgggagccctggctgcctgccgaagccctgcgcaccctcag

SEQ ID NO: 948 - DNA, 813 bp, Homo sapiens
aaggaacccaatgtggctcgcgtgggctccgtggccatcaagctgtgcaatctgctgaagatagcaccacctgccgtgtgccaatccattgtccacctctttgaggatgacatggtggaggtgtggagacgctcagtgctgagcccatctgaggcctgtggcctgctcctgggctccacctgtgggcactgggacattttctcatcttggaacatctctttgcctactgtgccgaagccgccccccaaaccccctagccccccagccccaggtgcccctgtcagccgcatcctcttcctcactgacctgcactgggatcatgactacctggagggcacggaccctgactgtgcagacccactgtgctgccgccggggttctggcctgccgcccgcatcccggccaggtgccggatactggggcgaatacagcaagtgtgacctgcccctgaggaccctggagagcctgttgagtgggctgggcccagccggcccttttgatatggtgtactggacaggagacatccccgcacatgatgtctggcaccagactcgtcaggaccaactgcgggccctgaccaccgtcacagcacttgtgaggaagttcctggggccagtgccagtgtaccctgctgtgggtaaccatgaaagcacacctgtcaatagcttccctccccccttcattgagggcaaccactcctcccgctggctctatgaagcgatggccaaggcttgggagccctggctgcctgccgaagccctgcgcaccctcaggtacttatcgtccgtggaaacccaggaagggaaaagaaag

SEQ ID NO: 949 - DNA, 810 bp, Homo sapiens
gaacccaatgtggctcgcgtgggctccgtggccatcaagctgtgcaatctgctgaagatagcaccacctgccgtgtgccaatccattgtccacctctttgaggatgacatggtggaggtgtggagacgctcagtgctgagcccatctgaggcctgtggcctgctcctgggctccacctgtgggcactgggacattttctcatcttggaacatctctttgcctactgtgccgaagccgccccccaaaccccctagccccccagccccaggtgcccctgtcagccgcatcctcttcctcactgacctgcactgggatcatgactacctggagggcacggaccctgactgtgcagacccactgtgctgccgccggggttctggcctgccgcccgcatcccggccaggtgccggatactggggcgaatacagcaagtgtgacctgcccctgaggaccctggagagcctgttgagtgggctgggcccagccggcccttttgatatggtgtactggacaggagacatccccgcacatgatgtctggcaccagactcgtcaggaccaactgcgggccctgaccaccgtcacagcacttgtgaggaagttcctggggccagtgccagtgtaccctgctgtgggtaaccatgaaagcacacctgtcaatagcttccctccccccttcattgagggcaaccactcctcccgctggctctatgaagcgatggccaaggcttgggagccctggctgcctgccgaagccctgcgcaccctcaggtacttatcgtccgtggaaacccaggaagggaaaagaaag

SEQ ID NO: 950 - DNA, 1059 bp, Homo sapiens
gtacttatcgtccgtggaaacccaggaagggaaaagaaaggtgaatgaaagtgaagggagaagggaacctggggcattgtctctgattgctctagcatgagtccttagtgctcttcatttggctcccctaatctgactcctccttccctttctactgttttgccgcaccaggctttttttttttttttttttttagtttagtttttgtagagacaagatcttgctatgttgcccaggctggtctcaaacacctaacctcaagcaatcctcccgcctcggcctcccaaaatgctgggaccacaggcatcagctactgctcctggccctccctttttttttttttttttttttttttttttgagatggaatcttgctctgttgcccaggctggagtgcagtggcaccatctcagctcactacagcctccacctcctgggttcaagcaattctgcctcagcctcccaagtacctgggactacaggtgcacgccaccacacccagctaatttttgtatttttagtagagatggggtttcaccatgttggccaagatggtcttgatctcctgacctcatgatctgcccacctcggcctcccaaagtgctgggattacaggcatgaaccactgcacccagctttccagccctccctttctactcttatctccagccaccctccttcaaaggtctggcagcataacctctctatgccccagctgtgtctttgctcatgttggccctctggaaatgatttcccccttttttttaagtgctccagtttttcccaccttatccatcccatgtcatcttccctctgtgtggtccttgcttcccattctagctaactcttatccctcccccatactcctggagccctctgccctcagagtcttttgtgtcacacagacccaataattagaactgtttggtctctggctagactgtgagctccttgcaggtggggaagatgtcatgtatgcttttaccctccacccaaatgcccagcacaggaggaccaggattggaacaagtgttgacctctcatgtttactttgtttcag

SEQ ID NO: 951 - DNA, 1019 bp, Homo sapiens
gtgaatgaaagtgaagggagaagggaacctggggcattgtctctgattgctctagcatgagtccttagtgctcttcatttggctcccctaatctgactcctccttccctttctactgttttgccgcaccaggctttttttttttttttttttttagtttagtttttgtagagacaagatcttgctatgttgcccaggctggtctcaaacacctaacctcaagcaatcctcccgcctcggcctcccaaaatgctgggaccacaggcatcagctactgctcctggccctccctttttttttttttttttttttttttttttgagatggaatcttgctctgttgcccaggctggagtgcagtggcaccatctcagctcactacagcctccacctcctgggttcaagcaattctgcctcagcctcccaagtacctgggactacaggtgcacgccaccacacccagctaatttttgtatttttagtagagatggggtttcaccatgttggccaagatggtcttgatctcctgacctcatgatctgcccacctcggcctcccaaagtgctgggattacaggcatgaaccactgcacccagctttccagccctccctttctactcttatctccagccaccctccttcaaaggtctggcagcataacctctctatgccccagctgtgtctttgctcatgttggccctctggaaatgatttcccccttttttttaagtgctccagtttttcccaccttatccatcccatgtcatcttccctctgtgtggtccttgcttcccattctagctaactcttatccctcccccatactcctggagccctctgccctcagagtcttttgtgtcacacagacccaataattagaactgtttggtctctggctagactgtgagctccttgcaggtggggaagatgtcatgtatgcttttaccctccacccaaatgcccagcacaggaggaccaggattggaacaagtgttgacctctcatgtttactttgtttcag

SEQ ID NO: 952 - DNA, 62 bp, Homo sapiens
ctctcagcagcgggaagctgagcagcgggctgccctggcacggctggcagggcagctggagt

SEQ ID NO: 953 - DNA, 93 bp, Homo sapiens
ctctcagcagcgggaagctgagcagcgggctgccctggcacggctggcagggcagctggagtccatgaacgatgtggaggaattgactgcact

SEQ ID NO: 954 - DNA, 94 bp, Homo sapiens
ctctcagcagcgggaagctgagcagcgggctgccctggcacggctggcagggcagctggagtccatgaacgatgtggaggaattgactgcactg

SEQ ID NO: 955 - DNA, 121 bp, Homo sapiens
cccacatcctccacgacctggccatggcagtggtggttacagtcatgatgtctctgcagctctcagcagcgggaagctgagcagcgggctgccctggcacggctggcagggcagctggagt

SEQ ID NO: 956 - DNA, 152 bp, Homo sapiens
cccacatcctccacgacctggccatggcagtggtggttacagtcatgatgtctctgcagctctcagcagcgggaagctgagcagcgggctgccctggcacggctggcagggcagctggagtccatgaacgatgtggaggaattgactgcact

SEQ ID NO: 957 - DNA, 153 bp, Homo sapiens
cccacatcctccacgacctggccatggcagtggtggttacagtcatgatgtctctgcagctctcagcagcgggaagctgagcagcgggctgccctggcacggctggcagggcagctggagtccatgaacgatgtggaggaattgactgcactg

SEQ ID NO: 958 - DNA, 399 bp, Homo sapiens
gtgagtagcggggggtggaacatgcgggtgagaaggtgagtgtgagccctggctcagctcatgtgtgcaggcaggcgtgagcacaagtgtatctgtggattgcatgtgctaatggcagtacgtccacacacgcttctggaaaaacagagatgtttgtgggcatggagcatgtactgattgtggcgtcgcggccgtgctgatgtagccagcacgtctgagtgtgtggtattagtgcccacgtccatgggcatatgtgtatcagtgtgcagttagagggtgtgcacagccacatgcccttctgccaaggttctgggtactctgttctggctcctacccttagcccacatcctccacgacctggccatggcagtggtggttacagtcatgatgtctctgcag

SEQ ID NO: 959 - DNA, 340 bp, Homo sapiens
gtgagtagcggggggtggaacatgcgggtgagaaggtgagtgtgagccctggctcagctcatgtgtgcaggcaggcgtgagcacaagtgtatctgtggattgcatgtgctaatggcagtacgtccacacacgcttctggaaaaacagagatgtttgtgggcatggagcatgtactgattgtggcgtcgcggccgtgctgatgtagccagcacgtctgagtgtgtggtattagtgcccacgtccatgggcatatgtgtatcagtgtgcagttagagggtgtgcacagccacatgcccttctgccaaggttctgggtactctgttctggctcctacccttag

SEQ ID NO: 960 - DNA, 152 bp, Homo sapiens
acggtgggcaagagcagcaagatgctgcagcatattgattacaggatgaggtgcatcctgcaggacggccggatcttcattggcaccttcaaggcttttgacaagcacatgaatttgatcctctgtgactgtgatgagttcagaaagatcaa

SEQ ID NO: 961 - DNA, 567 bp, Homo sapiens
acggtgggcaagagcagcaagatgctgcagcatattgattacaggatgaggtgcatcctgcaggacggccggatcttcattggcaccttcaaggcttttgacaagcacatgaatttgatcctctgtgactgtgatgagttcagaaagatcaagtgaggagtggactgtggggggcggagactggaggatgggaatggattgagtgggtgggccaagcaatagaggtggtgatgtagctagttggttcttctctgtttattctccagttttagagggcagacttaaatggggacattgaacgctaagaaatctttttgagtccagcaaaccttgctctctagtctagcaaagtacaagttgtgaagggctgctaggctttttgtttctctcactttgcgtgcccctgggtactggggtaaagggctctcatgttctccccacaggtgtgtgaggggggagagcttgagtttctggcctcattgcctatttgtaaagctgtagcctaaagggctctcccaatgcagcctggtctgaaactgctttaagaagcctctgaccctcttcagg

SEQ ID NO: 962 - DNA, 1787 bp, Homo sapiens
gtgaggagtggactgtggggggcggagactggaggatgggaatggattgagtgggtgggccaagcaatagaggtggtgatgtagctagttggttcttctctgtttattctccagttttagagggcagacttaaatggggacattgaacgctaagaaatctttttgagtccagcaaaccttgctctctagtctagcaaagtacaagttgtgaagggctgctaggctttttgtttctctcactttgcgtgcccctgggtactggggtaaagggctctcatgttctccccacaggtgtgtgaggggggagagcttgagtttctggcctcattgcctatttgtaaagctgtagcctaaagggctctcccaatgcagcctggtctgaaactgctttaagaagcctctgaccctcttcagggtaagtgctcagctccccatgtgggtttggggccagtgatttttgttggcatttatacaaacaattggagatattgtctactttgctacaattccgtaagttattggctaactcccttgccttgagtctcacagatcttaagcttttggcccattaaaagatatgatttagcttcccatcatgttttacattcaaggctacttgaggcacaaaaagatgatgtgacttccgtggccagcagctcttttgtcatatgcagtgtccatattattctgtcactcactttgaattccctttgattctccttggggctgatttcttctgtgacccaaggtcaagaagtatagtttaaaaatgtggtagggatgccttggtgccaggtacgtattagagaggggccaacagatgagcgtggagctactccaaagttccctcctgattataaaaaatgtttattggaaaatatttttgaaaatacaaagaagtctatgaatagaaactaaaataccccgaagggtttttttctaattatgaaaggacaatacatggttattattttaaaaaataagaaaatgtgagccaaaaaagggaaaaactgtccatccacagacaaccagttaatatactgtaaaatatcaaaacaaaatcttttgagttctttttttaaatcaggctattttttcccctttatttttaggatctagctttagcttttttccccactttcctatcctgttgcagttatttttcctacttcacatttatattttgttcatctttttctggttgttgctttttgggggtttctgtttttatgcttttgaggaacagatatgaaatttcaatttctgtgtatgtgaaatttctcttaaccttttccttctatggcttctcctatttctgatgtaagatgaggggcagaattataggcctgtgaggttgaattgatattagaaggacactgcacgtaagtgaggtgggtgggagtcatttgattggaattgtttaggcagcctcctgatgttggcaagaccttaagctgaagggagggaatagggtcctaagaaagaagacttggctgagggaagggccttcacggttgctgtggaatagcatttgggcccgggctgggctttgttgaccttgtcctatctcttggtcagtgtgtcctcttggcatggtaggaaacaggtagatagccacctaagaggttatgtgttcagcctgtagagactatccaggagggctatcttgggaaagtttgtgtactgtttgttaggagatgcagtataagcaaatcttggaggccactaggcaggtgaactttacccacctctaacactttttttgttccttctaaacctctctttag

SEQ ID NO: 963 - DNA, 1372 bp, Homo sapiens
gtaagtgctcagctccccatgtgggtttggggccagtgatttttgttggcatttatacaaacaattggagatattgtctactttgctacaattccgtaagttattggctaactcccttgccttgagtctcacagatcttaagcttttggcccattaaaagatatgatttagcttcccatcatgttttacattcaaggctacttgaggcacaaaaagatgatgtgacttccgtggccagcagctcttttgtcatatgcagtgtccatattattctgtcactcactttgaattccctttgattctccttggggctgatttcttctgtgacccaaggtcaagaagtatagtttaaaaatgtggtagggatgccttggtgccaggtacgtattagagaggggccaacagatgagcgtggagctactccaaagttccctcctgattataaaaaatgtttattggaaaatatttttgaaaatacaaagaagtctatgaatagaaactaaaataccccgaagggtttttttctaattatgaaaggacaatacatggttattattttaaaaaataagaaaatgtgagccaaaaaagggaaaaactgtccatccacagacaaccagttaatatactgtaaaatatcaaaacaaaatcttttgagttctttttttaaatcaggctattttttcccctttatttttaggatctagctttagcttttttccccactttcctatcctgttgcagttatttttcctacttcacatttatattttgttcatctttttctggttgttgctttttgggggtttctgtttttatgcttttgaggaacagatatgaaatttcaatttctgtgtatgtgaaatttctcttaaccttttccttctatggcttctcctatttctgatgtaagatgaggggcagaattataggcctgtgaggttgaattgatattagaaggacactgcacgtaagtgaggtgggtgggagtcatttgattggaattgtttaggcagcctcctgatgttggcaagaccttaagctgaagggagggaatagggtcctaagaaagaagacttggctgagggaagggccttcacggttgctgtggaatagcatttgggcccgggctgggctttgttgaccttgtcctatctcttggtcagtgtgtcctcttggcatggtaggaaacaggtagatagccacctaagaggttatgtgttcagcctgtagagactatccaggagggctatcttgggaaagtttgtgtactgtttgttaggagatgcagtataagcaaatcttggaggccactaggcaggtgaactttacccacctctaacactttttttgttccttctaaacctctctttag

SEQ ID NO: 964 - DNA, 116 bp, Homo sapiens
atgagaaacctggatgagtgtgaggtgtgccgggacggaggggagctgttctgttgcgacacttgttcaagagtcttccatgaggactgtcacatcccgcctgtggaagctgagag

SEQ ID NO: 965 - DNA, 288 bp, Homo sapiens
atgagaaacctggatgagtgtgaggtgtgccgggacggaggggagctgttctgttgcgacacttgttcaagagtcttccatgaggactgtcacatcccgcctgtggaagctgagaggtaagtgacatgcaggcgtctctctttttgtcctttaagggatcttccacctgccatgcgcactctccagcagagtgccggcttgtgtctagatggggaaagagcaggttcatcgggtactgggacccagcagtgtgatccagagagcagtgggagacgctggcagcaggag

SEQ ID NO: 966 - DNA, 703 bp, Homo sapiens
gtaagtgacatgcaggcgtctctctttttgtcctttaagggatcttccacctgccatgcgcactctccagcagagtgccggcttgtgtctagatggggaaagagcaggttcatcgggtactgggacccagcagtgtgatccagagagcagtgggagacgctggcagcaggaggttaatgtcctctgtgctctcagggacacctcctctgatatgctgagggcagtgttggggacctttgcctacataccggcattgtcctttccttgaagttttgcagctgggtgggttggagacaagaaacaccagttgtttatattttgtgcttattcatacaagacaggaagcacgatctcattgggctgttggaggcccgaggtccctggggctgaaaacccagtttctgaaactcaggcctgacagacagggttccctgtgctcccagcagctcagacagagaaaggagagtccacactcacggtgacaccaccttcctcagacttcctgcctgctgctaccactgatgcgagggaaaggccaatggctggagaccccatgtgtgaatcttgcatactttgggaggtgttcccctccctcccatgactgagcccatcagccattcctgaaggaagacagtggtagccacaggaacggtggccatttccaagctccctgccctctgctcacccatgtccaatctctcag

SEQ ID NO: 967 - DNA, 531 bp, Homo sapiens
gttaatgtcctctgtgctctcagggacacctcctctgatatgctgagggcagtgttggggacctttgcctacataccggcattgtcctttccttgaagttttgcagctgggtgggttggagacaagaaacaccagttgtttatattttgtgcttattcatacaagacaggaagcacgatctcattgggctgttggaggcccgaggtccctggggctgaaaacccagtttctgaaactcaggcctgacagacagggttccctgtgctcccagcagctcagacagagaaaggagagtccacactcacggtgacaccaccttcctcagacttcctgcctgctgctaccactgatgcgagggaaaggccaatggctggagaccccatgtgtgaatcttgcatactttgggaggtgttcccctccctcccatgactgagcccatcagccattcctgaaggaagacagtggtagccacaggaacggtggccatttccaagctccctgccctctgctcacccatgtccaatctctcag

SEQ ID NO: 968 - DNA, 76 bp, Homo sapiens
gctctttattgagaaactaccaaaacatcgagattacaaatctgctgtcattcctgaaaagaaagacacagtaaag

SEQ ID NO: 969 - DNA, 224 bp, Homo sapiens
gctctttattgagaaactaccaaaacatcgagattacaaatctgctgtcattcctgaaaagaaagacacagtaaaggtgggtcttcactttcattgttgcccatctaaaagcttcagagcagcacagactgacttcaagataaaagtagtagtctctgcatctgagtaccagatcctgcaataggagataaggccatttcaccacaacagttctgaagtagcag

SEQ ID NO: 970 - DNA, 278 bp, Homo sapiens
gtgggtcttcactttcattgttgcccatctaaaagcttcagagcagcacagactgacttcaagataaaagtagtagtctctgcatctgagtaccagatcctgcaataggagataaggccatttcaccacaacagttctgaagtagcaggtatggtacagtagggggtattttaaatcattttgggaaatgttgcagtcaccaacttgacttaagtcttcttttggattctgtaattttctggcattgttctaattctattttctgttttgtgtctcag

SEQ ID NO: 971 - DNA, 130 bp, Homo sapiens
gtatggtacagtagggggtattttaaatcattttgggaaatgttgcagtcaccaacttgacttaagtcttcttttggattctgtaattttctggcattgttctaattctattttctgttttgtgtctcag

SEQ ID NO: 972 - DNA, 96 bp, Homo sapiens
ggctcggggacctccagccggctggagccgagagaacgcatggagcccacctatcagctgtcccgctggaccccggtcatcaaggatgtaatggag

SEQ ID NO: 973 - DNA, 585 bp, Homo sapiens
ggtgccctcaccccgtccccatctctcccccatccctcatccatctcgctgtgcactgtttctccatatctctctctctcacccttctctctgccttcccctttctctctgttctctgtcttgctcccctcccctctccgtcccccttctgtccccatcttcctctctctgtttcctgcttcatctcttgtctctctctttgccttcatactttgtctcactgcttcttatctctttgcctatctctgcctctgtctttgtctttctctggctcgctctctctccctttggctttctctctccgtctctctctggctcactgtttctctctctcgctttcttgctgtctctcgctctctctcgctctctgttccacttccccatctttgcctgccatcccccaccctaccagccacaccaggcgcagcccctctgtgaccagcctccttcccctcaatccccctgctgccctccctgccctgcctgtagggctcggggacctccagccggctggagccgagagaacgcatggagcccacctatcagctgtcccgctggaccccggtcatcaaggatgtaatggag

SEQ ID NO: 974 - DNA, 942 bp, Homo sapiens
gtacgccaggagcgggcatggggggaccctgggagagggtgcggatcacagccggggctctgcaaggcagagggccattggtgcacaggcacggtgtggttcctggcgtggtgtggttgctgggaggccaaaagcagtgtttcgggtctggtctggggcccagaggacactggggcctctcccagtcccagcttacacaataggcaggggaagtgagacatggtcgctgccaggctggtcctggcagtggtgcagttgggagcgggtggtctgagtgctagaggcagggagtagggtccccagcatgggggctacaccacattgtctatctgggctcccaggggtctctgagggtcccccgcacccatccagcacccacacacagccatgtgtgtgcttgactcttgggtcagcctctcctgtctctctctggccctgtgcgtccccctccagggtgccctcaccccgtccccatctctcccccatccctcatccatctcgctgtgcactgtttctccatatctctctctctcacccttctctctgccttcccctttctctctgttctctgtcttgctcccctcccctctccgtcccccttctgtccccatcttcctctctctgtttcctgcttcatctcttgtctctctctttgccttcatactttgtctcactgcttcttatctctttgcctatctctgcctctgtctttgtctttctctggctcgctctctctccctttggctttctctctccgtctctctctggctcactgtttctctctctcgctttcttgctgtctctcgctctctctcgctctctgttccacttccccatctttgcctgccatcccccaccctaccagccacaccaggcgcagcccctctgtgaccagcctccttcccctcaatccccctgctgccctccctgccctgcctgtag

SEQ ID NO: 975 - DNA, 453 bp, Homo sapiens
gtacgccaggagcgggcatggggggaccctgggagagggtgcggatcacagccggggctctgcaaggcagagggccattggtgcacaggcacggtgtggttcctggcgtggtgtggttgctgggaggccaaaagcagtgtttcgggtctggtctggggcccagaggacactggggcctctcccagtcccagcttacacaataggcaggggaagtgagacatggtcgctgccaggctggtcctggcagtggtgcagttgggagcgggtggtctgagtgctagaggcagggagtagggtccccagcatgggggctacaccacattgtctatctgggctcccaggggtctctgagggtcccccgcacccatccagcacccacacacagccatgtgtgtgcttgactcttgggtcagcctctcctgtctctctctggccctgtgcgtccccctccag

SEQ ID NO: 976 - DNA, 229 bp, Homo sapiens
agtacaaggccagctatgtccgcagtcgctccatccgctcagtggccatcgaggtggacggcagggtgtaccacgtaggcctgggtgatgccgcccagccccgaaacctcaccaagcggcactggccaggggcccctgaggaccaagatgacaaggatggtggggacttcagtggcactggaggccttcccgactactcagccgccaaccccattaaagtgacacatcg

SEQ ID NO: 977 - DNA, 401 bp, Homo sapiens
agtacaaggccagctatgtccgcagtcgctccatccgctcagtggccatcgaggtggacggcagggtgtaccacgtaggcctgggtgatgccgcccagccccgaaacctcaccaagcggcactggccaggggcccctgaggaccaagatgacaaggatggtggggacttcagtggcactggaggccttcccgactactcagccgccaaccccattaaagtgacacatcggtgagtgtccaggtggaagtcgagggtgaaggggacaggacagacctcggcaaagggcttcccacacctcttgggcccctgaggaccaagatgacaaggatggtggggacttcagtggcactggaggccttcccgactattcagccgccaaccccattaaagtgacacatcg

SEQ ID NO: 978 - DNA, 306 bp, Homo sapiens
gtgagtgtccaggtggaagtcgagggtgaaggggacaggacagacctcggcaaagggcttcccacacctcttgggcccctgaggaccaagatgacaaggatggtggggacttcagtggcactggaggccttcccgactattcagccgccaaccccattaaagtgacacatcggtgagtgtccaggtggaagtcgagggtgaaggggacaggacagacctcggcaagggcttcccacacctcttgggcacctgggctgctccccctccaccacctccgagccacacgtgatcccttctctcaagcag

SEQ ID NO: 979 - DNA, 134 bp, Homo sapiens
gtgagtgtccaggtggaagtcgagggtgaaggggacaggacagacctcggcaagggcttcccacacctcttgggcacctgggctgctccccctccaccacctccgagccacacgtgatcccttctctcaagcag

SEQ ID NO: 980 - DNA, 237 bp, Homo sapiens; identical to SEQ ID NO: 168

SEQ ID NO: 981 - DNA, 1809 bp, Homo sapiens; identical to SEQ ID NO: 166

SEQ ID NO: 982 - DNA, 413 bp, Homo sapiens; identical to SEQ ID NO: 169

SEQ ID NO: 983 - DNA, 1633 bp, Homo sapiens; identical to SEQ ID NO: 167

SEQ ID NO: 984 - DNA, 173 bp, Homo sapiens
aagctgctctgggcttcttgccacgcgggcgacacgcctatgatcaattttgacttccatcagtttgccaaaggtgggaagctagagaaattggagaccctcttgaggccacagttaaagctgcactgggaagacttcgatgtgttcacaaagggggagaacgtcagtccacg

SEQ ID NO: 985 - DNA, 230 bp, Homo sapiens
aagctgctctgggcttcttgccacgcgggcgacacgcctatgatcaattttgacttccatcagtttgccaaaggtgggaagctagagaaattggagaccctcttgaggccacagttaaagctgcactgggaagacttcgatgtgttcacaaagggggagaacgtcagtccacggtgaggctcgctgcgcactgtgccgcgtcttctgctggggggaagcgtcagtccacg

SEQ ID NO: 986 - DNA, 1626 bp, Homo sapiens
gtgaggctcgctgcgcactgtgccgcgtcttctgctggggggaagcgtcagtccacggtgaggctcgctgcgtgctgtgccttctgctgggtgaggcggcagaggggccgtgcagtctaggacatgtgccctatgaggggcagcttccttccctccccactcagttacccttgtggtttcctgggtcataagcttggcgacgccgggaatcttgggttccagcttctcatctcccttcccacagtaggagacaggcttttgaatttctcaaggagatgttgagtcatggttttctggcaaaagaaatgaactaataaaggggactgcattaaaacatggagctccacgctgtgacgcaggcctgtgagagtgagggccacagtcgcggtgggatggctggcatagacttagattgctagaggagaccagggtatggacttccctgttcagagcagaggagaaaaacgaagtccagttccctcaggtcacatgcagggggtcctcattatttgcagattccatattggcttatttacctattccttaaaactgatttgtaaccccaaaatcagtatgcaaagcatttttgctggacagagtatttaaatactctggcctcgtatttaaacaagtttcctttttaagatttagtaccatgtttttcacatttgtggggtctttgttaggggcccccctttgttcggggatctcatggtttagaatggccccaagcagtgtgccgaagagctgtctagtacttctgagcacaagaaggtggtgatgtgctttatggagaaaatgcacgttaagataagctttgtccctatatgagctacagtgctgtcggccatggttcagtgttaattaagcaaatatatatattcaataaggtgtctttatatggaaacatacataaaacaaggttgtatattgatcagttgataaaaatgtgaccagaggtttgcaggaacctaaccctatatttcccctaggagcgatggttctgtgttcatgtccaattcagtgttcctacaactttatagaacataattgctataaataacaaggaccagctaaacgtaaaacgacccagctgtgcaggctactgagtgtgtgtcctggggtctgcctgcctttccagaagtgctggggatccactgggatggacactggggtttctggggggctattgatgaggaggtgaggggttccctcttagaacatgtttcctcacacctgtaatcccagcactttggaaggctgaggtgggcggatcacaaggtcaggagttcgagactagcctggccaatgtggtgaaacaccgtctgtactaaaaatacaaaaattagccgggtgtgatggcacgcacctgtagtcccagctacttggaaggctgagacaggagaatcgcttgaacctgggaggcggaggttgcagtgagccgagatcatgccattgcactccagcttgggtgacagaggtgagactctgtctcaaaaaaaaaaaaaaaaaaaaaaaaaaaaccatgtttccttgggagtcaaaagtcagacatgggcctctgtgctatggccactgcttctttgaaaacaacatataaccgtttacatttcttcttgtcctaag

SEQ ID NO: 987 - DNA, 1569 bp, Homo sapiens
gtgaggctcgctgcgtgctgtgccttctgctgggtgaggcggcagaggggccgtgcagtctaggacatgtgccctatgaggggcagcttccttccctccccactcagttacccttgtggtttcctgggtcataagcttggcgacgccgggaatcttgggttccagcttctcatctcccttcccacagtaggagacaggcttttgaatttctcaaggagatgttgagtcatggttttctggcaaaagaaatgaactaataaaggggactgcattaaaacatggagctccacgctgtgacgcaggcctgtgagagtgagggccacagtcgcggtgggatggctggcatagacttagattgctagaggagaccagggtatggacttccctgttcagagcagaggagaaaaacgaagtccagttccctcaggtcacatgcagggggtcctcattatttgcagattccatattggcttatttacctattccttaaaactgatttgtaaccccaaaatcagtatgcaaagcatttttgctggacagagtatttaaatactctggcctcgtatttaaacaagtttcctttttaagatttagtaccatgtttttcacatttgtggggtctttgttaggggcccccctttgttcggggatctcatggtttagaatggccccaagcagtgtgccgaagagctgtctagtacttctgagcacaagaaggtggtgatgtgctttatggagaaaatgcacgttaagataagctttgtccctatatgagctacagtgctgtcggccatggttcagtgttaattaagcaaatatatatattcaataaggtgtctttatatggaaacatacataaaacaaggttgtatattgatcagttgataaaaatgtgaccagaggtttgcaggaacctaaccctatatttcccctaggagcgatggttctgtgttcatgtccaattcagtgttcctacaactttatagaacataattgctataaataacaaggaccagctaaacgtaaaacgacccagctgtgcaggctactgagtgtgtgtcctggggtctgcctgcctttccagaagtgctggggatccactgggatggacactggggtttctggggggctattgatgaggaggtgaggggttccctcttagaacatgtttcctcacacctgtaatcccagcactttggaaggctgaggtgggcggatcacaaggtcaggagttcgagactagcctggccaatgtggtgaaacaccgtctgtactaaaaatacaaaaattagccgggtgtgatggcacgcacctgtagtcccagctacttggaaggctgagacaggagaatcgcttgaacctgggaggcggaggttgcagtgagccgagatcatgccattgcactccagcttgggtgacagaggtgagactctgtctcaaaaaaaaaaaaaaaaaaaaaaaaaaaaccatgtttccttgggagtcaaaagtcagacatgggcctctgtgctatggccactgcttctttgaaaacaacatataaccgtttacatttcttcttgtcctaag

SEQ ID NO: 988 - DNA, 46 bp, Homo sapiens
ggatcctgaaactccgccacatctggaacctgaagttgatgcgttg

SEQ ID NO: 989 - DNA, 229 bp, Homo sapiens
gtgaggaggaatgggcccctcgaagtgggccgggccggccccacctgcctctgcccagatttgccctcctcctgctctgcccaggaggtggcgtccagcagtccaggcagggcatggggtggggccccgcaggccctcccctgtgcctcccttctgcatgctgatgctgggggcagggtggtggagcggggtgcagggggcaggactaattgcatctgtccctgcttag

SEQ ID NO: 990 - DNA, 152 bp, Homo sapiens
ggatcctgaaactccgccacatctggaacctgaagttgatgcgttggtgaggaggaatgggcccctcgaagtgggccgggccggccccacctgcctctgcccagatttgccctcctcctgctctgcccaggaggtggcgtccagcagtccag

SEQ ID NO: 991 - DNA, 123 bp, Homo sapiens
gcagggcatggggtggggccccgcaggccctcccctgtgcctcccttctgcatgctgatgctgggggcagggtggtggagcggggtgcagggggcaggactaattgcatctgtccctgcttag

SEQ ID NO: 992 - DNA, 131 bp, Homo sapiens
gccaaaaagcaaatggatttccacctgacaaatcttcgggatccaagaagcagaaacaatatcagcggattcggaaggagaagcctcaacaacacaacttcacccaccgcctcctggctgcagctctgaag

SEQ ID NO: 993 - DNA, 422 bp, Homo sapiens
ggtcttgctctgtcactcaggatggaatgcagtagtgttgtgatcatagcttactgcagcctcgaactcctgggctcaaatgatccaaagcattgggattacaggcatgagccaccatacccagccagccaaagcctctgtttttgcccatatcacactcattctcctccagaagacaagggccatatctggttaatctcctgctgttccactcaatgcctggctcatcataggtgggcagtaaatgcttatcagtgagtaactggagaacaacatggcccttccttataggccaaaaagcaaatggatttccacctgacaaatcttcgggatccaagaagcagaaacaatatcagcggattcggaaggagaagcctcaacaacacaacttcacccaccgcctcctggctgcagctctgaag

SEQ ID NO: 994 - DNA, 3906 bp, Homo sapiens
gtaagtggggccgggtcgggtgggggcggcccgcggtgtcccggctcccggcctcctcgtggtccgacctgcggtttgggcccgcggctggtggggcccggcgactccatgggcctcagtttctcctctggtaacgtgagcttcgcttccagagacggggacccgccttgccgggttaggcgcacctcctggggcgggactggctccaacctgggccccttactgcggctttctctgtggccgaggccaggccgtccccggggtggccaggagagcaccgtaaactcttcagcctgctccgtggccgcgatctcggaaaaagcaccaattctgtgatgtgcagcagcatttactgggcatctatgaccctgtgataggctttggggtctttttctgtaaggagtccagtaaaggagaagtacatctgtattatgaacacctaaatatgtaagtgaaaaacacggtgaaataagtttcactgaggccaggcgaagtggctcacgcctgtattcccagcactttgggaggccgaggcagggagatcgcttgagcccaggagtttgggaccagcctgagcaacatagcaagaccccatctctacgcaaaattagctgggtgtggttgtgcacgcccctgtagtcccagctccatgggaggccgaggcaggagggtgtcgtgagtccaggaattcaaggctgcagtgagttgtgatagatcgcgccactgtacttcagcctgggtgacggcaagagcctgtctctgaaaagtttcatagaagaggttagtactagaaatgggaaacaccagagagtcagtgggcagccctgctctttttatttatttttcagacagagtttcgctcttcttgcccaggctggagtgcagtggcacaatcttggctcgttgcaacttccgcctgccaggttcaagcgattcttctgcctctgcctcccgagtagctgggactacaggcacacaccaccacgcctggctaatttttgtatatttagtagacggggtttcgccacgttggtcaggctggtctcgaacgcctgatctcaggtgatccactcgtcctggcctccaaaagtgctgagattacaggcgtgaaccactgtgcccggccagccctgcattttttttttttttttttttgcagggggacggagttttgctctgtcgcccaatctggagtctagtggcgggatctcggctcactgcaagctccgcctctgggttcacgccattctcctgcctcagcctcctgagtagctgggactacaggcgtccgacaccacacccggctaattttttgtattttttgagtagagacggggtttcactgtgttagccaggatggtctcaatctcctaacctcttgtgatccacctgcctcggcctcccaaagtgctgggattacaggcgtgagccaccctgcctggccgagtcctgttcttttatgggggaggtggttgttagggaaatcattactgagaatagggggcacatgaggtagtgtggggtctcaaaggatggttctagaagaagagtttgccagaaggccaaggaaaaaagacattcctgccaatggcaatacccgagaaggcaaggagtccccaaacagcatttggtatgacttaagtgtgaggaggggggcttgttagacatgcctggagagaaggaagcagaggacagattgtggctgtgtttgtttgcagggcccaggagcttttttcctgttggaattggggagcatctgcagtcatttaccacatgccagctttgtgactcaattaagtatcttttacaaaagtgactggctccactcccccgcacaggactcaacagatgttgacttctcatccccgagttctttcaggtactggagtgcagtggtgcgatcttggcttactgcaacctctacctcctgggttcaagtgattctcctgcctcagcctcctgagtagctgggattacaggcgcctgccaccacgcccggctaatttttgtatttttagtagagacggggtttcaccatgttggccagactggtggaactcctgggcatcaagatgatccagctgccgggccgggcatggtgactcacgcctgtaatcccagcactttgggaggccgaagcgggcaggtcacaaggtcaggagatcgagactgaggcaacagagcgagactctgtatcaaacaaaaaaaaaaaatgatccagcagctgcctcagcctcccaaagcgctgggattacaggcatgagccaccgcacccggcctccatagagcctttaatgcttgtgttcggtacttttgcttgtcactttgtagatatctcatccaattcaatctcccttatttttatttatttatttatttatttattttgagacagaatctcactctgtcgcctaggctggaatacagtggcacgatcactgcatttgaactcctgggctcaagcaattttccctcctcagcctccgaatagctgggaccacaggcgcacaccaccatgcccagctaattaaagttttctgtagagatggggtgtcactatgttacccaggctggtctcgaactcctgagctcaagcaatcctcccatctcagcctaccaaaatgctgggatcacaggcatgagccaccgcccccagttctcaacctctctttaagaaaaccaaggctgggccggacacagtggctcacgcctataatcccagcactttgggaggccaaggcaggcagatcacttgaggtgaggagttggagacaagcctggcccacatggtgaaaccccatctctactaaaaaaacaaaaaaattggggccaggtgccatggctcacgcctgtaatcctagcactttgggaggccgaggcgggtggatcacaaggtcaggagattgagaccattctggctaatgtggtgaaaccccacatctactaaaaatacaaaaaaaaattagccgggcatggtggcgggcgcctgtagtcccagctacttgggaggctgaggcaggagaatggcgtgaacccgggaggcagagcttgcagtgagctgagatcacgccactgcactccagcctgggtgacagagcgagactccatctgaaaaaaaaaaaaaaaattagctggatatggtggtgcacgcccatgatcccagctacttggaaggctgaggcacaagaattgcttgaacctgggaggcagaggctacagtgagcggagatcacgccactgcactccagcctgggcgacagagcaagactctgtctccaaaaaaaagaaagaaagaaaagaaaaaaaaaaccaaggtccagagcaattcactaacttacccaaagcagggccgctagagatggttgtgcacattactccctacatagggatgtctggccaaggatccacactccactggccgtgctgtgtacccgcccagcagcatcacccaacccagagagtgcgccttttccactctacatgaaggtgctctgtggacttactgtaaacagcctcctcagtagtcagtcagtagtagagacagaatccaaacccaggtctgattccaaagcctctgttttgtttctgttttctgtttgtttttttttgagacagggtcttgctctgtcactcaggatggaatgcagtagtgttgtgatcatagcttactgcagcctcgaactcctgggctcaaatgatccaaagcattgggattacaggcatgagccaccatacccagccagccaaagcctctgtttttgcccatatcacactcattctcctccagaagacaagggccatatctggttaatctcctgctgttccactcaatgcctggctcatcataggtgggcagtaaatgcttatcagtgagtaactggagaacaacatggcccttccttatag

SEQ ID NO: 995 - DNA, 3615 bp, Homo sapiens
gtaagtggggccgggtcgggtgggggcggcccgcggtgtcccggctcccggcctcctcgtggtccgacctgcggtttgggcccgcggctggtggggcccggcgactccatgggcctcagtttctcctctggtaacgtgagcttcgcttccagagacggggacccgccttgccgggttaggcgcacctcctggggcgggactggctccaacctgggccccttactgcggctttctctgtggccgaggccaggccgtccccggggtggccaggagagcaccgtaaactcttcagcctgctccgtggccgcgatctcggaaaaagcaccaattctgtgatgtgcagcagcatttactgggcatctatgaccctgtgataggctttggggtctttttctgtaaggagtccagtaaaggagaagtacatctgtattatgaacacctaaatatgtaagtgaaaaacacggtgaaataagtttcactgaggccaggcgaagtggctcacgcctgtattcccagcactttgggaggccgaggcagggagatcgcttgagcccaggagtttgggaccagcctgagcaacatagcaagaccccatctctacgcaaaattagctgggtgtggttgtgcacgcccctgtagtcccagctccatgggaggccgaggcaggagggtgtcgtgagtccaggaattcaaggctgcagtgagttgtgatagatcgcgccactgtacttcagcctgggtgacggcaagagcctgtctctgaaaagtttcatagaagaggttagtactagaaatgggaaacaccagagagtcagtgggcagccctgctctttttatttatttttcagacagagtttcgctcttcttgcccaggctggagtgcagtggcacaatcttggctcgttgcaacttccgcctgccaggttcaagcgattcttctgcctctgcctcccgagtagctgggactacaggcacacaccaccacgcctggctaatttttgtatatttagtagacggggtttcgccacgttggtcaggctggtctcgaacgcctgatctcaggtgatccactcgtcctggcctccaaaagtgctgagattacaggcgtgaaccactgtgcccggccagccctgcattttttttttttttttttttgcagggggacggagttttgctctgtcgcccaatctggagtctagtggcgggatctcggctcactgcaagctccgcctctgggttcacgccattctcctgcctcagcctcctgagtagctgggactacaggcgtccgacaccacacccggctaattttttgtattttttgagtagagacggggtttcactgtgttagccaggatggtctcaatctcctaacctcttgtgatccacctgcctcggcctcccaaagtgctgggattacaggcgtgagccaccctgcctggccgagtcctgttcttttatgggggaggtggttgttagggaaatcattactgagaatagggggcacatgaggtagtgtggggtctcaaaggatggttctagaagaagagtttgccagaaggccaaggaaaaaagacattcctgccaatggcaatacccgagaaggcaaggagtccccaaacagcatttggtatgacttaagtgtgaggaggggggcttgttagacatgcctggagagaaggaagcagaggacagattgtggctgtgtttgtttgcagggcccaggagcttttttcctgttggaattggggagcatctgcagtcatttaccacatgccagctttgtgactcaattaagtatcttttacaaaagtgactggctccactcccccgcacaggactcaacagatgttgacttctcatccccgagttctttcaggtactggagtgcagtggtgcgatcttggcttactgcaacctctacctcctgggttcaagtgattctcctgcctcagcctcctgagtagctgggattacaggcgcctgccaccacgcccggctaatttttgtatttttagtagagacggggtttcaccatgttggccagactggtggaactcctgggcatcaagatgatccagctgccgggccgggcatggtgactcacgcctgtaatcccagcactttgggaggccgaagcgggcaggtcacaaggtcaggagatcgagactgaggcaacagagcgagactctgtatcaaacaaaaaaaaaaaatgatccagcagctgcctcagcctcccaaagcgctgggattacaggcatgagccaccgcacccggcctccatagagcctttaatgcttgtgttcggtacttttgcttgtcactttgtagatatctcatccaattcaatctcccttatttttatttatttatttatttatttattttgagacagaatctcactctgtcgcctaggctggaatacagtggcacgatcactgcatttgaactcctgggctcaagcaattttccctcctcagcctccgaatagctgggaccacaggcgcacaccaccatgcccagctaattaaagttttctgtagagatggggtgtcactatgttacccaggctggtctcgaactcctgagctcaagcaatcctcccatctcagcctaccaaaatgctgggatcacaggcatgagccaccgcccccagttctcaacctctctttaagaaaaccaaggctgggccggacacagtggctcacgcctataatcccagcactttgggaggccaaggcaggcagatcacttgaggtgaggagttggagacaagcctggcccacatggtgaaaccccatctctactaaaaaaacaaaaaaattggggccaggtgccatggctcacgcctgtaatcctagcactttgggaggccgaggcgggtggatcacaaggtcaggagattgagaccattctggctaatgtggtgaaaccccacatctactaaaaatacaaaaaaaaattagccgggcatggtggcgggcgcctgtagtcccagctacttgggaggctgaggcaggagaatggcgtgaacccgggaggcagagcttgcagtgagctgagatcacgccactgcactccagcctgggtgacagagcgagactccatctgaaaaaaaaaaaaaaaattagctggatatggtggtgcacgcccatgatcccagctacttggaaggctgaggcacaagaattgcttgaacctgggaggcagaggctacagtgagcggagatcacgccactgcactccagcctgggcgacagagcaagactctgtctccaaaaaaaagaaagaaagaaaagaaaaaaaaaaccaaggtccagagcaattcactaacttacccaaagcagggccgctagagatggttgtgcacattactccctacatagggatgtctggccaaggatccacactccactggccgtgctgtgtacccgcccagcagcatcacccaacccagagagtgcgccttttccactctacatgaaggtgctctgtggacttactgtaaacagcctcctcagtagtcagtcagtagtagagacagaatccaaacccaggtctgattccaaagcctctgttttgtttctgttttctgtttgtttttttttgagacag

SEQ ID NO: 996 - DNA, 135 bp, Homo sapiens
atcacaaatgttcacagcagccgggctcttgatgttcagttcctggactctggcactgtgacatctgtaaaagtgtcagagctcagggaaattccacctcggtttctacaagaaatgattgcaataccacctcag

SEQ ID NO: 997 - DNA, 197 bp, Homo sapiens
atcacaaatgttcacagcagccgggctcttgatgttcagttcctggactctggcactgtgacatctgtaaaagtgtcagagctcagggaaattccacctcggtttctacaagaaatgattgcaataccacctcaggtactatgttaccagcctgggagatttgctggaacagatttggatgtgttcataatcttatt

SEQ ID NO: 998 - DNA, 2254 bp, Homo sapiens
gtactatgttaccagcctgggagatttgctggaacagatttggatgtgttcataatcttattgtaagatgccttctcagttttgatctcattaatttttaagaaaattggaaattgtccaaatgtggttgtctgctggttttcagaagtaaaacattgctgacttagacaagaagaccagtcatatttacatactgttgtttgagaaatgtttgttttcaagagcatccagtcattaagctgtgttgtccagttacaggttccattttgataattagatgccagtactgacttatgtacagttccagaatattgtgtataaatgtttatttttagagtttttagtttatttaggtaaccattttctttggaaatctgtttagacataatcattttctcggtgacttccccaccatacattttaattaaaagatgaacttcggctgatcctttctttattcatgaatgttcagatgataaggattttgaatattttgaattgtttagaactactcactacctttaggagaaatagaggattttgtgcagaaattaatatcttttaaaaaataaaacaatgcggtattctacaacttcaagatgcccagttactaatattttcaagaagacatcttctgccatcaaactcagtaaataaaacattgtccataattagcatggcttttgacatgtctctccctcccatcaccattgctttttctagccgtgactattacagagaagcttttttcaaaatcatttttactgtccattgttcagccataattctggaaattgatgggcctttaagtgctactctgacttaataatacctcttgttggaacagccatgcagggccaggcttacctagaaaagatcccctgggctggagggcagttgggaatctgtcccaccgctgtgattgtctgaaagtccacaacagtaccacctgtatgctacggcattaacaatcactaaacttttttttttcataatcttgtgtaggtttattatttgacaaatgggaagactgttggttgggagtactttaaaagccagccagcccaagcctctggctcacaacatctctccaagagtctaaatcagagtaccaaactgatggactgtaagccaaagccaacccttaaatactgagttttggctcttggctcttacagtattttaaaaatgtgaactggttgccaggattttaaaattaggaaatttcacacaaaaattcctacttctagcttctctcttgacaaattggaaaatctgactgctgagcactcttcttgtggggaagtgctccttaggagtttggggccttctcctctgctggccccatcgggtctgccccactccctcgttgcctgcccagcccctgcagatattcaagtgtgctgcctgctctaaagtgacctcctctccaacaagaaaggtaccacatccagccagcagagcaaggaaaggcttagagctcctgagggaggaaggcaggaagacaggaaggggctcagagaggaaaaggaatcctggaactgggtttcatccccttcacaaaattgtttccgttgattcgagggtttgcttgaagctgaaggaaatccctgagttcactttttagcctctgttgtagccattctacagatgcttgtatagtggtggtaggagctaaaaagcactggggaaaatgaagcttttagggacctgtggatttcagtttttctcaccctccttagttctcattacagccttgttcaaaaggcaaacaaatgtgcctggtacccacgaggtactcaggaaatgctgaatgaagcaacaggagtcagatttcctccaaatgacaattgatttttttttttttttaagttgagctagagggtagaccttgataaaagtcccaaccctgtctttgcaactttggtatcttatacagtctttctgagtccatttccccatctgtgaaatggggctgcaacacctgtcatgcagaagtattgtacggtgggaagtatatggagtgctgggggtaagccctggctcataaaggagtaaagacaatagtagttatataaatagagttaggaacatagcagatgctcaaaccaggaactgtgattgtcgttattagctgttgttgcttgctgtctatcttggtaccatttgatttgtaggaaaataatattaacattactcataactaggtattttaacatggtgtgttcacttttccatcatattttcttttcag

SEQ ID NO: 999 - DNA, 2192 bp, Homo sapiens
gtaagatgccttctcagttttgatctcattaatttttaagaaaattggaaattgtccaaatgtggttgtctgctggttttcagaagtaaaacattgctgacttagacaagaagaccagtcatatttacatactgttgtttgagaaatgtttgttttcaagagcatccagtcattaagctgtgttgtccagttacaggttccattttgataattagatgccagtactgacttatgtacagttccagaatattgtgtataaatgtttatttttagagtttttagtttatttaggtaaccattttctttggaaatctgtttagacataatcattttctcggtgacttccccaccatacattttaattaaaagatgaacttcggctgatcctttctttattcatgaatgttcagatgataaggattttgaatattttgaattgtttagaactactcactacctttaggagaaatagaggattttgtgcagaaattaatatcttttaaaaaataaaacaatgcggtattctacaacttcaagatgcccagttactaatattttcaagaagacatcttctgccatcaaactcagtaaataaaacattgtccataattagcatggcttttgacatgtctctccctcccatcaccattgctttttctagccgtgactattacagagaagcttttttcaaaatcatttttactgtccattgttcagccataattctggaaattgatgggcctttaagtgctactctgacttaataatacctcttgttggaacagccatgcagggccaggcttacctagaaaagatcccctgggctggagggcagttgggaatctgtcccaccgctgtgattgtctgaaagtccacaacagtaccacctgtatgctacggcattaacaatcactaaacttttttttttcataatcttgtgtaggtttattatttgacaaatgggaagactgttggttgggagtactttaaaagccagccagcccaagcctctggctcacaacatctctccaagagtctaaatcagagtaccaaactgatggactgtaagccaaagccaacccttaaatactgagttttggctcttggctcttacagtattttaaaaatgtgaactggttgccaggattttaaaattaggaaatttcacacaaaaattcctacttctagcttctctcttgacaaattggaaaatctgactgctgagcactcttcttgtggggaagtgctccttaggagtttggggccttctcctctgctggccccatcgggtctgccccactccctcgttgcctgcccagcccctgcagatattcaagtgtgctgcctgctctaaagtgacctcctctccaacaagaaaggtaccacatccagccagcagagcaaggaaaggcttagagctcctgagggaggaaggcaggaagacaggaaggggctcagagaggaaaaggaatcctggaactgggtttcatccccttcacaaaattgtttccgttgattcgagggtttgcttgaagctgaaggaaatccctgagttcactttttagcctctgttgtagccattctacagatgcttgtatagtggtggtaggagctaaaaagcactggggaaaatgaagcttttagggacctgtggatttcagtttttctcaccctccttagttctcattacagccttgttcaaaaggcaaacaaatgtgcctggtacccacgaggtactcaggaaatgctgaatgaagcaacaggagtcagatttcctccaaatgacaattgatttttttttttttttaagttgagctagagggtagaccttgataaaagtcccaaccctgtctttgcaactttggtatcttatacagtctttctgagtccatttccccatctgtgaaatggggctgcaacacctgtcatgcagaagtattgtacggtgggaagtatatggagtgctgggggtaagccctggctcataaaggagtaaagacaatagtagttatataaatagagttaggaacatagcagatgctcaaaccaggaactgtgattgtcgttattagctgttgttgcttgctgtctatcttggtaccatttgatttgtaggaaaataatattaacattactcataactaggtattttaacatggtgtgttcacttttccatcatattttcttttcag

SEQ ID NO: 1000 - DNA, 150 bp, Homo sapiens
ggttgcaggcctgccagctggcgctgagcaccaggaccgtgtgggcccgctgtccaaacggagacctcgcccggcggtacggcgtcacagacaagaaccccgccggggactactggaagaaaattcccggcagcgtgtcgtgtttcacag

SEQ ID NO: 1001 - DNA, 251 bp, Homo sapiens
ggaccctggtggaggtgtgcagcgtcacaagagtcggcttgggaagcagcggcccatcccgtccatggcaggggctcaggagggaccctgtctgcccacagggttgcaggcctgccagctggcgctgagcaccaggaccgtgtgggcccgctgtccaaacggagacctcgcccggcggtacggcgtcacagacaagaaccccgccggggactactggaagaaaattcccggcagcgtgtcgtgtttcacag

SEQ ID NO: 1002 - DNA, 449 bp, Homo sapiens
gtaggagcctgcagacagggcctgtggtgccggccagccggggctaccatcactgggggctgctgggcgctccctccaggccgctgtctgtgaggcagcctttgtgctggggctgtgctgtcgccgctgcttcctgggccaggggacaagcctcccatcatgttccttatcaggggaacccaggccgtcctgctggtgcttttgtgggagggcagtttgcacactgcccaggcccttctgtcctttgacttctggctttcggtggctttgctggccctgccaactggtcgtcctttccctcggctcctgccccaagcccagcccatcatgggcactccgtccccgcagggaccctggtggaggtgtgcagcgtcacaagagtcggcttgggaagcagcggcccatcccgtccatggcaggggctcaggagggaccctgtctgcccacag

SEQ ID NO: 1003 - DNA, 348 bp, Homo sapiens
gtaggagcctgcagacagggcctgtggtgccggccagccggggctaccatcactgggggctgctgggcgctccctccaggccgctgtctgtgaggcagcctttgtgctggggctgtgctgtcgccgctgcttcctgggccaggggacaagcctcccatcatgttccttatcaggggaacccaggccgtcctgctggtgcttttgtgggagggcagtttgcacactgcccaggcccttctgtcctttgacttctggctttcggtggctttgctggccctgccaactggtcgtcctttccctcggctcctgccccaagcccagcccatcatgggcactccgtccccgcag

SEQ ID NO: 1004 - DNA, 189 bp, Homo sapiens
ggagcggcggtgaaggtcctgggtgaggtagggttggatggtgcttgccgcgtatcatggctgcctccggaaaactcagcacttgccgtctccctccgttgcccacgattcgagaaatcattaagttgttaagactgcaagcagcgaagcagctatcacagaatttcctcctggacttgaggctgacag

SEQ ID NO: 1005 - DNA, 368 bp, Homo sapiens
ggagcggcggtgaaggtcctgggtgaggtagggttggatggtgcttgccgcgtatcatggctgcctccggaaaactcagcacttgccgtctccctccgttgcccacgattcgagaaatcattaagttgttaagactgcaagcagcgaagcagctatcacagaatttcctcctggacttgaggctgacaggtggatggcttagcagtgctccccggatgtctccccagtgtccgtgggggcgtgggccggggggtcttgcacgtccccgcgggcgggtgtccaggcactggcgtgcgacgggcttttggtcaggtccttcgacctctttgtatcagaactccggtcccaccgcccaggagacacgtgaa

SEQ ID NO: 1006 - DNA, 2956 bp, Homo sapiens
gtggatggcttagcagtgctccccggatgtctccccagtgtccgtgggggcgtgggccggggggtcttgcacgtccccgcgggcgggtgtccaggcactggcgtgcgacgggcttttggtcaggtccttcgacctctttgtatcagaactccggtcccaccgcccaggagacacgtgaagtgcgttgattgctcacaaaactccgcgttcgggggggtgtagcctgccggcaggctgcataaatgccaagctccctaggggaggaagggttcatgggtcgtgaaaggcgctagtgaatattggaatctgggtcactgtgaaatcaatcattctgaaatagtacagcacatgctgactgcagttgctttacatgcagtttaaagttaccagaatttaaattgatgcgaggattttatcaataacttggtgaaaagagtatccctcgtatgattcgttttttaaacgtttacctgttcagtctaagcctcgggggcgctaatattcattcataagtacatattacacaagcaacattgtgctagtgccgggggtaggatatgggcgtgaacaaggcggtgtttcctcgaggagcttacttttagcaagtttacattcccacacctaattgtttaaagttactttttatgagatataatttatgtgcaataaaattaataagtttgaagtgctcaatttgatgagttttgacgaatgtatttatatattggtttaaccaccatcaccattgcttagtgatgttctatgagatgaggttgcaaaaatatattacaaatacgtctactaagtcacggctggagtacttaggttttgagattttcatatttcattctatttagtcccacttcagaagttgaaaagagcagtaaatcacacccaaaaagttcattttcacttaaatgaagcacactccagaaaacataaaatgttttatttcttggacatgtagtctttattctgcctgtaccaatatgactttggataaaataatttaactcaagttttctcttttttttttttttctttttttaagatggagtttcactcttgttgcccaagctggagtgcaatggcatgatctcagctcactgcaacctccgcctccccggttcaagtgattctcgtgcctcagcctcccaggtagctaggattacaggcgtgagccaccgtgcctagctaattttgtgtttttagtaaagacagggtttcactatgttgctcaggctggtctcaaactcctgatctcaagtgatccactcgcctcggccttccaaagtgttgggattacaggtgtgagccaccatgtccagtagtttcctcatcttttaattggaagaagggcctactactttaaaagattgcccactctaaaattctttggttctagtaatagctagtaccagccttttctgcttgttattagccacattctaaatataaatcaccattctcagggcagaagttataggtctgtgtattttttaaaatccttcaaatacattttctcatgagcctttatcttcaggagtaagtttcaaattctagatattatccactctttctatgggaaccagagttaacggagatgagggtacttagctgaggttagaagctcaggcagaagagagcaagattgaaatccaagctcattgatttgatagcgcttctttaatattcatttgtatttcaatgtgcctgaaaagtttgagagcagagacctgcctactgttgtagctctccattttaaagaaggagagtattaaatttattccataatgtatcattcctgttccctctgagaggcattggctttaggatttatacctatgttgaagtccatgaccttgtacaaataaaacaatagacaaggaaactgaaaagttaagagaaatgaaattgggataggagtccttggttaacatgtaaggattaggtgagaatgtgtgtaaatccatcataatagataagatggtcagtggatgctaattccctccctgttaaaagactaaaccatttttggatggctgagaaactagtttccgcattttagctgacaaagttatgttgttgaaaacaagcaaaaataggactgtgaacacctacaagaagtgctggtatgtttttagtgactaaatttccactatcctaggaagaccagttccttggatttccatatctcagaatcactaagaccagcccattgcatgtttttccagatgtgatgactggttgcacagagtcagtactctacctttttatgatgtcttaagggctgctaacttgaatttgattaattaaaaaattaatttttctgtattaacatgcatgtgtgcaaagctttaaaaaccctcaactgctcaatttaactttttcctgaaaatgactaagaattcaaatttctgaaaatcttacgatctaagaacttattgccattgccatagtgaccaccaccaagatgtctctagataaaaataagacttcagcactttttgcttttggatttcactagcaatactgaagattctgaatgtgaaactagtattgcttattcagatattcaatgttcaataactatagaaaagtgctgcattcttatccagtctgttcttaggagtcggttggtttcaaatcagtttgaaaggaatttgcatgggacagatggaaactacaatattagctaaatttaagctaagaaactttgtcatgataatcctgtgtgtgttaagggactggtacagttcaatggtgatgtggtagcatattcgattgccacttcatgttaatttaggtagagagttaaatagtcaaataaatattatacataaaggatcaattgattgggtaatggctgaatttttatagaagatttttctctctaaatttcatacgttgaaatttgccaagttaattgagataactaaaactctttttcctctag

SEQ ID NO: 1007 - DNA, 2777 bp, Homo sapiens
gtgcgttgattgctcacaaaactccgcgttcgggggggtgtagcctgccggcaggctgcataaatgccaagctccctaggggaggaagggttcatgggtcgtgaaaggcgctagtgaatattggaatctgggtcactgtgaaatcaatcattctgaaatagtacagcacatgctgactgcagttgctttacatgcagtttaaagttaccagaatttaaattgatgcgaggattttatcaataacttggtgaaaagagtatccctcgtatgattcgttttttaaacgtttacctgttcagtctaagcctcgggggcgctaatattcattcataagtacatattacacaagcaacattgtgctagtgccgggggtaggatatgggcgtgaacaaggcggtgtttcctcgaggagcttacttttagcaagtttacattcccacacctaattgtttaaagttactttttatgagatataatttatgtgcaataaaattaataagtttgaagtgctcaatttgatgagttttgacgaatgtatttatatattggtttaaccaccatcaccattgcttagtgatgttctatgagatgaggttgcaaaaatatattacaaatacgtctactaagtcacggctggagtacttaggttttgagattttcatatttcattctatttagtcccacttcagaagttgaaaagagcagtaaatcacacccaaaaagttcattttcacttaaatgaagcacactccagaaaacataaaatgttttatttcttggacatgtagtctttattctgcctgtaccaatatgactttggataaaataatttaactcaagttttctcttttttttttttttctttttttaagatggagtttcactcttgttgcccaagctggagtgcaatggcatgatctcagctcactgcaacctccgcctccccggttcaagtgattctcgtgcctcagcctcccaggtagctaggattacaggcgtgagccaccgtgcctagctaattttgtgtttttagtaaagacagggtttcactatgttgctcaggctggtctcaaactcctgatctcaagtgatccactcgcctcggccttccaaagtgttgggattacaggtgtgagccaccatgtccagtagtttcctcatcttttaattggaagaagggcctactactttaaaagattgcccactctaaaattctttggttctagtaatagctagtaccagccttttctgcttgttattagccacattctaaatataaatcaccattctcagggcagaagttataggtctgtgtattttttaaaatccttcaaatacattttctcatgagcctttatcttcaggagtaagtttcaaattctagatattatccactctttctatgggaaccagagttaacggagatgagggtacttagctgaggttagaagctcaggcagaagagagcaagattgaaatccaagctcattgatttgatagcgcttctttaatattcatttgtatttcaatgtgcctgaaaagtttgagagcagagacctgcctactgttgtagctctccattttaaagaaggagagtattaaatttattccataatgtatcattcctgttccctctgagaggcattggctttaggatttatacctatgttgaagtccatgaccttgtacaaataaaacaatagacaaggaaactgaaaagttaagagaaatgaaattgggataggagtccttggttaacatgtaaggattaggtgagaatgtgtgtaaatccatcataatagataagatggtcagtggatgctaattccctccctgttaaaagactaaaccatttttggatggctgagaaactagtttccgcattttagctgacaaagttatgttgttgaaaacaagcaaaaataggactgtgaacacctacaagaagtgctggtatgtttttagtgactaaatttccactatcctaggaagaccagttccttggatttccatatctcagaatcactaagaccagcccattgcatgtttttccagatgtgatgactggttgcacagagtcagtactctacctttttatgatgtcttaagggctgctaacttgaatttgattaattaaaaaattaatttttctgtattaacatgcatgtgtgcaaagctttaaaaaccctcaactgctcaatttaactttttcctgaaaatgactaagaattcaaatttctgaaaatcttacgatctaagaacttattgccattgccatagtgaccaccaccaagatgtctctagataaaaataagacttcagcactttttgcttttggatttcactagcaatactgaagattctgaatgtgaaactagtattgcttattcagatattcaatgttcaataactatagaaaagtgctgcattcttatccagtctgttcttaggagtcggttggtttcaaatcagtttgaaaggaatttgcatgggacagatggaaactacaatattagctaaatttaagctaagaaactttgtcatgataatcctgtgtgtgttaagggactggtacagttcaatggtgatgtggtagcatattcgattgccacttcatgttaatttaggtagagagttaaatagtcaaataaatattatacataaaggatcaattgattgggtaatggctgaatttttatagaagatttttctctctaaatttcatacgttgaaatttgccaagttaattgagataactaaaactctttttcctctag

SEQ ID NO: 1008 - DNA, 104 bp, Homo sapiens
ggtgaaccgtatctgaacaccgcatatgggcacatgatctgctactgggatggctctgctcattatctgatgtacctggtgatggtggcagccatagcatggga

SEQ ID NO: 1009 - DNA, 157 bp, Homo sapiens
ggtgaaccgtatctgaacaccgcatatgggcacatgatctgctactgggatggctctgctcattatctgatgtacctggtgatggtggcagccatagcatgggagtaagtcagttcacctggtgtgtgcctttgccaccttagcaaccgataagcgg

SEQ ID NO: 1010 - DNA, 2239 bp, Homo sapiens
gtaagtcagttcacctggtgtgtgcctttgccaccttagcaaccgataagcgggtatgtaaggaaacgttatgcatagaggcaaatacacaagcaggtatactggacatgaatataagttccatgggtgcacgtcagacgtggctttatcctccttgtaccactgccttttgaatatgtccttctgaattgctccctagcatggtgacagctcgggcagaccctttaagctttctgattatgttgtcttacaagaataatttttattttcagcaattaaagctaagcacatcttaaacttcatttcaaaacttcaaaatttccaaacagcaatctcatttcggttcaaagcttctgtccttccccagatcaggcacagctctgcggcttggctcgcactaaggcttggctacatggcttgtccgttcactcctcctgtctcactctgcggctggccccttggcagtggatgtgtatgtacaagggattaaaggaacaggagccgagtctgatgtgaaaggtgctggtttttgggtattggtacccccatcatgatatgctagcttggtcttgggaggcacacatgtgagttctttagagaccccaaccacaggagcttctgcattgcactaatccctgaagtgaacgacgtgctcttgggctgaatttctgcccatggtggcacacccacagctttttttctgctggggcccctgtaacccagaaggtacaccctttggggaggggtcttttcaaaacatttcaagtccggccatcttctcaggcctccacttgcttctgggttacagaaagtcatgcattcttgccccatacaaggttgaaatgtagtttacccaagtatctccctcactcccaacatgcactcaaggtcagctccagctaattctttttttttttttttttttttgagacaggctggagtgcaatggcacaatctcagctcactgcaatctccgcctcccaggttcaagcgattctcaggcctcagctgggactacaggcgtgtgtcactatacccgcaaattttgtatttttagtacacaaatctaaacatttttttcaccatgttggccaggctggtctcaaactcctgacctctggtgatctgcccgcctcagcctcccaaagtgctgggattacaggcgtgaaccaccgtgcccggctccagctcattcttatctgttctcctgcttataatcccagtcattatgaatgggcctcttggggtctggttacatttggcttgagggcgggggtggggcaggacgcacacagtattctcgtttcccttcagagaatttccttttgaatttctcatagcctgttacatagtgtggagtttgggttattggggttatcaattgaaggaactttttttttttattttgagacggagtctcgctctgtcacccaggctggagtgcagtggtgcgatcttggctcgctgtaacctctgcctcccaggttcaaccatttctcctgcctcagcctcccaagtagctggaattacaggtgcatgccaccatgcccagctaattttttttttttttttgtacttttagtagagatggcgtttcaccatgttggccaggctggtttcaaactcctgacctcaagtgatctgcccacctcagcttctcaaagtgctgggattacaggcatgagccaccatgctcggcctgaaggaagtttttgtcagcattgaagatttggggtatatgtctagcagctcctttgcaacatggggtacatgtcacttgtcttcacctttggggctttggccaaaattctgtgaccccagaaaaagtccatttaacattatcattgtaagtataactcatacttataatgattaaaaatatggatccaatttcatttcttctttcaactttctttttcctttcatgctgttgagtttcacacacaatagggaaatgcaggagtcctgtggcagggatgatcatgttgtagtttaacagaagacatagcaggcgtaatttcctatttaaaaggacacgaagaaggttctatagtatatcacatggcaatgaagttacataaccagggctccttgtgtttgatttattcctctcaattcaatatgttttgattgatgtactttactagtttgaatacaaaataatattgaagatcattttttgcttagtattctaagacaaacataccaagtcaagatttttttgttgttgttgttacag

SEQ ID NO: 1011 - DNA, 2186 bp, Homo sapiens
gtatgtaaggaaacgttatgcatagaggcaaatacacaagcaggtatactggacatgaatataagttccatgggtgcacgtcagacgtggctttatcctccttgtaccactgccttttgaatatgtccttctgaattgctccctagcatggtgacagctcgggcagaccctttaagctttctgattatgttgtcttacaagaataatttttattttcagcaattaaagctaagcacatcttaaacttcatttcaaaacttcaaaatttccaaacagcaatctcatttcggttcaaagcttctgtccttccccagatcaggcacagctctgcggcttggctcgcactaaggcttggctacatggcttgtccgttcactcctcctgtctcactctgcggctggccccttggcagtggatgtgtatgtacaagggattaaaggaacaggagccgagtctgatgtgaaaggtgctggtttttgggtattggtacccccatcatgatatgctagcttggtcttgggaggcacacatgtgagttctttagagaccccaaccacaggagcttctgcattgcactaatccctgaagtgaacgacgtgctcttgggctgaatttctgcccatggtggcacacccacagctttttttctgctggggcccctgtaacccagaaggtacaccctttggggaggggtcttttcaaaacatttcaagtccggccatcttctcaggcctccacttgcttctgggttacagaaagtcatgcattcttgccccatacaaggttgaaatgtagtttacccaagtatctccctcactcccaacatgcactcaaggtcagctccagctaattctttttttttttttttttttttgagacaggctggagtgcaatggcacaatctcagctcactgcaatctccgcctcccaggttcaagcgattctcaggcctcagctgggactacaggcgtgtgtcactatacccgcaaattttgtatttttagtacacaaatctaaacatttttttcaccatgttggccaggctggtctcaaactcctgacctctggtgatctgcccgcctcagcctcccaaagtgctgggattacaggcgtgaaccaccgtgcccggctccagctcattcttatctgttctcctgcttataatcccagtcattatgaatgggcctcttggggtctggttacatttggcttgagggcgggggtggggcaggacgcacacagtattctcgtttcccttcagagaatttccttttgaatttctcatagcctgttacatagtgtggagtttgggttattggggttatcaattgaaggaactttttttttttattttgagacggagtctcgctctgtcacccaggctggagtgcagtggtgcgatcttggctcgctgtaacctctgcctcccaggttcaaccatttctcctgcctcagcctcccaagtagctggaattacaggtgcatgccaccatgcccagctaattttttttttttttttgtacttttagtagagatggcgtttcaccatgttggccaggctggtttcaaactcctgacctcaagtgatctgcccacctcagcttctcaaagtgctgggattacaggcatgagccaccatgctcggcctgaaggaagtttttgtcagcattgaagatttggggtatatgtctagcagctcctttgcaacatggggtacatgtcacttgtcttcacctttggggctttggccaaaattctgtgaccccagaaaaagtccatttaacattatcattgtaagtataactcatacttataatgattaaaaatatggatccaatttcatttcttctttcaactttctttttcctttcatgctgttgagtttcacacacaatagggaaatgcaggagtcctgtggcagggatgatcatgttgtagtttaacagaagacatagcaggcgtaatttcctatttaaaaggacacgaagaaggttctatagtatatcacatggcaatgaagttacataaccagggctccttgtgtttgatttattcctctcaattcaatatgttttgattgatgtactttactagtttgaatacaaaataatattgaagatcattttttgcttagtattctaagacaaacataccaagtcaagatttttttgttgttgttgttacag

SEQ ID NO: 1012 - DNA, 92 bp, Homo sapiens
actgtatctgggaaaccccatggacccccccgacctcctgagcgtggaactgagcacctcccggcccccccagcatctaggaggggtgaaaa

SEQ ID NO: 1013 - DNA, 265 bp, Homo sapiens
gacaccccccagctgagacgtgcggtcaggttctgtggactgggaggcgggaggcctgtgcttcagacccaagactacacccggtttcctccaggacgaaggggctctgatgagattctgccacccctccacacgcttcccctgctctcttgacccagctctctcccccacagactgtatctgggaaaccccatggacccccccgacctcctgagcgtggaactgagcacctcccggcccccccagcatctaggaggggtgaaaa

SEQ ID NO: 1014 - DNA, 2070 bp, Homo sapiens
gtgagtactgggcggggatggatgctgacctggccccgctcgggactccagggccctcagcacggcacgcgtgggcggaatctgctcttcaccctttcgcccgggcttcagcccccgacccgccactctcccctcctcaccctggccttactctcgggaagctgtggaaccctaggaagcccagcctggtgggggttctccaggggaatgttctccaggggagtgttctccaggggagggttctccaggggagggttctccaggggaatgttctccaggggagggttctccaggggagggttctccaggggagggttctccaggggaatgttctccaggggagggttctccaggggagggttctccggggagcgttctccaggggaatgctgtccctgccattttcaagctttggggggccgatctcctaactctgagacacttcatctgtgaaacaggttcacccccccaataaggggaaggctgtaaatgcactctgaattagcacttgctgctcagatgcaggggtcctgagagaagctttcccactcactgtagatgaaagtagggtcaggagcttctgaggatggactcctgtttggtggaaaggtccccggagccacagctgtaacccctcttggtactcgggccttaggaaaatgaacttgggaggaacccggtgggagctgctgaggaggagagcttctcccatgacccccctgtggccccctgtgaccctgtgaccctgtgacccctgcacacgagcagtggttttccttctcctgctggtggtgccagagtcctggagacgtgaacctgctggctcaggccctggggatgtatgcaggtccacatgggagtgagcctgctttccagaaccagagtgggactggggaccttggggactgcagagggaacgttaggtggcagctccgcctccccaccacacagtactctacggagctcactccatacctgggagaggccctgtctcctatgtaagaggataaggccaccgaggggcatctgggaaggacacgcagaatcagtcacttccgggatgccaccccccaccccccgaagcttcttgcgccaggcctccaagcctctctgctggccgcagggggattccaggcccctggcctctgcagcccttctcctgctgacttctgatactctggtctgccctgagaggcgtggaaagcaggggccttcacccaccgggccccacacaccagaaccccacacagcgggcccccacacaccagaacccacacagcgggcccccacacaccagaaccccacacagcgagtccccccacaccagaacccacacagcgggcccccacacaccagaacccacacagcgggcccacacacactggaaccccaagctcacagggctcagcccatgtgttttgcctaaaaagaacccagcaagggcctgagagttggggtgaaagactgcagacacctccaggagaggctggtgccctctgccccactcctggcatgctgtggccagcccagccccattcctccaggctttaatcagccccagtgactaagtctcagatactgacagttggtgcagggacggagggtggatccggagcaggacaggtggcccagcctctcccgcacctcctggccatgtggcagaagggtgcctcctgcccaccctggctgggcaccatagctgggatgccccgttcttaggccctccatcgtggcctgcgggacaggagtgtctgccctctggccgctgcctggtgtgggctgggggcctggggggttgtggaggaccacctctgcccttgtagggtgtagttggagtccctgaggtcctaggctttccatcctggggtcaggtgtcctttctctgccttctctccaggacaccccccagctgagacgtgcggtcaggttctgtggactgggaggcgggaggcctgtgcttcagacccaagactacacccggtttcctccaggacgaaggggctctgatgagattctgccacccctccacacgcttcccctgctctcttgacccagctctctcccccacag

SEQ ID NO: 1015 - DNA, 1897 bp, Homo sapiens
gtgagtactgggcggggatggatgctgacctggccccgctcgggactccagggccctcagcacggcacgcgtgggcggaatctgctcttcaccctttcgcccgggcttcagcccccgacccgccactctcccctcctcaccctggccttactctcgggaagctgtggaaccctaggaagcccagcctggtgggggttctccaggggaatgttctccaggggagtgttctccaggggagggttctccaggggagggttctccaggggaatgttctccaggggagggttctccaggggagggttctccaggggagggttctccaggggaatgttctccaggggagggttctccaggggagggttctccggggagcgttctccaggggaatgctgtccctgccattttcaagctttggggggccgatctcctaactctgagacacttcatctgtgaaacaggttcacccccccaataaggggaaggctgtaaatgcactctgaattagcacttgctgctcagatgcaggggtcctgagagaagctttcccactcactgtagatgaaagtagggtcaggagcttctgaggatggactcctgtttggtggaaaggtccccggagccacagctgtaacccctcttggtactcgggccttaggaaaatgaacttgggaggaacccggtgggagctgctgaggaggagagcttctcccatgacccccctgtggccccctgtgaccctgtgaccctgtgacccctgcacacgagcagtggttttccttctcctgctggtggtgccagagtcctggagacgtgaacctgctggctcaggccctggggatgtatgcaggtccacatgggagtgagcctgctttccagaaccagagtgggactggggaccttggggactgcagagggaacgttaggtggcagctccgcctccccaccacacagtactctacggagctcactccatacctgggagaggccctgtctcctatgtaagaggataaggccaccgaggggcatctgggaaggacacgcagaatcagtcacttccgggatgccaccccccaccccccgaagcttcttgcgccaggcctccaagcctctctgctggccgcagggggattccaggcccctggcctctgcagcccttctcctgctgacttctgatactctggtctgccctgagaggcgtggaaagcaggggccttcacccaccgggccccacacaccagaaccccacacagcgggcccccacacaccagaacccacacagcgggcccccacacaccagaaccccacacagcgagtccccccacaccagaacccacacagcgggcccccacacaccagaacccacacagcgggcccacacacactggaaccccaagctcacagggctcagcccatgtgttttgcctaaaaagaacccagcaagggcctgagagttggggtgaaagactgcagacacctccaggagaggctggtgccctctgccccactcctggcatgctgtggccagcccagccccattcctccaggctttaatcagccccagtgactaagtctcagatactgacagttggtgcagggacggagggtggatccggagcaggacaggtggcccagcctctcccgcacctcctggccatgtggcagaagggtgcctcctgcccaccctggctgggcaccatagctgggatgccccgttcttaggccctccatcgtggcctgcgggacaggagtgtctgccctctggccgctgcctggtgtgggctgggggcctggggggttgtggaggaccacctctgcccttgtagggtgtagttggagtccctgaggtcctaggctttccatcctggggtcaggtgtcctttctctgccttctctccag

SEQ ID NO: 1016 - DNA, 160 bp, Homo sapiens
tgaacgggaaaatgggaagcagcgggcagctggcagcccacaccttaccctggagttctgcaactatccttccagcatgagggaccatattgattaccgctgctgcctgcccccagcaacccaccgtcctcatcccaccagcatctgtgacaacttctcg

SEQ ID NO: 1017 - DNA, 268 bp, Homo sapiens
gcagtgttttaggtgctgaggattcagcagtgaacaaaacagaccacaaaaccctgctcttatggagcttatatgctagtggaccattaccctcttgcgctgttgcagtgaacgggaaaatgggaagcagcgggcagctggcagcccacaccttaccctggagttctgcaactatccttccagcatgagggaccatattgattaccgctgctgcctgcccccagcaacccaccgtcctcatcccaccagcatctgtgacaacttctcg

SEQ ID NO: 1018 - DNA, 199 bp, Homo sapiens
gtgaggaaatggttgagggaaaggggtggggcctgatacgagtttatttcattcacttaagatatttattgagctcctaccatgtgcccaggcagtgttttaggtgctgaggattcagcagtgaacaaaacagaccacaaaaccctgctcttatggagcttatatgctagtggaccattaccctcttgcgctgttgcag

SEQ ID NO: 1019 - DNA, 91 bp, Homo sapiens
gtgaggaaatggttgagggaaaggggtggggcctgatacgagtttatttcattcacttaagatatttattgagctcctaccatgtgcccag

SEQ ID NO: 1020 - DNA, 266 bp, Homo sapiens
ctctcaagctggatttggaggagaagctgtttggacagcatctagccacggaagtgattttcaaggcgctgactggcttcaggaacaacaaaaatcccaagaaaccactgaccctttccttacacggctgggctggcacaggcaagaattttgtcagtcaaattgtggctgaaaatcttcacccaaaaggtctgaagagtaactttgtccacctgtttgtatcgactctgcacttccctcatgagcagaagataaaactgtaccag

SEQ ID NO: 1021 - DNA, 2849 bp, Homo sapiens
gcaagagaacccgctattatctcgtctgcaggccagtcggactggtccgggtgacctgctcactaactctggcctctgcttctctttcctttgtgttgctgtagcccccggctccactgagttaaggcacacttagtccaggtagttacaaagctctcctacaacatttctcttacttggttccaaaacagtccagtggggtaggggatgttatttccattaaaagatggggagccaagggcctggcgccgtggctcacgcctgtaatcccagcattttggggaagccgaggcgggcggatcatttgaggccaggagtttgagaccagcctggccaacatggtgaaaccccatctctacctaaaagtaccaaaattacctgagcacggtggcacgcacctgtaatcccagctacttgggaggctgaggcaggagaatcgcttgaacctgggtggcagaggttgcagtgagctgagatcgcgccaccgtactcggtctcaaaaaaaaaaaaaaaaaaaaggcctggcacagtggctcacgcctgtaatcccagcactttcggaggccgaggggggcggatcacgaggtcaggagatggagaccatcctggctaacacggtgagaccccgtctctactaaaaatacaaaaaattagccggggatggtggcgggcacctgttgtcccagctactcgggaggctgaggcaggagaatggcctgaacccgggaggcggagcttgcactgagccgagatcgcgccactgcactccagcctgggcgacacagtgagactctgtctcagaaaaaaaaaaaaaaaagagagatgtagtcagggccaggtgcagtggctcacgcctgtaatcccagcactttgggatccgccaaggcgggcggatcacctgaggtcgggagttcgagaccagcctgaccaacatggagaaaccccgtctctactgaaaatacaaaattagccgggcgtgatggcgtgcgcctgtaattcaagctacttgggaggctgaggttgcagtcagctgagaatgggccactgcaccccagcctgggcaacagaatgagactctgtctcaaaaaaaaagaaaaaaaaaaaagatggagcctggagcccagaggcaaggtgacttactcctacaatctttgtagcagaacaggacctttgtagcagaaccaaaacctcccaactcccagttgacatggtagccaccttctctggtgagtgaagggattccacatccccagcagtgcagttggtgagaaggggcagtcagtcttcaaggatttgctccggtgtggcttcattcaatgctgcccacctctggtgcagcctcagctttgcctctgctctttgcaatgtagcctagaggtcttttttctccttaacaggttttattccctttgttcctcccatccttcatgtccttggcattgctttcttcaaaggaagcctcaaagaactgaaccttgagactgtttctccttttgagatattgtttccacattcattttatattaagttgtctaggagggttagttctcatttaaatgaatgttgtccttgtcaaggttaacattcccactggcaacatagcaagactccatctctacaaaaaataaaaaaattagccaggtgtagtggcatgcacctgtagtcccagctacttgggaggctgagatgggaggatcgcttgagcccgggaggctgagcctacaatgaaccatggtcatgtcactgcattccagtctgggcgacagagtaagactctatctcaaaaaaaaaaaaaaaaaattcctcctgttaggtggggactgaagaaagaaatagaaacttaactgaacaaggaagtagaagtgtttgcccaacaaactgacgtgagacagggaagactgctaaaaaggaaggaaggaaggattttcttgttctttacattcttcataaatctccggaaacagagtaatataaatggttgagggcatgtctgggggagtttcctggtatagcctttcacgctttggggttgagggcttgttgcttgagtgtctttatgtttgtttgaagaaaacatctggaacagatgcttttcatgaaatgtcattgagtcagctctgttggtctggggcactgtgtactgtgcaggtcttgatctagttccttattcctcagtatgtctgatagtactaacttgagattgtagtccaagagagatgaaaactatggctacgttagcagtgaatgatattcacggatcttgccgggtggctcattcctgtaatctcagcactttgggagggtgaggtgggtggatcacctgaggtcaggagtttgagacgagcctggccaacatggcacaaccctgtctctactaaaaatacaaaaattagccaggcatggtgcaggggatcggggcgcctgtagtcccaactacacggggggctgaggccggggaatcgcttgaacccaagaggcagaggttgcagtgagctgagatcacgccactacacaccagcctgggggatagagtgagaccctgtttccaaagacaaaaaagagaagaaaagaatcacggatcttgtacctcttatacctttaaaaagtcagatttaatagtcatttgagttaggaaaaaacttctctgcattttagcatctatctctgccaatttccactttttagagataaggttttagaaaagctgctacctagcgagtgggggtgagggtgccattctaagagctctgacctcgtccttcagtgcatgaggagcagatggagcctgcgcgcctcttggtgcaccctttgagcttcgcatcctgtttcttctttcatggttggtccag

SEQ ID NO: 1022 - DNA, 407 bp, Homo sapiens
ctctcaagctggatttggaggagaagctgtttggacagcatctagccacggaagtgattttcaaggcgctgactggcttcaggaacaacaaaaatcccaagaaaccactgaccctttccttacacggctgggctggcacaggcaagaattttgtcagtcaaattgtggctgaaaatcttcacccaaaaggtctgaagagtaactttgtccacctgtttgtatcgactctgcacttccctcatgagcagaagataaaactgtaccaggcaagagaacccgctattatctcgtctgcaggccagtcggactggtccgggtgacctgctcactaactctggcctctgcttctctttcctttgtgttgctgtagcccccggctccactgagttaaggcacacttagtccag

SEQ ID NO: 1023 - DNA, 2708 bp, Homo sapiens
gtagttacaaagctctcctacaacatttctcttacttggttccaaaacagtccagtggggtaggggatgttatttccattaaaagatggggagccaagggcctggcgccgtggctcacgcctgtaatcccagcattttggggaagccgaggcgggcggatcatttgaggccaggagtttgagaccagcctggccaacatggtgaaaccccatctctacctaaaagtaccaaaattacctgagcacggtggcacgcacctgtaatcccagctacttgggaggctgaggcaggagaatcgcttgaacctgggtggcagaggttgcagtgagctgagatcgcgccaccgtactcggtctcaaaaaaaaaaaaaaaaaaaaggcctggcacagtggctcacgcctgtaatcccagcactttcggaggccgaggggggcggatcacgaggtcaggagatggagaccatcctggctaacacggtgagaccccgtctctactaaaaatacaaaaaattagccggggatggtggcgggcacctgttgtcccagctactcgggaggctgaggcaggagaatggcctgaacccgggaggcggagcttgcactgagccgagatcgcgccactgcactccagcctgggcgacacagtgagactctgtctcagaaaaaaaaaaaaaaaagagagatgtagtcagggccaggtgcagtggctcacgcctgtaatcccagcactttgggatccgccaaggcgggcggatcacctgaggtcgggagttcgagaccagcctgaccaacatggagaaaccccgtctctactgaaaatacaaaattagccgggcgtgatggcgtgcgcctgtaattcaagctacttgggaggctgaggttgcagtcagctgagaatgggccactgcaccccagcctgggcaacagaatgagactctgtctcaaaaaaaaagaaaaaaaaaaaagatggagcctggagcccagaggcaaggtgacttactcctacaatctttgtagcagaacaggacctttgtagcagaaccaaaacctcccaactcccagttgacatggtagccaccttctctggtgagtgaagggattccacatccccagcagtgcagttggtgagaaggggcagtcagtcttcaaggatttgctccggtgtggcttcattcaatgctgcccacctctggtgcagcctcagctttgcctctgctctttgcaatgtagcctagaggtcttttttctccttaacaggttttattccctttgttcctcccatccttcatgtccttggcattgctttcttcaaaggaagcctcaaagaactgaaccttgagactgtttctccttttgagatattgtttccacattcattttatattaagttgtctaggagggttagttctcatttaaatgaatgttgtccttgtcaaggttaacattcccactggcaacatagcaagactccatctctacaaaaaataaaaaaattagccaggtgtagtggcatgcacctgtagtcccagctacttgggaggctgagatgggaggatcgcttgagcccgggaggctgagcctacaatgaaccatggtcatgtcactgcattccagtctgggcgacagagtaagactctatctcaaaaaaaaaaaaaaaaaattcctcctgttaggtggggactgaagaaagaaatagaaacttaactgaacaaggaagtagaagtgtttgcccaacaaactgacgtgagacagggaagactgctaaaaaggaaggaaggaaggattttcttgttctttacattcttcataaatctccggaaacagagtaatataaatggttgagggcatgtctgggggagtttcctggtatagcctttcacgctttggggttgagggcttgttgcttgagtgtctttatgtttgtttgaagaaaacatctggaacagatgcttttcatgaaatgtcattgagtcagctctgttggtctggggcactgtgtactgtgcaggtcttgatctagttccttattcctcagtatgtctgatagtactaacttgagattgtagtccaagagagatgaaaactatggctacgttagcagtgaatgatattcacggatcttgccgggtggctcattcctgtaatctcagcactttgggagggtgaggtgggtggatcacctgaggtcaggagtttgagacgagcctggccaacatggcacaaccctgtctctactaaaaatacaaaaattagccaggcatggtgcaggggatcggggcgcctgtagtcccaactacacggggggctgaggccggggaatcgcttgaacccaagaggcagaggttgcagtgagctgagatcacgccactacacaccagcctgggggatagagtgagaccctgtttccaaagacaaaaaagagaagaaaagaatcacggatcttgtacctcttatacctttaaaaagtcagatttaatagtcatttgagttaggaaaaaacttctctgcattttagcatctatctctgccaatttccactttttagagataaggttttagaaaagctgctacctagcgagtgggggtgagggtgccattctaagagctctgacctcgtccttcagtgcatgaggagcagatggagcctgcgcgcctcttggtgcaccctttgagcttcgcatcctgtttcttctttcatggttggtccag

SEQ ID NO: 1024 - DNA, 68 bp, Homo sapiens
gaaaacggacgatgtattactaagctggaaaacatggggtttcgagtgggacaaggattgatagaaag

SEQ ID NO: 1025 - DNA, 101 bp, Homo sapiens
gaaaacggacgatgtattactaagctggaaaacatggggtttcgagtgggacaaggattgatagaaaggtgagcaggttggatttgaaaattttcttgcag

SEQ ID NO: 1026 - DNA, 1080 bp, Homo sapiens
gtgagcaggttggatttgaaaattttcttgcaggtaggttataaacaaaggtgatctatttcaaaagattgcataaaacttgggatattttaattttaattcctgaatgttattctctttacttcaaaaattaaaatttctttttagatccaatgccatttaactcatttattcaaattttattttaatgtttaaagaaaatatatattttatatattttagactttcttcctgaagctattttagactttattcctgaagctattgaagcaactatctaaaatcttactgcattttcaacttaagatctgctaggttctttaacctgcatagaatttttaagtacataggtttgaaataactatagtctatgtttatgcgtgtaattatctttgaacttataaatcagttctttttagtatttctttctcactacctgaatagttaaactcggagtatattttatataacaatgtcatgataatgctcagctctttgttcttttgtggttttttgatgtgctagaatgcattgcacctgaaattttggctataatgttagactaatttgaggcctcataatttatataacataatgtgaatccattgagataggatcatgttacctggtgcttatgactttattagtgttaataaatgttcagccaggtgtggtggctcatgcctgtaatcccagcactttgtgaggccaaggtgggagaatctcttgagctcaggagtttgagaccagccagggtaacaaagtggaaccctgtctctacaaagatatacagattagctgagcatggtgacatgtgcctgtggtctcagctgctagggaggctgaggtgggaggatagcttgagcctgggagggaggtagacgttgcaatgagccgagattatgctattgcactctaacctgggcgacagagccagaatctgtctcaaaaaaaaaattaaaattaaaaaacccaataaatgttcagtgctgttctggcatttggaaattagttaataattagtccctcttgctttttttggaggagaaatactgtattacttctagttgatctttttag

SEQ ID NO: 1027 - DNA, 1047 bp, Homo sapiens
gtaggttataaacaaaggtgatctatttcaaaagattgcataaaacttgggatattttaattttaattcctgaatgttattctctttacttcaaaaattaaaatttctttttagatccaatgccatttaactcatttattcaaattttattttaatgtttaaagaaaatatatattttatatattttagactttcttcctgaagctattttagactttattcctgaagctattgaagcaactatctaaaatcttactgcattttcaacttaagatctgctaggttctttaacctgcatagaatttttaagtacataggtttgaaataactatagtctatgtttatgcgtgtaattatctttgaacttataaatcagttctttttagtatttctttctcactacctgaatagttaaactcggagtatattttatataacaatgtcatgataatgctcagctctttgttcttttgtggttttttgatgtgctagaatgcattgcacctgaaattttggctataatgttagactaatttgaggcctcataatttatataacataatgtgaatccattgagataggatcatgttacctggtgcttatgactttattagtgttaataaatgttcagccaggtgtggtggctcatgcctgtaatcccagcactttgtgaggccaaggtgggagaatctcttgagctcaggagtttgagaccagccagggtaacaaagtggaaccctgtctctacaaagatatacagattagctgagcatggtgacatgtgcctgtggtctcagctgctagggaggctgaggtgggaggatagcttgagcctgggagggaggtagacgttgcaatgagccgagattatgctattgcactctaacctgggcgacagagccagaatctgtctcaaaaaaaaaattaaaattaaaaaacccaataaatgttcagtgctgttctggcatttggaaattagttaataattagtccctcttgctttttttggaggagaaatactgtattacttctagttgatctttttag

SEQ ID NO: 1028 - DNA, 129 bp, Homo sapiens
gcagctcagctggttccggctggggaagatggcggtggctggggcggtgtccggggagccgctggtgcactggtgcacccagcagttgcggaagactttcggcctggatgtcagcgaggagatcattca

SEQ ID NO: 1029 - DNA, 213 bp, Homo sapiens
gcagctcagctggttccggctggggaagatggcggtggctggggcggtgtccggggagccgctggtgcactggtgcacccagcagttgcggaagactttcggcctggatgtcagcgaggagatcattcagtgagaacagttcgggtccaagcggggaaggagctctgggatgtgcactgcctgagcgaaccgggaagcggggaggactgaaaa

SEQ ID NO: 1030 - DNA, 5981 bp, Homo sapiens
gtgagaacagttcgggtccaagcggggaaggagctctgggatgtgcactgcctgagcgaaccgggaagcggggaggactgaaaagttaagagagaaatgtgataaaggggctgcagtctgtagtctgtaggcgtcgaattttggcctccacctttgtagtttagtttctggaatagggtgtccggctccacagtctgccggtcgggcttttttcctgggaagacgcccaatctgtaataattagaaatgcaaggctgtcccaggagccagtttcctttctagagagaaggggcaggtcaaactgtatttcctaactttgaaccccttactcttttatttatttattattattgttgttattattgagacggagtctctgtcgcccaggctggcgtgcggtggcgcgatcttggctcactgcaacctccgccttccgggttcaggtgattcacctgcctgagcctcccaagtagctgggattacaggcacgcaccaccacacccggctaatttttaaaaatttttagtagagtcagtgtttcaccatgttggccaggctagtctccagctcctgatctcaagtgatccgcccgcctcgacctcccaaagtgctgggattacaggcatgagccaccgcacccagatatactctgaacattttagtcggcccaatctgagttgtgtcagtagagccaacagggtcagctgtgtcaataggacctagaatttaagtggaagcagcgtggtagagtacaaatagcttctgactctggagtctcaggttctatattctgttgtcgtttacctgttttagaacccaggacaacttaatttttctctctgtaccctggtttcttcatttataagattaatcattagtagagcttatcatgctttatgactcctatgaaatggagatggtgtacatgacttaatatctactttcaactgattgaagaacatttgttgcgctgctgttacacgccaggtgctggggtaacaaagacaagacagttgggttccccttcgttgatgagtgctgaggttggggaaatgaaggggcttgttggagcacaaaataaaggattctcattaagatttgaaaaactcggaaggtttattggaaaggataactttcacccgagaactaaggaatagacagaggtggcggtccaaagtgttcaggcaggggagaaaactacaaaaatgggacttgatcgaagaactgaaagtgttccttcatttgattccttggtcactgatgttgaaacctaaattgctgttctagggcttttgtaggaagtaagatgagtttctgagtttcggagaaaatagacttttggcaaggagacagttcaagtaggttattttaatggatttttttgaggccctaggagatggctcaagcccttattcccagcactttgggaggtagaggtgggaggattgcttgagactgggagttggagaccaccctgggcaacatagtgagaccctgtctctacagaaataaaaaaagtaaacaacaagataaaggattttttttaacactagaatagacaacaaaacaaaacagcgaaatcttatggtttggctttacccttgcttgaacgcagtcagattaagtatttagtagttttcaaacattttttaaagcagtggaatgctatcaaatgaaataatgaaactttgcaatatataaaacagaaaagtgttttttacgaatataagttcaaaattttcacttttttttttttttttttttgagacagattctgttgcccaggctggagtgcagtggtgcgatctcagctcgctgcaacctccgcctcccacgttcaagcgattctctttcctcagcccgagcagctgggattacaggcgcgcaccaccatgcctggctaatttttgtattcttactagagatggggtttcaccatgttgaccagggtggtctcgaactcctgacctcagatgatccaaccgcctcagcctcccaaagtgctgggattacaggcatgagccaccacgcctggcccaattttcacatatttattgtaaatatgtgtaatatattaaatatcaaatatattaaatattaaatatatcaaatattatattaaatatattaaatattaaatatatcaaatattatattaaatatattaaatatgtgtattatattaaatacagtattaaaaaaaaaagattgaggtggccaggcgcagtggttcatgtgtgtaatctaagcactttgggaggccgaggcagatggatcatttgaggtcaggaatttcagaccagcctggccaacatggcgaaacccccactctactaaaaatacaaaacttagtcgggtgtggtggagcgtgcaggtcatctcagttactcggaaggctgaggcaggagaatcccttgaaccgcggggcagaggttgcagtgagctgataccgcaccactgcactccatcctgggtgacagagtgagacctcgtctcaaaaaaaaaaaggaaaaaagaaagattgaggctatttttgataaattaacaatttgaaatagggtaagaatgatagatgtagtcttctcagtctagaatccagttgtattttgtttggattacacagtatcaagaaaatgcgttctcaggccaggcgtggtggctcacgcctgtaatcctagcactttaggaggccaaggcaggtggaccacctgaggtcaggagttcgagaccagcctggccaacatggtgaaaccccgtctctactaaaaatacaaaaaaaaattagccaggtatggtgacgggcacctgtaatcccagctactcgggaggctgaggcaggagaatcgcttgaacccaggaggcagaggttgcagtgagccaatatctcaccactgcactccagcctgggcgacagagcgagactccgtctcaaaaaaaaaaaaaaattatattccgcctgggaaggaggtcagtgcccgtcggcatgtattacgctaagatactatttgaagcatttgttaggtattcactagtattccacaacaggctattatgccatgatgaaagcatttgctgtgccttgcctggcatttaattgagaattacccaggtgtatgtactacagtaatgtactaacttgaacaattttatatgagtggactgaatttttgaaatagcacagagctattaacttttttttttttcttttttgagacggagtctcactctgtcgcccaggctggagtgcagtggcaggatctcggctcactgcaacctccacctcccaggttcaagcaattctcctgcctcagcctccccagtagcttggactacaggcgcgtgacaccatgcccagctaatttttgtatttttagtggagatgggattccaccaggttggccaggatggtctcggtctcctgacctcgtggtctgcccgcctcagcctcccaaagtgctgggattacaggtgtgagccactgcacccggccttaactttctaattagtgatacatttataagacataaatagctatccacagagttaacaaaataaactttggtccacaatctggatgagttcatattattttgataagatttggtatataacatatttggatgaatgttgttctttattataccttgttaagtagttaaaatgacatttattcaaatggttctgaaactctcttccctggttgtttgaaaaatactccagggttggccaggtgcagtggctcaacctgtaatcccagcactttgggaggctgaggtgggttgatcacttgaggtcaggagttcaagaccagcctgcccaacatggcaaaaccttgtctctactaaaaattcaaaaaattagccgggcgcagtggtgcacgcctgcaatcccagctactcaggaggctgaggcaggagaatttcttgaacctaggagccagaggttgcagtgagccaagatagcaccactgcactccagcctgggtgacagagtgagactctgtctcaaaaaaaaaaaaaaaaaaaaaaaagccaggtgcagcggctcagcctgtaattccagcactttggaaggctgaggcgggcaaatcacttgaggtcaggacttcgagaccagcctggccaacatagtgaaaccccgtctctactaaaaaaaagcaaaaacaaaacaaaacaaaacaaaaattagccgggtgtggttgtgcacgcctgtaatcccagctactcaggaggctgaggtaggagaatcgcttgaacctgggagatggagtttgcagtgagctgagatcgcaccactgcactccagcctgggagactaaatgagactctgtctgaaaaaacaaaaaaaccctccagggttaaatgatcccttgggattccttacagttttgcaagtctttgatagcagttaatcttttggtggggactggtaagtttggggatcaagatgattaaaatgtgtaagtcctgaaaaaccattgtcttttctaatccatagtaattagaagatgcctgtttttggggggtgtgtgtatgtgtgtgtgtatttttagtagagacggtttcaccatgttggccaagctggtctctaactcctgacctcaggtgatccacccgcctcagcctcccaaagtgctgggagccatcatgccccaccgtttttgcttgtttgagacagagtctcattctgttgctcaggctggaatgtagtggtgcaatcatggctctgcagccttcacctctgagactcaaaggatccttccacctcagcctcccaagtagctaggactacaggaacatgcctccatgcctggctaattttaatttttcttctagagacaaggtctccctatgttgcccaggctggtctcaaactcctgggcccaagtgatcctccagcttcagcctcccaaattgttgggattacaggcatgggctcccgaacccagacagaatattctcttagtgaggcccaaaggcacaaatttgtttacctctagagcataattctgcaattccaccattacactgtgaaaagaatgcagtacatacgataccaatcataggacaatttcataatttttaaaaagttaaaggatatagcactatggtaataatttttcttgcattccatatcattgtgtctgaattacagtttctgtgctgttttcagtgtcttgtatgttaattttttttttttttttttttgagaggaagtctcacttgcccaggctggagtgcagtggcacgatctcagctcactgcaagctctgtctcctgggttcacaccattctcctgcctcagcctcccgagtagctgggactacaggcgcctgctaccatacccgcctaatttttttttgttttttttttttagtagagacagggtttcaccgtgttagccaggatggtctcgatctcctgacctggtgatccgcccgcctcggcctcccaaagtgctgggattacaggtgtgagccaccgcgcccggccgcttatgtgttaatttataagtaatttttatcacttctttctcttgtaatgataagatgttcactgtagaaaactaaaaaaatcagaaaaggataaaaaagtaaactaaaattaccataatactacaacccagaaataagcactgtttctttctcttttttcccatatatattataatgtaatacattttaaaaacgtatttattgtaggaaaaaagaaaataaaaataaaactacctttaattccatcactcactagtaatcgttttggtgtataacgttgtttttttcctacacataagtgtatgtatgtatacattcataccagttaggatcgtatcgtatttctagcacctagcatagtacttggctcaaagtaaacactctaatagattaatgaatggtttttactacctagatctctgttaagattactgagaaacagtgtaagttagtcttgtttcaacaacttatatctttgcctcctgag

SEQ ID NO: 1031 - DNA, 5897 bp, Homo sapiens
gttaagagagaaatgtgataaaggggctgcagtctgtagtctgtaggcgtcgaattttggcctccacctttgtagtttagtttctggaatagggtgtccggctccacagtctgccggtcgggcttttttcctgggaagacgcccaatctgtaataattagaaatgcaaggctgtcccaggagccagtttcctttctagagagaaggggcaggtcaaactgtatttcctaactttgaaccccttactcttttatttatttattattattgttgttattattgagacggagtctctgtcgcccaggctggcgtgcggtggcgcgatcttggctcactgcaacctccgccttccgggttcaggtgattcacctgcctgagcctcccaagtagctgggattacaggcacgcaccaccacacccggctaatttttaaaaatttttagtagagtcagtgtttcaccatgttggccaggctagtctccagctcctgatctcaagtgatccgcccgcctcgacctcccaaagtgctgggattacaggcatgagccaccgcacccagatatactctgaacattttagtcggcccaatctgagttgtgtcagtagagccaacagggtcagctgtgtcaataggacctagaatttaagtggaagcagcgtggtagagtacaaatagcttctgactctggagtctcaggttctatattctgttgtcgtttacctgttttagaacccaggacaacttaatttttctctctgtaccctggtttcttcatttataagattaatcattagtagagcttatcatgctttatgactcctatgaaatggagatggtgtacatgacttaatatctactttcaactgattgaagaacatttgttgcgctgctgttacacgccaggtgctggggtaacaaagacaagacagttgggttccccttcgttgatgagtgctgaggttggggaaatgaaggggcttgttggagcacaaaataaaggattctcattaagatttgaaaaactcggaaggtttattggaaaggataactttcacccgagaactaaggaatagacagaggtggcggtccaaagtgttcaggcaggggagaaaactacaaaaatgggacttgatcgaagaactgaaagtgttccttcatttgattccttggtcactgatgttgaaacctaaattgctgttctagggcttttgtaggaagtaagatgagtttctgagtttcggagaaaatagacttttggcaaggagacagttcaagtaggttattttaatggatttttttgaggccctaggagatggctcaagcccttattcccagcactttgggaggtagaggtgggaggattgcttgagactgggagttggagaccaccctgggcaacatagtgagaccctgtctctacagaaataaaaaaagtaaacaacaagataaaggattttttttaacactagaatagacaacaaaacaaaacagcgaaatcttatggtttggctttacccttgcttgaacgcagtcagattaagtatttagtagttttcaaacattttttaaagcagtggaatgctatcaaatgaaataatgaaactttgcaatatataaaacagaaaagtgttttttacgaatataagttcaaaattttcacttttttttttttttttttttgagacagattctgttgcccaggctggagtgcagtggtgcgatctcagctcgctgcaacctccgcctcccacgttcaagcgattctctttcctcagcccgagcagctgggattacaggcgcgcaccaccatgcctggctaatttttgtattcttactagagatggggtttcaccatgttgaccagggtggtctcgaactcctgacctcagatgatccaaccgcctcagcctcccaaagtgctgggattacaggcatgagccaccacgcctggcccaattttcacatatttattgtaaatatgtgtaatatattaaatatcaaatatattaaatattaaatatatcaaatattatattaaatatattaaatattaaatatatcaaatattatattaaatatattaaatatgtgtattatattaaatacagtattaaaaaaaaaagattgaggtggccaggcgcagtggttcatgtgtgtaatctaagcactttgggaggccgaggcagatggatcatttgaggtcaggaatttcagaccagcctggccaacatggcgaaacccccactctactaaaaatacaaaacttagtcgggtgtggtggagcgtgcaggtcatctcagttactcggaaggctgaggcaggagaatcccttgaaccgcggggcagaggttgcagtgagctgataccgcaccactgcactccatcctgggtgacagagtgagacctcgtctcaaaaaaaaaaaggaaaaaagaaagattgaggctatttttgataaattaacaatttgaaatagggtaagaatgatagatgtagtcttctcagtctagaatccagttgtattttgtttggattacacagtatcaagaaaatgcgttctcaggccaggcgtggtggctcacgcctgtaatcctagcactttaggaggccaaggcaggtggaccacctgaggtcaggagttcgagaccagcctggccaacatggtgaaaccccgtctctactaaaaatacaaaaaaaaattagccaggtatggtgacgggcacctgtaatcccagctactcgggaggctgaggcaggagaatcgcttgaacccaggaggcagaggttgcagtgagccaatatctcaccactgcactccagcctgggcgacagagcgagactccgtctcaaaaaaaaaaaaaaattatattccgcctgggaaggaggtcagtgcccgtcggcatgtattacgctaagatactatttgaagcatttgttaggtattcactagtattccacaacaggctattatgccatgatgaaagcatttgctgtgccttgcctggcatttaattgagaattacccaggtgtatgtactacagtaatgtactaacttgaacaattttatatgagtggactgaatttttgaaatagcacagagctattaacttttttttttttcttttttgagacggagtctcactctgtcgcccaggctggagtgcagtggcaggatctcggctcactgcaacctccacctcccaggttcaagcaattctcctgcctcagcctccccagtagcttggactacaggcgcgtgacaccatgcccagctaatttttgtatttttagtggagatgggattccaccaggttggccaggatggtctcggtctcctgacctcgtggtctgcccgcctcagcctcccaaagtgctgggattacaggtgtgagccactgcacccggccttaactttctaattagtgatacatttataagacataaatagctatccacagagttaacaaaataaactttggtccacaatctggatgagttcatattattttgataagatttggtatataacatatttggatgaatgttgttctttattataccttgttaagtagttaaaatgacatttattcaaatggttctgaaactctcttccctggttgtttgaaaaatactccagggttggccaggtgcagtggctcaacctgtaatcccagcactttgggaggctgaggtgggttgatcacttgaggtcaggagttcaagaccagcctgcccaacatggcaaaaccttgtctctactaaaaattcaaaaaattagccgggcgcagtggtgcacgcctgcaatcccagctactcaggaggctgaggcaggagaatttcttgaacctaggagccagaggttgcagtgagccaagatagcaccactgcactccagcctgggtgacagagtgagactctgtctcaaaaaaaaaaaaaaaaaaaaaaaagccaggtgcagcggctcagcctgtaattccagcactttggaaggctgaggcgggcaaatcacttgaggtcaggacttcgagaccagcctggccaacatagtgaaaccccgtctctactaaaaaaaagcaaaaacaaaacaaaacaaaacaaaaattagccgggtgtggttgtgcacgcctgtaatcccagctactcaggaggctgaggtaggagaatcgcttgaacctgggagatggagtttgcagtgagctgagatcgcaccactgcactccagcctgggagactaaatgagactctgtctgaaaaaacaaaaaaaccctccagggttaaatgatcccttgggattccttacagttttgcaagtctttgatagcagttaatcttttggtggggactggtaagtttggggatcaagatgattaaaatgtgtaagtcctgaaaaaccattgtcttttctaatccatagtaattagaagatgcctgtttttggggggtgtgtgtatgtgtgtgtgtatttttagtagagacggtttcaccatgttggccaagctggtctctaactcctgacctcaggtgatccacccgcctcagcctcccaaagtgctgggagccatcatgccccaccgtttttgcttgtttgagacagagtctcattctgttgctcaggctggaatgtagtggtgcaatcatggctctgcagccttcacctctgagactcaaaggatccttccacctcagcctcccaagtagctaggactacaggaacatgcctccatgcctggctaattttaatttttcttctagagacaaggtctccctatgttgcccaggctggtctcaaactcctgggcccaagtgatcctccagcttcagcctcccaaattgttgggattacaggcatgggctcccgaacccagacagaatattctcttagtgaggcccaaaggcacaaatttgtttacctctagagcataattctgcaattccaccattacactgtgaaaagaatgcagtacatacgataccaatcataggacaatttcataatttttaaaaagttaaaggatatagcactatggtaataatttttcttgcattccatatcattgtgtctgaattacagtttctgtgctgttttcagtgtcttgtatgttaattttttttttttttttttttgagaggaagtctcacttgcccaggctggagtgcagtggcacgatctcagctcactgcaagctctgtctcctgggttcacaccattctcctgcctcagcctcccgagtagctgggactacaggcgcctgctaccatacccgcctaatttttttttgttttttttttttagtagagacagggtttcaccgtgttagccaggatggtctcgatctcctgacctggtgatccgcccgcctcggcctcccaaagtgctgggattacaggtgtgagccaccgcgcccggccgcttatgtgttaatttataagtaatttttatcacttctttctcttgtaatgataagatgttcactgtagaaaactaaaaaaatcagaaaaggataaaaaagtaaactaaaattaccataatactacaacccagaaataagcactgtttctttctcttttttcccatatatattataatgtaatacattttaaaaacgtatttattgtaggaaaaaagaaaataaaaataaaactacctttaattccatcactcactagtaatcgttttggtgtataacgttgtttttttcctacacataagtgtatgtatgtatacattcataccagttaggatcgtatcgtatttctagcacctagcatagtacttggctcaaagtaaacactctaatagattaatgaatggtttttactacctagatctctgttaagattactgagaaacagtgtaagttagtcttgtttcaacaacttatatctttgcctcctgag

SEQ ID NO: 1032 - DNA, 182 bp, Homo sapiens
actgagtatcgtaataagtgtgagtttctggttggcgtcggggtggatggggaggataacaccgtgggctgtcggctcggcaagtacaagggcgggacgtgtgctgtggcagccccgtttgacaccgtgcacatccccgaagccaccaagcaggtggtgaaggccttccaggagttcatccg

SEQ ID NO: 1033 - DNA, 224 bp, Homo sapiens
gtcagactagacttcggtggccacaaacccctatcctgggttttgaaaaactttgcttttgctcacccttcctgttgatctccctgctttgtgttttcttctggtaacatcacatagttgtcagctgttcctcttgtttgactgccagcccctgtggggaaatcagggtttccaggcccaagcgctgggcagccagggtaaggtgcagctctctctccctgcag

SEQ ID NO: 1034 - DNA, 289 bp, Homo sapiens
ttgtcagctgttcctcttgtttgactgccagcccctgtggggaaatcagggtttccaggcccaagcgctgggcagccagggtaaggtgcagctctctctccctgcagactgagtatcgtaataagtgtgagtttctggttggcgtcggggtggatggggaggataacaccgtgggctgtcggctcggcaagtacaagggcgggacgtgtgctgtggcagccccgtttgacaccgtgcacatccccgaagccaccaagcaggtggtgaaggccttccaggagttcatccg

SEQ ID NO: 1035 - DNA, 117 bp, Homo sapiens
gtcagactagacttcggtggccacaaacccctatcctgggttttgaaaaactttgcttttgctcacccttcctgttgatctccctgctttgtgttttcttctggtaacatcacatag

SEQ ID NO: 1036 - DNA, 133 bp, Homo sapiens
aaggcgcggaagcggcggtagctgcagctggcgaagttgggcgactggcggatgcaggccttgcggcacgtcgtgtgcgccctgtccggcggcgtggacagcgccgtggccgcgctgctgctgaggcggagag

SEQ ID NO: 1037 - DNA, 122 bp, Homo sapiens
gcggcggtagctgcagctggcgaagttgggcgactggcggatgcaggccttgcggcacgtcgtgtgcgccctgtccggcggcgtggacagcgccgtggccgcgctgctgctgaggcggagag

SEQ ID NO: 1038 - DNA, 102 bp, Homo sapiens
cgaagttgggcgactggcggatgcaggccttgcggcacgtcgtgtgcgccctgtccggcggcgtggacagcgccgtggccgcgctgctgctgaggcggagag

SEQ ID NO: 1039 - DNA, 393 bp, Homo sapiens
aaggcgcggaagcggcggtagctgcagctggcgaagttgggcgactggcggatgcaggccttgcggcacgtcgtgtgcgccctgtccggcggcgtggacagcgccgtggccgcgctgctgctgaggcggagaggtgaggcgtccgaggctcccgccccccgccgagcgaatgtgtccccggaaacctgtccccgtccgtcgtggcgttgtgcacgtctcctccctccctgggccgctggttgcgcgcgggtcggcaggaggataccccgtcctctgactttggttcggaggctcctcgccctccacctgtgtagtcggaggtgtgcgcgactgcagctccgactacctgggagcagttccgcgcccctctccacccacgcgcgcccacccaca

SEQ ID NO: 1040 - DNA, 382 bp, Homo sapiens
gcggcggtagctgcagctggcgaagttgggcgactggcggatgcaggccttgcggcacgtcgtgtgcgccctgtccggcggcgtggacagcgccgtggccgcgctgctgctgaggcggagaggtgaggcgtccgaggctcccgccccccgccgagcgaatgtgtccccggaaacctgtccccgtccgtcgtggcgttgtgcacgtctcctccctccctgggccgctggttgcgcgcgggtcggcaggaggataccccgtcctctgactttggttcggaggctcctcgccctccacctgtgtagtcggaggtgtgcgcgactgcagctccgactacctgggagcagttccgcgcccctctccacccacgcgcgcccacccaca

SEQ ID NO: 1041 - DNA, 362 bp, Homo sapiens
cgaagttgggcgactggcggatgcaggccttgcggcacgtcgtgtgcgccctgtccggcggcgtggacagcgccgtggccgcgctgctgctgaggcggagaggtgaggcgtccgaggctcccgccccccgccgagcgaatgtgtccccggaaacctgtccccgtccgtcgtggcgttgtgcacgtctcctccctccctgggccgctggttgcgcgcgggtcggcaggaggataccccgtcctctgactttggttcggaggctcctcgccctccacctgtgtagtcggaggtgtgcgcgactgcagctccgactacctgggagcagttccgcgcccctctccacccacgcgcgcccacccaca

SEQ ID NO: 1042 - DNA, 1932 bp, Homo sapiens
gtgaggcgtccgaggctcccgccccccgccgagcgaatgtgtccccggaaacctgtccccgtccgtcgtggcgttgtgcacgtctcctccctccctgggccgctggttgcgcgcgggtcggcaggaggataccccgtcctctgactttggttcggaggctcctcgccctccacctgtgtagtcggaggtgtgcgcgactgcagctccgactacctgggagcagttccgcgcccctctccacccacgcgcgcccacccacagtgagaagccggcgggccggggtggggtggggagggaagggtttctcacggatctgcggcgtccacattcacctgtgagaccgtggacactggtgaggggagctgggatcgccgggccgggggcctgacctctgcacacgctgtggccgcccggtgggaggtccttgtcctccccactcagcagactggacaactgccgcgcggcgggtctgcttgttcagcgtctcctgtgttctccgctcgctggaggacaaagttttctccaggagcatttgcatttcttccggcatctaaacggagccccacgggtgcttagcattcctcgggcccggcgctgaaatgagcacttgtttaacttcacctgtgtggctccccgcgggaggcctcattcacagagtcacgtttgtggagctctgctttgcgccatctttggctcctgaccttgggcaagtgaattaagccgtcccctgtaaaattcggctaacacctgcctcacggggtgactggagggattagatgacatagtacatactgatgagtacgtgctcagcacatacgaggtacgcagaaaacagtagtggctattagtttatattgttaataaccatagctattatggtaggtacagtaagtgccaaagagaagggtaggcggaccataagcagaaatagttgtgaggaagggagagtggaggaaagcatcctagagatggaggtgctcagctgagtcgaaagaagagtaggatgtcactaagcagagacttggaggtggaggcggccctcccggcacagtcagcagtgcaagcagaatcacagaggcctgcaagtgtgggctggttctggccagatggagatggaaggagaggagcctggagcacgtttagccctgattatggaagatgctataccaggggctttagactgttaggtagacattagtctggttgatctgggataggggtggtctttcgcgtgtggtggtgtagttttgacaaagctttgtcatcaaatttctgttgttttgggtactatatgaagccttcttcagcagtcatttgccctgtctttcattacattcagcctacctaaacgaaccagctttctcatacagggtctgcacctgtgtagtttgctaaggtggtgtagggctaaagttggcctttccaatatttgggtgaatattttgttacaatcgaaaaggtagaaaataggtcataaactaggtggtacagctcttacaaaatatcgaaaattttaattatctttatatctgatcacttagaatctaagtcttagatagtaactagaaataacttttgaaaagagtttccttttttgataactgaatggtgctttgaaaaattttgttgagtttcgactattccttcgtgtattccacacacactggctgatcccctcctgctaggtattgtgctgatacatagatggggacacaaagatgagaaaataccacctcgttaatcttggggactcaggcaccaagatggaaaccggatccctgaagccacatggcaaagcagggactgcccggcaggccaggcacagaggcacaggagcacagcgtgtggggaacttctcagagctcagaaatcactgccgttttaccgaaggttgatttatgtattctctttaattgaccttcccgcccgcag

SEQ ID NO: 1043 - DNA, 1672 bp, Homo sapiens
gtgagaagccggcgggccggggtggggtggggagggaagggtttctcacggatctgcggcgtccacattcacctgtgagaccgtggacactggtgaggggagctgggatcgccgggccgggggcctgacctctgcacacgctgtggccgcccggtgggaggtccttgtcctccccactcagcagactggacaactgccgcgcggcgggtctgcttgttcagcgtctcctgtgttctccgctcgctggaggacaaagttttctccaggagcatttgcatttcttccggcatctaaacggagccccacgggtgcttagcattcctcgggcccggcgctgaaatgagcacttgtttaacttcacctgtgtggctccccgcgggaggcctcattcacagagtcacgtttgtggagctctgctttgcgccatctttggctcctgaccttgggcaagtgaattaagccgtcccctgtaaaattcggctaacacctgcctcacggggtgactggagggattagatgacatagtacatactgatgagtacgtgctcagcacatacgaggtacgcagaaaacagtagtggctattagtttatattgttaataaccatagctattatggtaggtacagtaagtgccaaagagaagggtaggcggaccataagcagaaatagttgtgaggaagggagagtggaggaaagcatcctagagatggaggtgctcagctgagtcgaaagaagagtaggatgtcactaagcagagacttggaggtggaggcggccctcccggcacagtcagcagtgcaagcagaatcacagaggcctgcaagtgtgggctggttctggccagatggagatggaaggagaggagcctggagcacgtttagccctgattatggaagatgctataccaggggctttagactgttaggtagacattagtctggttgatctgggataggggtggtctttcgcgtgtggtggtgtagttttgacaaagctttgtcatcaaatttctgttgttttgggtactatatgaagccttcttcagcagtcatttgccctgtctttcattacattcagcctacctaaacgaaccagctttctcatacagggtctgcacctgtgtagtttgctaaggtggtgtagggctaaagttggcctttccaatatttgggtgaatattttgttacaatcgaaaaggtagaaaataggtcataaactaggtggtacagctcttacaaaatatcgaaaattttaattatctttatatctgatcacttagaatctaagtcttagatagtaactagaaataacttttgaaaagagtttccttttttgataactgaatggtgctttgaaaaattttgttgagtttcgactattccttcgtgtattccacacacactggctgatcccctcctgctaggtattgtgctgatacatagatggggacacaaagatgagaaaataccacctcgttaatcttggggactcaggcaccaagatggaaaccggatccctgaagccacatggcaaagcagggactgcccggcaggccaggcacagaggcacaggagcacagcgtgtggggaacttctcagagctcagaaatcactgccgttttaccgaaggttgatttatgtattctctttaattgaccttcccgcccgcag

SEQ ID NO: 1044 - DNA, 317 bp, Homo sapiens
ccctggtctccctcctgaacccgtgtgccaacatgaaggtgtgcaatgaggaccagaccaactgcacagtgcccacttacccctcgtgccgtgacagcgagaccttcagcaccttcctcctggacctgtttaagctgaccatcggcatgggcgacctggagatgctgagcagcaccaagtaccccgtggtcttcatcatcctgctggtgacctacatcatcctcacctttgtgctgctcctcaacatgctcattgccctcatgggcgagacagtgggccaggtctccaaggagagcaagcacatctggaagctgcag

SEQ ID NO: 1045 - DNA, 343 bp, Homo sapiens
tgagtgccacccctatcctcccacagccctggtctccctcctgaacccgtgtgccaacatgaaggtgtgcaatgaggaccagaccaactgcacagtgcccacttacccctcgtgccgtgacagcgagaccttcagcaccttcctcctggacctgtttaagctgaccatcggcatgggcgacctggagatgctgagcagcaccaagtaccccgtggtcttcatcatcctgctggtgacctacatcatcctcacctttgtgctgctcctcaacatgctcattgccctcatgggcgagacagtgggccaggtctccaaggagagcaagcacatctggaagctgcag

SEQ ID NO: 1046 - DNA, 3646 bp, Homo sapiens
gtgagctctgggtgctcaggtggtcctggcaggggtggtgcaaggacgggaacagtagccatgatgtataggggacaatagcagccttgctgagttcttttttttttttttttttttttgaggtggagttttgctcctgttgcccgggctggagtgcaatggcacaatctcagctcactgtaacctccacctcccaggttcaagtaattctgcctcagcctcccacgtagttgggattacgggctcctgccaccacgccccactattttttaatttttttttttttgtatttttagtagagatggggtttcaccatgttggccatgctggtcttgaactcctgacctcaggtgatccaccctccttggcctcccaaaatggtgggattacaggtgtgagccaacgcgcctggccactgagttcttatttgtgtgccaggcaccagactaagtacgtttccatccttgcctcccaacaagcctgtaagctaagtgcctttattatcccctattatagaaaaggaaactgaggcttaggagggttaaataactagcacaagttcaaaagccagtgaatggtggccgggcgcagtggctcacatctgtaatcccagcacttcaggaggctgaggcgggtagatcacttgaggtcaggagtttgagaccagcctggccaacatggcaaaaccccgtctctaccaaaaaatacaaaaattagacaggcatggtggcgcgcaactatagacccagctactcgggaggctgaggcacaagaatcgcttgaacccagggggtggaggttgcagtaagccaagatggcaccactgcactccagcctgggcaacacagcgagactctgtctcaaaaaaaaaaaaaaaaaaaaagctggtgaatggcaaaactggagtattagctattgctacaaaggaagccacctaaagtggggcttaaaatagcacccacttattattattattttttttgtggcaaggtctcactctgtcaccaaggctggagggcagtggtgctcttggctcactgcaatctctgcctcctgggttcaagcgattctcttgcctcagcctctcgaatagctgggattacaggcgtgtgccaccacgcatggctaagttttatatttttggtagagatggggtttcactatgttggccaggctggtctcgaactcctgaccccaagtgatccacccaccttggcctcccaaagtgctgggattacaggcgtgagccactgtaccaggccaacttactattgcttatgagtcaatgggtcagctgggtggctgtgctgccctgggccaggtttggctgatccctacaggctcttgtgcctgtggtcagctggcaggctggctgctggctgactggtctagctagtatggacttggttagagggggtttgctatctatcttccacatggtcactcatttctggacagctagcttgggcttgtccacatggtggccttagggttccaagaacatgagcagaagtgttcaaggacacctcctggcatggcatcactgctgccttactctgttggccaaagcaagtcacaaggccagcctcgattcaagggatggggaaatagacgccacttctttttttccattttttttttttggtggaggcagggtcttgctatgttgcccaggctggtcttgaactcctgggctcaagcagtcctcctgcctcagcctcccaaagtgcaggattataggcgcgagccactgcacctggcctagactccacttcttagtgggagaagctgtaaagccacattgaaggaggatggatacatggaaggataaaatttaataattaaactagcagcccaggtattttcttaaagcccaacatcagctcccttgatataccttcttcgtgatgtcatgatgccactaagaagcattctgggacctcagtggcatgggtcatgggagaaggaccagggaccagggctggagaaactgaccaagtccttgggctgatccccgaggtgtgggtaatctgacatcaatgcccagcatccaaaggggaatggccaactcaggttagacctggacacatacacatctgagcaggttcatctggggacgagcctggcacaggaatctgacaagggtgatattttaacccacgatagtggccaagtctctaggtagattattggtgggaagtggaattgtagttttcactggggagatagggacagggtacagctttcccttcccagggatcacactggacaaactagacagtgtcaagggttcaacaacagtttgggattcaggtcagggatctagccctactgcagtcctagttattgaaactaaggagaaacaagggttagagtagcagcttagcagtcagcttggttgcaggtcttctccttataggatgcactagatctcaattctgaggctgacatgacataaacaggacacacatgcttctgttcccacactttggtgtccatagcagacatcactaatggatcacagaacagtttttccggtgagtccagacaaggtctcagaatccttctcaacacagtgtttcaccaggtactatacaactgaagaacattagcatatgagttgaaatctgcatactctaatccctggttgcaggcagtatgacattctgtgccccactgactgatgggactgagtcttcttcatgctcccctccctggctggtttagggacaggttgttgctgccaaactgtgttgagaaggaatctgaagctccacctgggcttagtaggaaaggagaaccatgatgagtttgagatgtctagagcaggagaggccccttagagaacacggctttggggacagtcaggactgatgcctggtttcagcccccacttttcctctctgggttggggtggagtgggaaactgtcagagagagagtctacccctgcgaataggggcattccagagcccccaagacctctaagaatggtaggccgcattaggatttcccaacactattgacatttgagaccagatcattcttcgtggcggggaccatcctgtgcattgtagggtgtcaggcagcacccctggcctccacccacctgatgccagtagcacccccacccccagttgtaacaaccaaatatgtctctagacattgtcaaatgtcccctggtgggaaaaactgagaccctccctggactagatcctgaaaaccttttccctcccggtagcagggaaccaccaggttgtgtaaggaggggtgaactgtcccaggttggaaacagagcaggtcaaaactcctacgcttatcagtagtgggattgagcctgtgagtagccactgcactccagcctgggcaacatagcaagaccccatctcagaaagaaagagagagagagagagataacctcttccttatcagcaagagtttatggaaaggcttcaaaggttttgggatcaggaggacctgggtctggtgtggcttggctgatgtgtagggtgacatgggtcagcgtgtgggccagcgtgctccgctcactaggcctcagctttctcctccagcaaatgagaatgacaccctccacctctctgtgggtgtgctcacactcagtgagtgccacccctatcctcccacag

SEQ ID NO: 1047 - DNA, 3620 bp, Homo sapiens
gtgagctctgggtgctcaggtggtcctggcaggggtggtgcaaggacgggaacagtagccatgatgtataggggacaatagcagccttgctgagttcttttttttttttttttttttttgaggtggagttttgctcctgttgcccgggctggagtgcaatggcacaatctcagctcactgtaacctccacctcccaggttcaagtaattctgcctcagcctcccacgtagttgggattacgggctcctgccaccacgccccactattttttaatttttttttttttgtatttttagtagagatggggtttcaccatgttggccatgctggtcttgaactcctgacctcaggtgatccaccctccttggcctcccaaaatggtgggattacaggtgtgagccaacgcgcctggccactgagttcttatttgtgtgccaggcaccagactaagtacgtttccatccttgcctcccaacaagcctgtaagctaagtgcctttattatcccctattatagaaaaggaaactgaggcttaggagggttaaataactagcacaagttcaaaagccagtgaatggtggccgggcgcagtggctcacatctgtaatcccagcacttcaggaggctgaggcgggtagatcacttgaggtcaggagtttgagaccagcctggccaacatggcaaaaccccgtctctaccaaaaaatacaaaaattagacaggcatggtggcgcgcaactatagacccagctactcgggaggctgaggcacaagaatcgcttgaacccagggggtggaggttgcagtaagccaagatggcaccactgcactccagcctgggcaacacagcgagactctgtctcaaaaaaaaaaaaaaaaaaaaagctggtgaatggcaaaactggagtattagctattgctacaaaggaagccacctaaagtggggcttaaaatagcacccacttattattattattttttttgtggcaaggtctcactctgtcaccaaggctggagggcagtggtgctcttggctcactgcaatctctgcctcctgggttcaagcgattctcttgcctcagcctctcgaatagctgggattacaggcgtgtgccaccacgcatggctaagttttatatttttggtagagatggggtttcactatgttggccaggctggtctcgaactcctgaccccaagtgatccacccaccttggcctcccaaagtgctgggattacaggcgtgagccactgtaccaggccaacttactattgcttatgagtcaatgggtcagctgggtggctgtgctgccctgggccaggtttggctgatccctacaggctcttgtgcctgtggtcagctggcaggctggctgctggctgactggtctagctagtatggacttggttagagggggtttgctatctatcttccacatggtcactcatttctggacagctagcttgggcttgtccacatggtggccttagggttccaagaacatgagcagaagtgttcaaggacacctcctggcatggcatcactgctgccttactctgttggccaaagcaagtcacaaggccagcctcgattcaagggatggggaaatagacgccacttctttttttccattttttttttttggtggaggcagggtcttgctatgttgcccaggctggtcttgaactcctgggctcaagcagtcctcctgcctcagcctcccaaagtgcaggattataggcgcgagccactgcacctggcctagactccacttcttagtgggagaagctgtaaagccacattgaaggaggatggatacatggaaggataaaatttaataattaaactagcagcccaggtattttcttaaagcccaacatcagctcccttgatataccttcttcgtgatgtcatgatgccactaagaagcattctgggacctcagtggcatgggtcatgggagaaggaccagggaccagggctggagaaactgaccaagtccttgggctgatccccgaggtgtgggtaatctgacatcaatgcccagcatccaaaggggaatggccaactcaggttagacctggacacatacacatctgagcaggttcatctggggacgagcctggcacaggaatctgacaagggtgatattttaacccacgatagtggccaagtctctaggtagattattggtgggaagtggaattgtagttttcactggggagatagggacagggtacagctttcccttcccagggatcacactggacaaactagacagtgtcaagggttcaacaacagtttgggattcaggtcagggatctagccctactgcagtcctagttattgaaactaaggagaaacaagggttagagtagcagcttagcagtcagcttggttgcaggtcttctccttataggatgcactagatctcaattctgaggctgacatgacataaacaggacacacatgcttctgttcccacactttggtgtccatagcagacatcactaatggatcacagaacagtttttccggtgagtccagacaaggtctcagaatccttctcaacacagtgtttcaccaggtactatacaactgaagaacattagcatatgagttgaaatctgcatactctaatccctggttgcaggcagtatgacattctgtgccccactgactgatgggactgagtcttcttcatgctcccctccctggctggtttagggacaggttgttgctgccaaactgtgttgagaaggaatctgaagctccacctgggcttagtaggaaaggagaaccatgatgagtttgagatgtctagagcaggagaggccccttagagaacacggctttggggacagtcaggactgatgcctggtttcagcccccacttttcctctctgggttggggtggagtgggaaactgtcagagagagagtctacccctgcgaataggggcattccagagcccccaagacctctaagaatggtaggccgcattaggatttcccaacactattgacatttgagaccagatcattcttcgtggcggggaccatcctgtgcattgtagggtgtcaggcagcacccctggcctccacccacctgatgccagtagcacccccacccccagttgtaacaaccaaatatgtctctagacattgtcaaatgtcccctggtgggaaaaactgagaccctccctggactagatcctgaaaaccttttccctcccggtagcagggaaccaccaggttgtgtaaggaggggtgaactgtcccaggttggaaacagagcaggtcaaaactcctacgcttatcagtagtgggattgagcctgtgagtagccactgcactccagcctgggcaacatagcaagaccccatctcagaaagaaagagagagagagagagataacctcttccttatcagcaagagtttatggaaaggcttcaaaggttttgggatcaggaggacctgggtctggtgtggcttggctgatgtgtagggtgacatgggtcagcgtgtgggccagcgtgctccgctcactaggcctcagctttctcctccagcaaatgagaatgacaccctccacctctctgtgggtgtgctcacactcag

SEQ ID NO: 1048 - DNA, 128 bp, Homo sapiens
cgctcgcctggttctcgaggcccgctgcggcagaggaggaggagcagcagggagccgacggggccgctgccgaggacggggcggacgaggccgaggcagagatcatccagctgctgaagcgagccaag

SEQ ID NO: 1049 - DNA, 265 bp, Homo sapiens
cgctcgcctggttctcgaggcccgctgcggcagaggaggaggagcagcagggagccgacggggccgctgccgaggacggggcggacgaggccgaggcagagatcatccagctgctgaagcgagccaaggtgaggcggctccgggccctgcgcccggccgagcgcggtagcctttgtgagcggggtcttggcgttgctgcgcattactctctccgcctcgccgaagagtggatggaggctccgcgggtaaaattgccgagaatgag

SEQ ID NO: 1050 - DNA, 1669 bp, Homo sapiens
gtgaggcggctccgggccctgcgcccggccgagcgcggtagcctttgtgagcggggtcttggcgttgctgcgcattactctctccgcctcgccgaagagtggatggaggctccgcgggtaaaattgccgagaatgaggtgggtcatccgagaggggattggaatccatccaggcttttccgactctaaggcctgcagtaaaacctctgcagtgtcaagtgcaaatggagatggcgccctaggcatcacgctttatgcaaacgaaatatcgggaacgttttgtagtggttttatcaattaaccagcctatctgaaatgacataatttcgcacgtatatagcggcctgaaaatggcaacttagtgttggttatgcggttcggttctcctcctgaattcttccttttctccacatccttttctatttttttttcctcctcttttcccaagttatctcatctcttccattgagctaaatacctactcgatgccaacaacgtccaaatttgtatttccattctgtagtgtgctactgacatgccatttgcactttaggaccatacctacctctcagatttaacatgcccaaaactaaacgatctttaatgcctcctcaacatacgctttcgccatctctttactaccatcagtttttcagcctaaaaacctcatagtcattcttaaaacttgtggtaccttaccattgccttccaatacacttacagtccagcaacaagtcctgttgccaacaaatgcaaaatatttctcaaatctttccccttttgtctatctcccttgctgtcaccctagtgcaaaccatcattgccaccaactatgctccagtagtctttcctggcctcctggcctcttgcaatctattctccatgcagaaaccaaagcgaccaaaaaaaaaaagagtaaattggattatgtcatctccttgtcagaaagctctgaatggctacccactgcatttatgataaaatacaaactccttgccttggcttgcaacaccccacatgatctaaaccagcatataccttgcccacccatttggcagtaatcctctggctcaccatcctcccttcacatctatttctttgcatttcttcctcaaaaccattctcttcagcttgtagggacttcactcattctctaccctctgtttgagtcattgttctccccaggtccttatttggttgactcattctcatccttactacctcagtttagctgtcacttccttggaaggcttccctaagtcctatttagaggagaccccttatcattcctttctgtcatctttatagctcttatcattagttgtaattaagcttacttgtcctatatggtcacctccagcctgcaagaaattagaaagaggatggaggacaagcagcttccttataaaatatgttgtaagatcacattccttctgcctgtgtctcttggccaaaacttcatcagatggccacacctagctgcaagggaggctgacctccctgtcatctctgtagacaatgctttgtacatagtaggaattcagtaaatgtctgatgaatgagttagcttccttctatcagttgggatgtacagttgcatacacttctgtctcttagcatatgcatctactatatgtttcattttctattattttgtcttcccttttcag

SEQ ID NO: 1051 - DNA, 1532 bp, Homo sapiens
gtgggtcatccgagaggggattggaatccatccaggcttttccgactctaaggcctgcagtaaaacctctgcagtgtcaagtgcaaatggagatggcgccctaggcatcacgctttatgcaaacgaaatatcgggaacgttttgtagtggttttatcaattaaccagcctatctgaaatgacataatttcgcacgtatatagcggcctgaaaatggcaacttagtgttggttatgcggttcggttctcctcctgaattcttccttttctccacatccttttctatttttttttcctcctcttttcccaagttatctcatctcttccattgagctaaatacctactcgatgccaacaacgtccaaatttgtatttccattctgtagtgtgctactgacatgccatttgcactttaggaccatacctacctctcagatttaacatgcccaaaactaaacgatctttaatgcctcctcaacatacgctttcgccatctctttactaccatcagtttttcagcctaaaaacctcatagtcattcttaaaacttgtggtaccttaccattgccttccaatacacttacagtccagcaacaagtcctgttgccaacaaatgcaaaatatttctcaaatctttccccttttgtctatctcccttgctgtcaccctagtgcaaaccatcattgccaccaactatgctccagtagtctttcctggcctcctggcctcttgcaatctattctccatgcagaaaccaaagcgaccaaaaaaaaaaagagtaaattggattatgtcatctccttgtcagaaagctctgaatggctacccactgcatttatgataaaatacaaactccttgccttggcttgcaacaccccacatgatctaaaccagcatataccttgcccacccatttggcagtaatcctctggctcaccatcctcccttcacatctatttctttgcatttcttcctcaaaaccattctcttcagcttgtagggacttcactcattctctaccctctgtttgagtcattgttctccccaggtccttatttggttgactcattctcatccttactacctcagtttagctgtcacttccttggaaggcttccctaagtcctatttagaggagaccccttatcattcctttctgtcatctttatagctcttatcattagttgtaattaagcttacttgtcctatatggtcacctccagcctgcaagaaattagaaagaggatggaggacaagcagcttccttataaaatatgttgtaagatcacattccttctgcctgtgtctcttggccaaaacttcatcagatggccacacctagctgcaagggaggctgacctccctgtcatctctgtagacaatgctttgtacatagtaggaattcagtaaatgtctgatgaatgagttagcttccttctatcagttgggatgtacagttgcatacacttctgtctcttagcatatgcatctactatatgtttcattttctattattttgtcttcccttttcag

SEQ ID NO: 1052 - DNA, 119 bp, Homo sapiens
cctccattctcagtaagaaactcgtggaggggctgtccgctctggtggtggacgttaagttcggaggggccgccgtcttccccaaccaggagcaggcccgggagctggcaaagacgctg

SEQ ID NO: 1053 - DNA, 164 bp, Homo sapiens
ctccaggttctccattgtctccaacctcctctgcctcccccaaagcctccattctcagtaagaaactcgtggaggggctgtccgctctggtggtggacgttaagttcggaggggccgccgtcttccccaaccaggagcaggcccgggagctggcaaagacgctg

SEQ ID NO: 1054 - DNA, 386 bp, Homo sapiens
cctccattctcagtaagaaactcgtggaggggctgtccgctctggtggtggacgttaagttcggaggggccgccgtcttccccaaccaggagcaggcccgggagctggcaaagacgctggtgagcggtgtggcctttccctgggcaagcgtcttgatgcgggcccagcctacccttcacccctcccgtccccactgcctccctccactcagcagtcctgcctaaccccagtcccaccctcttctgcccgaagtccctccctccttcacggcttcctaacctgctgtgactttagaggtcaaggctggcccggcctggacctggggaagccctctgtggcgttcctgccccagaccaagtacaagttcctcctggccccatggcgag

SEQ ID NO: 1055 - DNA, 431 bp, Homo sapiens
ctccaggttctccattgtctccaacctcctctgcctcccccaaagcctccattctcagtaagaaactcgtggaggggctgtccgctctggtggtggacgttaagttcggaggggccgccgtcttccccaaccaggagcaggcccgggagctggcaaagacgctggtgagcggtgtggcctttccctgggcaagcgtcttgatgcgggcccagcctacccttcacccctcccgtccccactgcctccctccactcagcagtcctgcctaaccccagtcccaccctcttctgcccgaagtccctccctccttcacggcttcctaacctgctgtgactttagaggtcaaggctggcccggcctggacctggggaagccctctgtggcgttcctgccccagaccaagtacaagttcctcctggccccatggcgag

SEQ ID NO: 1056 - DNA, 426 bp, Homo sapiens
gtgagcggtgtggcctttccctgggcaagcgtcttgatgcgggcccagcctacccttcacccctcccgtccccactgcctccctccactcagcagtcctgcctaaccccagtcccaccctcttctgcccgaagtccctccctccttcacggcttcctaacctgctgtgactttagaggtcaaggctggcccggcctggacctggggaagccctctgtggcgttcctgccccagaccaagtacaagttcctcctggccccatggcgaggtgtcgcacttcactcgtgtctcttccccaccccaatccttccctgacttcatgctggggggctggcaacccagggtgcagcaggggctggagttcgaccaagaaccggctgcagaaggccccgccatggggggtccacgctgagcctcctctccgcag

SEQ ID NO: 1057 - DNA, 159 bp, Homo sapiens
gtgtcgcacttcactcgtgtctcttccccaccccaatccttccctgacttcatgctggggggctggcaacccagggtgcagcaggggctggagttcgaccaagaaccggctgcagaaggccccgccatggggggtccacgctgagcctcctctccgcag

SEQ ID NO: 1058 - DNA, 672 bp, Homo sapiens
gaactaagcgtcttgtagaaggaactattaatccaggagaaacctgtttaatcattgaagatgttgtcaccagtggatctagtgttttggaaactgttgaggttcttcagaaggagggcttgaaggtcactgatgccatagtgctgttggacagagagcagggaggcaaggacaagttgcaggcgcacgggatccgcctccactcagtgtgtacattgtccaaaatgctggagattctcgagcagcagaaaaaagttgatgctgagacagttgggagagtgaagaggtttattcaggagaatgtctttgtggcagcgaatcataatggttctcccctttctataaaggaagcacccaaagaactcagcttcggtgcacgtgcagagctgcccaggatccacccagttgcatcgaagcttctcaggcttatgcaaaagaaggagaccaatctgtgtctatctgctgatgtttcactggccagagagctgttgcagctagcagatgctttaggacctagtatctgcatgctgaagactcatgtagatattttgaatgattttactctggatgtgatgaaggagttgataactctggcaaaatgccatgagttcttgatatttgaagaccggaagtttgcagatataggaaacacagtgaaaaagcagtatgaag

SEQ ID NO: 1059 - DNA, 876 bp, Homo sapiens
gaactaagcgtcttgtagaaggaactattaatccaggagaaacctgtttaatcattgaagatgttgtcaccagtggatctagtgttttggaaactgttgaggttcttcagaaggagggcttgaaggtcactgatgccatagtgctgttggacagagagcagggaggcaaggacaagttgcaggcgcacgggatccgcctccactcagtgtgtacattgtccaaaatgctggagattctcgagcagcagaaaaaagttgatgctgagacagttgggagagtgaagaggtttattcaggagaatgtctttgtggcagcgaatcataatggttctcccctttctataaaggaagcacccaaagaactcagcttcggtgcacgtgcagagctgcccaggatccacccagttgcatcgaagcttctcaggcttatgcaaaagaaggagaccaatctgtgtctatctgctgatgtttcactggccagagagctgttgcagctagcagatgctttaggacctagtatctgcatgctgaagactcatgtagatattttgaatgattttactctggatgtgatgaaggagttgataactctggcaaaatgccatgagttcttgatatttgaagaccggaagtttgcagatataggaaacacagtgaaaaagcagtatgaaggtaagtgtattattcaggaatctgcaagaatcagaaatccagcttaaactgaagaagaaaaaggaaatgctcatgtcattgaaagtccattcatagagcaggctgtcaagcgtggttggatccaggagctcaagtgatatcttcatgacttgctttctctccatctctcagctctgctttcttctctgttgacttctttctcag

SEQ ID NO: 1060 - DNA, 1784 bp, Homo sapiens
gtaagtgtattattcaggaatctgcaagaatcagaaatccagcttaaactgaagaagaaaaaggaaatgctcatgtcattgaaagtccattcatagagcaggctgtcaagcgtggttggatccaggagctcaagtgatatcttcatgacttgctttctctccatctctcagctctgctttcttctctgttgacttctttctcaggtaggcatactctgcatgctcaccccaaaccaatcactctagcttgggatgtagaataccttcattaactagcctgggcaatttgctctgcaactgtgaggttgttaactctgtatgaccttcttgaaataagaaccagtcagggataatttccttaaagaaaatggatgtgctagtaccagaagaagggtatgtgcctgggcaagcaaatttgacagatgtccttggcagaatatgatgttttgaatgaaaattccacataaaggaaacaatgaaaaagaaatataaaatggtaagatttatttgtagcagaaaaagttctattgataaacattatttaaagatttttcttttatcaaatagggactcaaagtagtgcatgtgttggttgagaaaaatgcttagttctactgcctattctatgcaaatttctgtctatgtttttacaactgtgtgatcagactatatttaatgcatttttcacttaacctggtaacagatatttggttgtgtcatataacattttttgtaggcatctttgaggtaacttttctttaatgtatgcatgttcataagctatttctttaaaatagatttgtctttaagtgacttcttcatgtgcttaagatgtcctgccctcatcacattgcctagcttactttagctgattgactgacataagagttttatacaaactttcttcagctctgcatagagttttttcgaaaatcaggcttgttactgtccgcttttaaaaggaatatagttgcctattgaaattagatagctaaggagatctaaggaacacgtagaaatattgagcgatagtaaagctgctgagagacccctgcagagtgaaaacttgtcatcttcaagaagaattttatttttattattattttttttgagatggggtcttgctctgtcgcccaggctggagtgcagtggtgcaatcttgactcactgcaacctccacctcctgggctcaagtgatcctcccacctcagcctcccaagtagctgggaccacaggcatgcgccaccacacctagctaatttttttgtatttttggtagagatggagttttgccatgttgcccaggctggtctcgaactcctaaactcaagcaatctgcccacctcagcctcccaaagtactgggattacaagcatgagccaccatgcccagcttcaagaggaatttttaaatgttatccttgacatcaataaatgtttatcttcactggagtccctttctaatagcatgagctttatttgtggtcatgagcttcagccttcaaggaaaaagagtcctgttagtgttccagataagccaagtgcagaccttgaaagttttttctcattgtgatctctcacccagctacttacctgaataacagatacagttttcacagatggaaccatgggtctgctgataatcactaaagttcctgaagagttttgattctctcattaacatgttactgggagattatttcatattgtagttggttggttggacaagacgttagaggttttgtttgaaaatcagcaaatatcttttttcccccttcttcttag

SEQ ID NO: 1061 - DNA, 1580 bp, Homo sapiens
gtaggcatactctgcatgctcaccccaaaccaatcactctagcttgggatgtagaataccttcattaactagcctgggcaatttgctctgcaactgtgaggttgttaactctgtatgaccttcttgaaataagaaccagtcagggataatttccttaaagaaaatggatgtgctagtaccagaagaagggtatgtgcctgggcaagcaaatttgacagatgtccttggcagaatatgatgttttgaatgaaaattccacataaaggaaacaatgaaaaagaaatataaaatggtaagatttatttgtagcagaaaaagttctattgataaacattatttaaagatttttcttttatcaaatagggactcaaagtagtgcatgtgttggttgagaaaaatgcttagttctactgcctattctatgcaaatttctgtctatgtttttacaactgtgtgatcagactatatttaatgcatttttcacttaacctggtaacagatatttggttgtgtcatataacattttttgtaggcatctttgaggtaacttttctttaatgtatgcatgttcataagctatttctttaaaatagatttgtctttaagtgacttcttcatgtgcttaagatgtcctgccctcatcacattgcctagcttactttagctgattgactgacataagagttttatacaaactttcttcagctctgcatagagttttttcgaaaatcaggcttgttactgtccgcttttaaaaggaatatagttgcctattgaaattagatagctaaggagatctaaggaacacgtagaaatattgagcgatagtaaagctgctgagagacccctgcagagtgaaaacttgtcatcttcaagaagaattttatttttattattattttttttgagatggggtcttgctctgtcgcccaggctggagtgcagtggtgcaatcttgactcactgcaacctccacctcctgggctcaagtgatcctcccacctcagcctcccaagtagctgggaccacaggcatgcgccaccacacctagctaatttttttgtatttttggtagagatggagttttgccatgttgcccaggctggtctcgaactcctaaactcaagcaatctgcccacctcagcctcccaaagtactgggattacaagcatgagccaccatgcccagcttcaagaggaatttttaaatgttatccttgacatcaataaatgtttatcttcactggagtccctttctaatagcatgagctttatttgtggtcatgagcttcagccttcaaggaaaaagagtcctgttagtgttccagataagccaagtgcagaccttgaaagttttttctcattgtgatctctcacccagctacttacctgaataacagatacagttttcacagatggaaccatgggtctgctgataatcactaaagttcctgaagagttttgattctctcattaacatgttactgggagattatttcatattgtagttggttggttggacaagacgttagaggttttgtttgaaaatcagcaaatatcttttttcccccttcttcttag

SEQ ID NO: 1062 - DNA, 113 bp, Homo sapiens
acctcagggttttccggagctgaagaatgacacattcctgcgagcagcctggggagaggaaacagactacactcccgtttggtgcatgcgccaggcaggccgttacttaccag

SEQ ID NO: 1063 - DNA, 163 bp, Homo sapiens
cctccagcgtagcatactgacacctacccccacccccacctgatcgccagacctcagggttttccggagctgaagaatgacacattcctgcgagcagcctggggagaggaaacagactacactcccgtttggtgcatgcgccaggcaggccgttacttaccag

SEQ ID NO: 1064 - DNA, 621 bp, Homo sapiens
gtgagttctccagagcacgcggtgtggctagccgggcttctaatttgagtcttccaactcaggactctatccctctactcccctttccccaccctggagacctcccaacctgaactccgttagctgggatcctgaatcctaaaaccatggatttttgagatgttcatcccagggccttaattcaagggatgcctcaggatttccaaccaggatctctattctgggaccatcaactctgatccctctttatcccccagcctgggtatttctcagcccctgaaccagcccagtgacattcccgtttctgaggctcactagttcgaagacccccaaactatccttagtgggccttcattccctccccccagtccctctggttgcttcgagcttggaagagtagagactaagtggagggaagaggccccagggcgggcccttctggagtttgtgcaccacctgataggcagagaggaggcggaacgggcggaaagccagggtttgggagctggcctggaggaggtagatagcggtcctggactgaatcggccttatgaacccgcgctttccccagcctccagcgtagcatactgacacctacccccacccccacctgatcgccag

SEQ ID NO: 1065 - DNA, 571 bp, Homo sapiens
gtgagttctccagagcacgcggtgtggctagccgggcttctaatttgagtcttccaactcaggactctatccctctactcccctttccccaccctggagacctcccaacctgaactccgttagctgggatcctgaatcctaaaaccatggatttttgagatgttcatcccagggccttaattcaagggatgcctcaggatttccaaccaggatctctattctgggaccatcaactctgatccctctttatcccccagcctgggtatttctcagcccctgaaccagcccagtgacattcccgtttctgaggctcactagttcgaagacccccaaactatccttagtgggccttcattccctccccccagtccctctggttgcttcgagcttggaagagtagagactaagtggagggaagaggccccagggcgggcccttctggagtttgtgcaccacctgataggcagagaggaggcggaacgggcggaaagccagggtttgggagctggcctggaggaggtagatagcggtcctggactgaatcggccttatgaacccgcgctttccccag

SEQ ID NO: 1066 - DNA, 145 bp, Homo sapiens
acagtgtccgccgcttcctggttgcgggtcagcgcccaggtcctgggctggccgccgggatgttgccctacacagtgaacttcaaggtgtcggcgcgcaccctcacgggggccctcaacgcccacaacaaggcggcggtggactg

SEQ ID NO: 1067 - DNA, 166 bp, Homo sapiens
acagtgtccgccgcttcctggttgcgggtcagcgcccaggtcctgggctggccgccgggatgttgccctacacagtgaacttcaaggtgtcggcgcgcaccctcacgggggccctcaacgcccacaacaaggcggcggtggactggtgaggacgccgagcttccag

SEQ ID NO: 1068 - DNA, 1017 bp, Homo sapiens
gtgaggacgccgagcttccaggtcgccaggatcggccaggaatgtgtgagggggaagggggaaggacaagaggtttcaccccctggttagtttggcctcgctaaggcagggagccgccctcacgcaatgagcttgctttcagttggtggatttttgttgttacaaaagtgataatagccccgtgtgggaaattcccccatgcaaatacatttcccctctttctcgcgtatttctctgctgttttctctgcacctcgcccttttgccgttccattcctctctcttttcctctcctccagcttccaggcttctctctctccaccattaattccctgtgcactttctctttcccatcctgtcttttctttttcgttgtcttgtattcctgttgtctttcaacaatgtgccagaccctgtgctaggcgcctgttctttcacctgtccttttcacctcttttcgggctcctcctgtgtagaacattcctgccttcaacaggtcgtctttattactctctcctttcactataaattactactgcagctctgaaaactactcattagacaaatgtaaagcaaaattctgtggctgtgggatgttgttaggaggactgaaacgtcttgtgcagtgtttgtcgttttatttagttggaaggactaggattagtcgcagtatccccaggcacattgtggatactaaggattagaaatcggataagcgaaagacgtatgcctacaagaacagtcagagggcacaagttcctttttatgtcctcgggtctctattttcatatcttttagaactttttttatccgaatgaaaagtgaatttcaacaagcattttaagcttagccagatcttttatttaagtgggataatgataaatactggcctttgggtttaaatgattttattaatggtggtacatatgaattagacttatcatttatttaggcttggcaagaaagaagtcgtcctgctttgttctgtacttaaactttaacattactgttttgctag

SEQ ID NO: 1069 - DNA, 996 bp, Homo sapiens
gtcgccaggatcggccaggaatgtgtgagggggaagggggaaggacaagaggtttcaccccctggttagtttggcctcgctaaggcagggagccgccctcacgcaatgagcttgctttcagttggtggatttttgttgttacaaaagtgataatagccccgtgtgggaaattcccccatgcaaatacatttcccctctttctcgcgtatttctctgctgttttctctgcacctcgcccttttgccgttccattcctctctcttttcctctcctccagcttccaggcttctctctctccaccattaattccctgtgcactttctctttcccatcctgtcttttctttttcgttgtcttgtattcctgttgtctttcaacaatgtgccagaccctgtgctaggcgcctgttctttcacctgtccttttcacctcttttcgggctcctcctgtgtagaacattcctgccttcaacaggtcgtctttattactctctcctttcactataaattactactgcagctctgaaaactactcattagacaaatgtaaagcaaaattctgtggctgtgggatgttgttaggaggactgaaacgtcttgtgcagtgtttgtcgttttatttagttggaaggactaggattagtcgcagtatccccaggcacattgtggatactaaggattagaaatcggataagcgaaagacgtatgcctacaagaacagtcagagggcacaagttcctttttatgtcctcgggtctctattttcatatcttttagaactttttttatccgaatgaaaagtgaatttcaacaagcattttaagcttagccagatcttttatttaagtgggataatgataaatactggcctttgggtttaaatgattttattaatggtggtacatatgaattagacttatcatttatttaggcttggcaagaaagaagtcgtcctgctttgttctgtacttaaactttaacattactgttttgctag

SEQ ID NO: 1070 - DNA, 171 bp, Homo sapiens
aatgggcataggcctgctgtgcgcatctgggatgtggaggagaagaatcaggtggcggagatgctaggccacaagtatggtgtggcgtgtgtggccttctcacccaatatgaagcacatcgtgtccatgggctaccaacatgacatggtgctcaacgtctgggactggaag

SEQ ID NO: 1071 - DNA, 241 bp, Homo sapiens
gtgagtcgtgatcgtgactgagtgggagtcgggggctggggggtcttggaagccattccttctgctcccggcaggcctgggagtccctggaatagctccttcctgggccagaacagccctgtagcagatgggggaggtggcttttgggcacatcctgtggcaatgccatcttcggccttgacaaccctctagccctgcccagtacagagcccagcagcagtaacgaccccaccttccctag

SEQ ID NO: 1072 - DNA, 220 bp, Homo sapiens
ccctgcccagtacagagcccagcagcagtaacgaccccaccttccctagaatgggcataggcctgctgtgcgcatctgggatgtggaggagaagaatcaggtggcggagatgctaggccacaagtatggtgtggcgtgtgtggccttctcacccaatatgaagcacatcgtgtccatgggctaccaacatgacatggtgctcaacgtctgggactggaag

SEQ ID NO: 1073 - DNA, 192 bp, Homo sapiens
gtgagtcgtgatcgtgactgagtgggagtcgggggctggggggtcttggaagccattccttctgctcccggcaggcctgggagtccctggaatagctccttcctgggccagaacagccctgtagcagatgggggaggtggcttttgggcacatcctgtggcaatgccatcttcggccttgacaaccctctag

SEQ ID NO: 1074 - DNA, 71 bp, Homo sapiens
ggcacagtcatccgggtgttctctgtccctgatgggcaaaagctctatgagttccggagagggatgaaaag

SEQ ID NO: 1075 - DNA, 207 bp, Homo sapiens
ggcacagtcatccgggtgttctctgtccctgatgggcaaaagctctatgagttccggagagggatgaaaaggtctgtgttcaatgtcaaacccattttaaagtccccgcagaagtcccgcagggaccgctggcagctgtctagggagaggacagagagtggctctgtgccctccactcacctggaggaagtgtaactactctcccag

SEQ ID NO: 1076 - DNA, 980 bp, Homo sapiens
gtctgtgttcaatgtcaaacccattttaaagtccccgcagaagtcccgcagggaccgctggcagctgtctagggagaggacagagagtggctctgtgccctccactcacctggaggaagtgtaactactctcccaggtaattgactcccaggctttacttagggctcagcaaaactgaaagccgagatgctgttttaacacagttcagccgtgagagtccctttttgatgtgtgtgtgggcggccggcacaggagaaatgagagagccagggagtcacaatccaaaaataatttctgatttccttccatggaaataaaggacgatgtaaagtgtgactgtttgggatcttatcggatgtaggtttgcagccagatcagtgcacagagcaactggaagattccaagatgccaggaaggcacagttcctcccttctgctgacagaggcagggctataccttgtttcttctcacataaataagactatgggccgggcgcggtggctcacgtctgtaatcccagcactctgggaggccaaggcaggcagatcacctgaggaccagcctggccaacatggtgaaacaccgtctctactaaaaatacaaaaattagctgggtgtggtggtgtgtgcctgtaatcccagctacttgggaggctgaggcaggagaatcgcttgaacccaggaggtagaggttgcagtgagttgagatcaagccaccgtactccagcctgggcaacagagcgagagactctgtctcaaaaaaaaaaaaaaaaaaaaaaaaaaaaaaaaaaaaaactatgaccctttgtgaatctttctgacattaatttctaaatatgagcaccacagtgtttaagggatctgggtctacctaggctcttcaggatacatctgattttcttataaagctgatctctgagttataaggccataactcccatttctcttgctcactgacccatgtgttgctgtgcttgtag

SEQ ID NO: 1077 - DNA, 844 bp, Homo sapiens
gtaattgactcccaggctttacttagggctcagcaaaactgaaagccgagatgctgttttaacacagttcagccgtgagagtccctttttgatgtgtgtgtgggcggccggcacaggagaaatgagagagccagggagtcacaatccaaaaataatttctgatttccttccatggaaataaaggacgatgtaaagtgtgactgtttgggatcttatcggatgtaggtttgcagccagatcagtgcacagagcaactggaagattccaagatgccaggaaggcacagttcctcccttctgctgacagaggcagggctataccttgtttcttctcacataaataagactatgggccgggcgcggtggctcacgtctgtaatcccagcactctgggaggccaaggcaggcagatcacctgaggaccagcctggccaacatggtgaaacaccgtctctactaaaaatacaaaaattagctgggtgtggtggtgtgtgcctgtaatcccagctacttgggaggctgaggcaggagaatcgcttgaacccaggaggtagaggttgcagtgagttgagatcaagccaccgtactccagcctgggcaacagagcgagagactctgtctcaaaaaaaaaaaaaaaaaaaaaaaaaaaaaaaaaaaaaactatgaccctttgtgaatctttctgacattaatttctaaatatgagcaccacagtgtttaagggatctgggtctacctaggctcttcaggatacatctgattttcttataaagctgatctctgagttataaggccataactcccatttctcttgctcactgacccatgtgttgctgtgcttgtag

SEQ ID NO: 1078 - DNA, 91 bp, Homo sapiens
cgtggccagcagcagccgggagaacccgattcatatctgggacgcattcactggagagctccgggcttcctttcgcgcctacaaccacctg

SEQ ID NO: 1079 - DNA, 123 bp, Homo sapiens
caccggggtttcagtgtccatgtctctctcagcgtggccagcagcagccgggagaacccgattcatatctgggacgcattcactggagagctccgggcttcctttcgcgcctacaaccacctg

SEQ ID NO: 1080 - DNA, 629 bp, Homo sapiens
gtaagtaatgtttgcctccctgctcgccgccccaccacccagtttcaagcagggcctcttgggagagtcaagggctgccaggggtctttggaggaggaaggcttggcatgcttatcagaggggctggtcagttggcttcctccccttcctttttttttttttagattgagtctccctctgtcacccaggctggagggcggtgatgcagtctcagctcactgcaacctccgcctcccaggttgaagtgattctcctgcctcagcctcctgagtagctgggattacaggtgtgcaccaccacacccagctaattgtgtatttttcatagagatggggtttcaccacgttggccaggctggtctcgaactgacctcaggtgatccacctgccttggcctcctgaagtgcttggattacaggcatgagccaccacacccagcctcatttttgtatttttagtagagacagggtttcaccatgttggccaggctggtctcgaactcctgacctcaagtgatccacctgccttggcctcccaaagtgctgggattacaggcatgagccactgtgcccggccattcctccccttcctttgacagcaccggggtttcagtgtccatgtctctctcag

SEQ ID NO: 1081 - DNA, 597 bp, Homo sapiens
gtaagtaatgtttgcctccctgctcgccgccccaccacccagtttcaagcagggcctcttgggagagtcaagggctgccaggggtctttggaggaggaaggcttggcatgcttatcagaggggctggtcagttggcttcctccccttcctttttttttttttagattgagtctccctctgtcacccaggctggagggcggtgatgcagtctcagctcactgcaacctccgcctcccaggttgaagtgattctcctgcctcagcctcctgagtagctgggattacaggtgtgcaccaccacacccagctaattgtgtatttttcatagagatggggtttcaccacgttggccaggctggtctcgaactgacctcaggtgatccacctgccttggcctcctgaagtgcttggattacaggcatgagccaccacacccagcctcatttttgtatttttagtagagacagggtttcaccatgttggccaggctggtctcgaactcctgacctcaagtgatccacctgccttggcctcccaaagtgctgggattacaggcatgagccactgtgcccggccattcctccccttcctttgacag

SEQ ID NO: 1082 - DNA, 164 bp, Homo sapiens
agacccatgatggagtccaggatatggcttgtgatactttcattaaaatagcccaaaaatgccgcaggcatttcgttcaggttcaggttggagaagtgatgccatttattgatgaaattttgaacaacattaacactattatttgtgatcttcagcctcaacag

SEQ ID NO: 1083 - DNA, 216 bp, Homo sapiens
agacccatgatggagtccaggacaaaataaatgaatatttttgtcttgttagagacccatgatggagtccaggatatggcttgtgatactttcattaaaatagcccaaaaatgccgcaggcatttcgttcaggttcaggttggagaagtgatgccatttattgatgaaattttgaacaacattaacactattatttgtgatcttcagcctcaacag

SEQ ID NO: 1084 - DNA, 126 bp, Homo sapiens
gtaaatctctttctttactatattttgcttttatttttattgaagaaaataaatgaatgtttttgtcttgttagagacccatgatggagtccaggacaaaataaatgaatatttttgtcttgttag

SEQ ID NO: 1085 - DNA, 74 bp, Homo sapiens
gtaaatctctttctttactatattttgcttttatttttattgaagaaaataaatgaatgtttttgtcttgttag

SEQ ID NO: 1086 - DNA, 71 bp, Homo sapiens
cctcgatcccctcgccgcggtcccatggaggaggaggcgagccgcagcgccgcggcgacgaacccagggag

SEQ ID NO: 1087 - DNA, 422 bp, Homo sapiens
cctcgatcccctcgccgcggtcccatggaggaggaggcgagccgcagcgccgcggcgacgaacccagggaggtaggttgtcatgggactcggccggccaccctggcaattccagtcaaacggcaagccagactcgctttgccggtcccttcctctcctgcccctgcagccgccaggaatggaacagtcccgcggtggggactgtgggaggcgcacgcgcgaggagtgtagggtgggggtgctggcggcggctgctttggcggcggttggtggccgtgcgggcggggagggagggggaggagagaagaggaggtggagaaggcttgggctcgcgccgctgaaggtacgcgtgagggcctgcgctggagccggcttgacagggtctgagggggagtggagaactgggcgaggaggttcccgtgg

SEQ ID NO: 1088 - DNA, 728 bp, Homo sapiens
gtaggttgtcatgggactcggccggccaccctggcaattccagtcaaacggcaagccagactcgctttgccggtcccttcctctcctgcccctgcagccgccaggaatggaacagtcccgcggtggggactgtgggaggcgcacgcgcgaggagtgtagggtgggggtgctggcggcggctgctttggcggcggttggtggccgtgcgggcggggagggagggggaggagagaagaggaggtggagaaggcttgggctcgcgccgctgaaggtacgcgtgagggcctgcgctggagccggcttgacagggtctgagggggagtggagaactgggcgaggaggttcccgtgggtgagcgcgtacgggatggctggctcgcaggacggccgaaggtggtggttggtgggagcagccagcgacgagcccgtagacactcgtacgcgtgcgggctgacgtgcgcgctacatggccggagtcgggcgaagcgggggaccgtggggaagaacgcgaggagggaggagtgggaggttgggggtgtcgctaggcgcccttagctccctccctctggaggagctgccgcggccactctgctgccgccgctgccgccgccattttgggttcgctttgcgaggggaaacgatcccagtgtcggttgcgggatccgcctcctctcagtttgcccctttagccctccacctttcccttctcctctctcgcatttccgccag

SEQ ID NO: 1089 - DNA, 377 bp, Homo sapiens
gtgagcgcgtacgggatggctggctcgcaggacggccgaaggtggtggttggtgggagcagccagcgacgagcccgtagacactcgtacgcgtgcgggctgacgtgcgcgctacatggccggagtcgggcgaagcgggggaccgtggggaagaacgcgaggagggaggagtgggaggttgggggtgtcgctaggcgcccttagctccctccctctggaggagctgccgcggccactctgctgccgccgctgccgccgccattttgggttcgctttgcgaggggaaacgatcccagtgtcggttgcgggatccgcctcctctcagtttgcccctttagccctccacctttcccttctcctctctcgcatttccgccag

SEQ ID NO: 1090 - DNA, 121 bp, Homo sapiens
ctgagatgagtgaactgagtgtggcacagaaaccagaaaaacttttggagcgctgcaagtactggcctgcttgtaaaaatggggatgagtgtgcctaccatcaccccatctcaccctgcaa

SEQ ID NO: 1091 - DNA, 80 bp, Homo sapiens
cttttggagcgctgcaagtactggcctgcttgtaaaaatggggatgagtgtgcctaccatcaccccatctcaccctgcaa

SEQ ID NO: 1092 - DNA, 1903 bp, Homo sapiens
gtgagtaccatccccccatctcaccctgcaagtgagtaccatccccccatctcaccctgcaagtaccatcccccatctcacctggcaagtaccatcccatctcacccagcaagtaccatcccccacatctcaaccctcaagtgagtaccatcccatctcaccctgcaagtaccatcccatttcaccctgcaagtaccatcccccatctcaccctgcaagtaccatctccccatctcaccctgtaactaccatcccatctcaccctgcaagtgagtaccatccctgcatttcaccctgcaagtaccatctcatctcaccctgcaagtaccaccccctcatctcaccctgcaagtatcatcccccatctagccctgtaagtgcgagtaccatcccccatcttaccctgcaagtaccatcacccacttcaccctgcaagtaccatcccccacctcagcctgcaagtaccatcccccacctcagcctgcaagtaccatcccctatctcaccctgcaagtaccatccccatctcaccctgcaagtatcatcccccacctcaccctgcaagtaccatcccccatctcaccctgcaattgagtaccatcccccatctcaccctgcaagtaccatcccccatctcaccctgcaagtgagtaccatcccccatctcaccttgcaagtaccatcccccatctcaccctgcaagtaccatcccccatctcaccctgcaagtatcatctcaccctgcaagtgagtaccatccccccatctcatcctgcaagtaccatcccccatctcaccctgcaagtaccatcccccatctcaccctgcaagtaccatcccccatcttaccctgcaagtgaataccatccccatctcaccctgcaagtgaataccatccccatctcaccctgcaagtgaataccatcccccatctcaccctgcaagtgaataccatccccatctcatcctgcaagtgaataccatccccatctcaccctgcaagtcatagccagctgattttggctttcagtttagtgtctgtatcttacaccttattttgtttttgtttttctgtggacaagtttttagttttataactaaatggagtgacaattaccatggccctctccagagtagcgtatttcttgttcatgtatgtttgttgagaggcaagggtgggggggctttgtttgtgcctcggacctgtgagatactgaaatacctggggttccttaagaattctgtacgtttaagcagatgggtatatggtaactgccccagtttgtatgcattttggccacacgcagtatacacagattttgaggagttgagggaaaagttagttatgggtaatgaaaacattttggacttgggttaaatttttccttacaagctggctggctcaatgtaatgagctttatgagatggctttttggggcttcttttttttgccgggggtaggtcctatggatggaatcttcatttttaattcttttaaggaaatgatgtgggaataatacagctgtacatataaggagagtatgggatgagtctttttgtatcacaaagccttgcatagaggatgtgtttattgtattaatgagttcactgcataaaatatataccttttttattaagtggtgtgatttttatcacaaaagcttgtctttcttggtggcttggcttgagttaaaagcctgtgtttgtgttatcccaagctttggaataaatgattgtgtcctattttgatatatggtcttattttaaaatattctttttgttgctgttttttttgcatttctcaaaacaagtagtgatggggagtgtaaagagcccttatacacagaactaataatgcattgagaagattgaatatgaaatatgctttttttttgttttgtag

SEQ ID NO: 1093 - DNA, 152 bp, Homo sapiens
ctgagatgagtgaactgagtgtggcacagaaaccagaaaaacttttggagcgctgcaagtactggcctgcttgtaaaaatggggatgagtgtgcctaccatcaccccatctcaccctgcaagtgagtaccatccccccatctcaccctgcaa

SEQ ID NO: 1094 - DNA, 183 bp, Homo sapiens
ctgagatgagtgaactgagtgtggcacagaaaccagaaaaacttttggagcgctgcaagtactggcctgcttgtaaaaatggggatgagtgtgcctaccatcaccccatctcaccctgcaagtgagtaccatccccccatctcaccctgcaagtgagtaccatccccccatctcaccctgcaa

SEQ ID NO: 1095 - DNA, 111 bp, Homo sapiens
cttttggagcgctgcaagtactggcctgcttgtaaaaatggggatgagtgtgcctaccatcaccccatctcaccctgcaagtgagtaccatccccccatctcaccctgcaa

SEQ ID NO: 1096 - DNA, 142 bp, Homo sapiens
cttttggagcgctgcaagtactggcctgcttgtaaaaatggggatgagtgtgcctaccatcaccccatctcaccctgcaagtgagtaccatccccccatctcaccctgcaagtgagtaccatccccccatctcaccctgcaa

SEQ ID NO: 1097 - DNA, 1872 bp, Homo sapiens
gtgagtaccatccccccatctcaccctgcaagtaccatcccccatctcacctggcaagtaccatcccatctcacccagcaagtaccatcccccacatctcaaccctcaagtgagtaccatcccatctcaccctgcaagtaccatcccatttcaccctgcaagtaccatcccccatctcaccctgcaagtaccatctccccatctcaccctgtaactaccatcccatctcaccctgcaagtgagtaccatccctgcatttcaccctgcaagtaccatctcatctcaccctgcaagtaccaccccctcatctcaccctgcaagtatcatcccccatctagccctgtaagtgcgagtaccatcccccatcttaccctgcaagtaccatcacccacttcaccctgcaagtaccatcccccacctcagcctgcaagtaccatcccccacctcagcctgcaagtaccatcccctatctcaccctgcaagtaccatccccatctcaccctgcaagtatcatcccccacctcaccctgcaagtaccatcccccatctcaccctgcaattgagtaccatcccccatctcaccctgcaagtaccatcccccatctcaccctgcaagtgagtaccatcccccatctcaccttgcaagtaccatcccccatctcaccctgcaagtaccatcccccatctcaccctgcaagtatcatctcaccctgcaagtgagtaccatccccccatctcatcctgcaagtaccatcccccatctcaccctgcaagtaccatcccccatctcaccctgcaagtaccatcccccatcttaccctgcaagtgaataccatccccatctcaccctgcaagtgaataccatccccatctcaccctgcaagtgaataccatcccccatctcaccctgcaagtgaataccatccccatctcatcctgcaagtgaataccatccccatctcaccctgcaagtcatagccagctgattttggctttcagtttagtgtctgtatcttacaccttattttgtttttgtttttctgtggacaagtttttagttttataactaaatggagtgacaattaccatggccctctccagagtagcgtatttcttgttcatgtatgtttgttgagaggcaagggtgggggggctttgtttgtgcctcggacctgtgagatactgaaatacctggggttccttaagaattctgtacgtttaagcagatgggtatatggtaactgccccagtttgtatgcattttggccacacgcagtatacacagattttgaggagttgagggaaaagttagttatgggtaatgaaaacattttggacttgggttaaatttttccttacaagctggctggctcaatgtaatgagctttatgagatggctttttggggcttcttttttttgccgggggtaggtcctatggatggaatcttcatttttaattcttttaaggaaatgatgtgggaataatacagctgtacatataaggagagtatgggatgagtctttttgtatcacaaagccttgcatagaggatgtgtttattgtattaatgagttcactgcataaaatatataccttttttattaagtggtgtgatttttatcacaaaagcttgtctttcttggtggcttggcttgagttaaaagcctgtgtttgtgttatcccaagctttggaataaatgattgtgtcctattttgatatatggtcttattttaaaatattctttttgttgctgttttttttgcatttctcaaaacaagtagtgatggggagtgtaaagagcccttatacacagaactaataatgcattgagaagattgaatatgaaatatgctttttttttgttttgtag

SEQ ID NO: 1098 - DNA, 1841 bp, Homo sapiens
gtaccatcccccatctcacctggcaagtaccatcccatctcacccagcaagtaccatcccccacatctcaaccctcaagtgagtaccatcccatctcaccctgcaagtaccatcccatttcaccctgcaagtaccatcccccatctcaccctgcaagtaccatctccccatctcaccctgtaactaccatcccatctcaccctgcaagtgagtaccatccctgcatttcaccctgcaagtaccatctcatctcaccctgcaagtaccaccccctcatctcaccctgcaagtatcatcccccatctagccctgtaagtgcgagtaccatcccccatcttaccctgcaagtaccatcacccacttcaccctgcaagtaccatcccccacctcagcctgcaagtaccatcccccacctcagcctgcaagtaccatcccctatctcaccctgcaagtaccatccccatctcaccctgcaagtatcatcccccacctcaccctgcaagtaccatcccccatctcaccctgcaattgagtaccatcccccatctcaccctgcaagtaccatcccccatctcaccctgcaagtgagtaccatcccccatctcaccttgcaagtaccatcccccatctcaccctgcaagtaccatcccccatctcaccctgcaagtatcatctcaccctgcaagtgagtaccatccccccatctcatcctgcaagtaccatcccccatctcaccctgcaagtaccatcccccatctcaccctgcaagtaccatcccccatcttaccctgcaagtgaataccatccccatctcaccctgcaagtgaataccatccccatctcaccctgcaagtgaataccatcccccatctcaccctgcaagtgaataccatccccatctcatcctgcaagtgaataccatccccatctcaccctgcaagtcatagccagctgattttggctttcagtttagtgtctgtatcttacaccttattttgtttttgtttttctgtggacaagtttttagttttataactaaatggagtgacaattaccatggccctctccagagtagcgtatttcttgttcatgtatgtttgttgagaggcaagggtgggggggctttgtttgtgcctcggacctgtgagatactgaaatacctggggttccttaagaattctgtacgtttaagcagatgggtatatggtaactgccccagtttgtatgcattttggccacacgcagtatacacagattttgaggagttgagggaaaagttagttatgggtaatgaaaacattttggacttgggttaaatttttccttacaagctggctggctcaatgtaatgagctttatgagatggctttttggggcttcttttttttgccgggggtaggtcctatggatggaatcttcatttttaattcttttaaggaaatgatgtgggaataatacagctgtacatataaggagagtatgggatgagtctttttgtatcacaaagccttgcatagaggatgtgtttattgtattaatgagttcactgcataaaatatataccttttttattaagtggtgtgatttttatcacaaaagcttgtctttcttggtggcttggcttgagttaaaagcctgtgtttgtgttatcccaagctttggaataaatgattgtgtcctattttgatatatggtcttattttaaaatattctttttgttgctgttttttttgcatttctcaaaacaagtagtgatggggagtgtaaagagcccttatacacagaactaataatgcattgagaagattgaatatgaaatatgctttttttttgttttgtag

SEQ ID NO: 1099 - DNA, 20 bp, Artificial Sequence
  Description of Artificial Sequence: Synthetic primer
aatgtgaccagcacactgag

SEQ ID NO: 1100 - DNA, 22 bp, Artificial Sequence
  Description of Artificial Sequence: Synthetic primer
gaatgtcagtgctacaccaagg

SEQ ID NO: 1101 - DNA, 20 bp, Artificial Sequence
  Description of Artificial Sequence: Synthetic primer
tgggttactcagaacttgga

SEQ ID NO: 1102 - DNA, 18 bp, Artificial Sequence
  Description of Artificial Sequence: Synthetic primer
gcattcacaaccaccctc

SEQ ID NO: 1103 - DNA, 23 bp, Artificial Sequence
  Description of Artificial Sequence: Synthetic probe
caggacactaagagctctgagac

SEQ ID NO: 1104 - DNA, 23 bp, Artificial Sequence
  Description of Artificial Sequence: Synthetic primer
gacccctacaagtcttttggttt

SEQ ID NO: 1105 - DNA, 20 bp, Artificial Sequence
  Description of Artificial Sequence: Synthetic primer
atcacttcctggttggatgc

SEQ ID NO: 1106 - DNA, 20 bp, Artificial Sequence
  Description of Artificial Sequence: Synthetic primer
gaccctatcaagtgcacagc

SEQ ID NO: 1107 - DNA, 21 bp, Artificial Sequence
  Description of Artificial Sequence: Synthetic primer
ctcctgcataagcccaaagag

SEQ ID NO: 1108 - DNA, 19 bp, Artificial Sequence
  Description of Artificial Sequence: Synthetic primer
gtcatctggacaagcagtg

SEQ ID NO: 1109 - DNA, 22 bp, Artificial Sequence
  Description of Artificial Sequence: Synthetic primer
ggatgccacattttttcacatc

SEQ ID NO: 1110 - DNA, 30 bp, Artificial Sequence
  Description of Artificial Sequence: Synthetic primer
attgttgatgtttcattggtcagtttaaca

SEQ ID NO: 1111 - DNA, 28 bp, Artificial Sequence
  Description of Artificial Sequence: Synthetic primer
gaagaaggacccaaagatgatgaaaata

SEQ ID NO: 1112 - DNA, 26 bp, Artificial Sequence
  Description of Artificial Sequence: Synthetic primer
cagtttaacagcaaatgccttgggtt

SEQ ID NO: 1113 - DNA, 36 bp, Artificial Sequence
  Description of Artificial Sequence: Synthetic primer
aagtacaaatacatgtacaggctttcctcatactta

SEQ ID NO: 1114 - DNA, 21 bp, Artificial Sequence
  Description of Artificial Sequence: Synthetic primer
aggtcggtgtgaacggatttg

SEQ ID NO: 1115 - DNA, 19 bp, Artificial Sequence
  Description of Artificial Sequence: Synthetic primer
ggggtcgttgatggcaaca

SEQ ID NO: 1116 - DNA, 82934 bp, Homo sapiens
tttctaggagccccgccctcaggtgcgctctgcaggaggcggggcgcgacttcggcgccgccagctctgcctgcgccaggagcgcgcgggtgcgcgcggccgcgccctcgcacagatcccagctgggtcacccgcactgagtcaacagactgagcgcgtccaggcctgacagctctgcggctcgggccctgaggtgaggcgggcgtcgcgggcggcggcggcgcttgaggctagcctgggacagccgtccctgggggagttgaggggacgaggaggggctggccagcgagggacggcggggagagaaggggagttcggcgtctgaggtgtggggtgaagcgggctcggaagcgggcagaggcggcgagctgagggaaacagacctccctcagctcccgggaagcgcgggttgccagcctcggggatgcggtgggagcgcccaggatgcggacgtgagggggtcggggccctgcggcgggggctccgcgaggctcccctgggaccgggtccggccgtgggacttcgggacactgcctttgcctggacgctgtcgttccaccctcagcaacctcagggaaagaaggaaaacaaatattgatgtaaatttccgtctgaacagctgggtaatgagcgcttgctcttccctgcgaggttacgcgcggatcattaccttgcgtgttaaaaggagtttcagtgagaagaaaatgcgcagatctcatgacacagtttgggagggaaattccctgatcctaaaacacgaataggagctccaggcatggaaatacttaattggatcggaaagctgggcaggctggagctattaagctgaaggaggttttcccctgggctcctcaggcttcgatttacgttttaaataaataagtccgaaaataatgaagataataaccacgtttactttctacaagggcgttctgaaggaatctaagggaagaggagtatttgctggactacagctttaagccaggctcggtattagctcttttcattctgacagcaaccctgtaggattggagggggttattccagttgggcaggtgtggagaatgggcctcaaagaggttaagtaacttattaaggtctcagctagtaaaaggatggagttgagattccaacccgggctgccagaccctaattctggtgctttatttagtatattttgtgtttgccgggagagcaatattgtatgtgttttagggaagactccatagtagggaacattattagggcagttagggctttgtgggtatttgtgttaaaatcaaactaaagaggcgttaatctttgcatatgtgctgtttgagtatatttcctttcaaacagatttagtgtagggaaatcttacattcactataagagcaaatttattagtacattccatgtgtattgcatgtcttttatttttaaagagacagcgtctcgggctagagtgcagtggtgcgatcaaagttcactgcagccttgaacgtctggactctagggaccctgctgaatagctggggctacaggcgtgtgtcactgcgcccaggtaattttttatttgtttttcagagacgaagtcttgctatattgcccaggctggtttgttgcatgtcttttacattccagataccatactatgtgccaagagtaccgatatgaatacaatttataatctctgtccttgagtttagttgagagggtgattgcataaaagaattttatgatattgtactaagtcataacttttctagtatgtaaattagttggattaaaaatagttttaagggcaagcttttaaggacctattatgcataagaaaatttattggatgacttgtcctctgtgtaccattgcattgttattttctccctcagcaagaaacactgtgataaaatttaggttaaattatattgacaactagcatttttttttttttgagacagggtctcattctgtcacccaggatgaagtgcagtggcaggatcttggctcactgcagccttgacttcgcaggctcaagtgatcctcccacctcagcctcccaagtagctgggaccacagttgtgtgcccctacgcctggctatttttttttttttttttttggtagagacagtgtctctctatgttgcccaggttgatcttgaactcttgggctcaagccttcctcccactgggattgccacgtgagccactgcacctgactgcattttgttttattattgcaccaccttacagtaaattttaaagcaataaagaagatgagagcatttataatttatccctttttaagctaaaaggcatattttgtagtgcttttatttcattgattgagaagcaaatgatgtagctaggcaggagtttgtttcatgtgccagatatgttcctaatttctcattccaaaaatatcttagtttaaaagtgtagctaataccagattgcatttaatttcttgtgtttcagagttgtaatgaaatcagtcttcagtttaggctgaaatggcacattgttgaaatgtataacattactttgtggtggattttggaaatctcttttaattgcttcagttttctcagtaaagtaggattcaaggtcataatctgagggtgatcctacagatggaagctttggagatttggggattgggaaagtgatggactagtggaatatgtgattgctaggaaattaaacatgactcacagttgtgaaaagtacagtagaggaaagatatgagtgcacaaattagggtgtctaattttggataccagaaacttcataatccattcccaatgcctgcctttaccgtgttatctagaacatacatctgcaccccttgctccggttcactttgccttatgcctctgccatatggcaggtatccctgttcttcacaaaagtcaagcccttttgtttgggagtctagctttaccattcttttctttctgcctggaaattccattccactcctttccaggctctttctctcttatcacattatattaaattttatctctctgcaaagttagtgacagtgtctaactttattttttttgcctcataatgttggatgcataaatccttcagtaaatgttaagtgaatatgccacttttctcacttcccctcttcttcctttttacaggagttgaccaacgttttttgtaaagtgccagatagtaaatattttaggtttgcagacagtatggtctctgtctcaataactttactgttgtagcacaaaagcagtcatagataatacataaatgaatgagcatggctgtgttccaataacactgtatttatagacactgaaatttgaatttcatataatttttgcatgtcacaagatattattattatttttcaaccttttaaaaatgcagaagcagtgttcctcatgggctgtgccaaacagactgagggttggatttagcccccacctctttcatcatagtttgcacatccttgatctttaaggactctcaggaagccttgataaaggaatctgtggtaagatgatactgggtttaatatttccattggtggtggagaaacaaagataaataagactgttgtttttttcatcaaggatctcatggtcaagttcaagatgaaaatatataaataaataatggtgacagggtatagttactgcagttacagttatgtttactgggtatagaggtaaaacaaaggagtgataatcagctccatgtcaatgttaataatgacatttaggcaatatgattaaaaattgagtttatttgagcataaaacttgaggatggtcacacaggaggacacagactcctgaaggatgaggtaaatgctccaaagtggagaggtttgagggtcctttacataggcaaggcctggggatgcttaacagggttacatcatttttcgtacgaggttagtgcatagttagagcaattcaattagttataggcagtgtttctttttgggggaagggtatatttaacatttcacattaaggatgtaatggtcaaagggtcttttatcacagtcagcggtcttttatccctggcatcatctggtgtgatctaggaacaagaaaataaggaaggaatttcatgtataacaaaaggtcagtaattaagaggtcaagcttcatgacccagtctccaaagtcaaccttcagtgccgaacaacgtttagaagccccaagtagacagactatccattttctgttacatctgcttaggtggatgagaagtaacctctaacagtcatttgttggaggtagggaatgtattttcagctagcctttctggaaatcttttaaggatgctaagaaggtgaccacgtttcttatcaggatggctctaaacatcaggatgactcaacttatttattttatagggtataatcttaatttgtttctcacagaaataaacatggatatgtttttaatcaggtctctatgaaaataatttaaaaaatttaaagttattttacctgctacataataaatggattgtttattccacaggtatttagtacctcctctgctgtgcagtgagttgttttactagctgaaaatatttgaaggagataatggtatcattagataagtgatggattttgcgggggaggtgggggaagagagaggctcttctaaggaaagcactgcttttaacaaaggcagtaggtataatagtagaactaccttagattttaaaaaatactttatagctttcaaatttcttattttaattaattaaattcatgcatcctaaataatttttctctaacaattatttctaaaggttatgtacatttttattacttttagtgatgtggaatatgtttcgtaggacttggaacgtagtaaccagcacttttttttttttttttttttttttgagacggaatcttgctctgttgccaggctggattggcacagtgtcagctgactgcaactttcacctcccgggttcgagtgattctcctgcctcagcctcctgagtagctgggattacaggtgcccgccaccacacccagctaatttttgtatttttagtagagacagggtttcaccatgttggccgggatagtttctgtctcctgacctcgtgatcttcccgcctcagcctcccaaagtgctgggattacaggcgtgaaccactgtgcctggccgtagtaaccagtactttaagataaattaagaagtgaatttttgatattgaactttggattatgcaactcctggtctttaagtcaattaatacattagaaaaggaagatgggctttagtaggctttccattttcttgcaacttattggatttagtataaattattttatctagtaaattatttatctaggaaagttaaatttgattaaatctttagagatgttaggtgtttaaaactcacctaattattatttaaagccctacaacaaacttagcacatttctcaggtatgctgtggaagtatggaaaataactttttttttttagattttgaacccgtatttctctttgtgccactgttttttaacagctaagaattggctttgttaaagagtgttttaaagtatttcattggtaagattttgagttggaaccatacaaattctgctttggtcttgtattaactcagctgctagtgagtgaactcctagatattgccatttagaggcaattaaacttaaacagttaaacttgaggcaggccatgcatctttttactgcgtttttctcttattcttccaaaaaccatcacataaagctataaaattttggaattctagtatagaaagaggaaatgtatagctccatgctaaatacggggtttcttgtatcccaagaaaaggcacctgataagtcaaacccttcatagatgtcccctttttggtcatgcctcatttgtaactttgcagccctgttttcagatatatgcttctgtcaggaacaccgctttcatgtcacctctgctgtgtggatctccacctttctttctggaaacctcattctttcatccacaagagttgttcccatctcaagatattaaccctttagttttgggtgttcgtcaatatagaaaagtactgccttcccacattcttccttcatcccagttttcccaccctaactccctgttaggctagtcagtattgtcctttgggattccagaccctgcaaaacagtggaggatgtggtgaagagaggggcctttgtgattaccatatcagtgagagttgtaatcacccctttttttattctatcttgtttctctgtcttctccccaaaggacaggtataatctctcgaccaattgtcgagagacaatgtggtctcgacacctgaaaaggaagccaaatattttccccagcacctcatcatttgcaaagaatttatagggtagagttagtgtttacattattatgcagaccagtccttgcttatttattcgccatatcccttttcaaattgggcctgcttagacactgtggactggcaggttggaggatgcagcaggcaaagaggagggtgaataggtacgttgttgggttagtttacaaagacctgactatagctttgaagtttctgttttagatcaacgttaaagtttaaaggtttatgaagaattaatgttaagaatgtttcattcttttcaatcaaacagctaaaccatgtatttcatactatgaagaaaaccagtgatcagatgggcttaagagattttttttttgtttcaataacttgaattgaagctcaagattattgaaagttaatattttcatatgattagactaaagcttttgagtataagaaaaatcagattgttgaggtcattcataatactgagtcattggtataatttgatgacagagttaatactttcatcatttttttctctctgtccttttgcaattcattctgtagggtttctttgactcacgcttcaatttagctcactaattcgtctttaaatgaagttcaccccatcttttagtgcttttttatttctatcagttttttatttcatttctaagttctgtaattgcttttttcttaattatctttctcttgttccaagaatatgatattctctattactcttttaaggatattagttatacttttatacacaatcgtgatcaatgtgtataattagttgccatgtacaagccaccattttcagcttttcatgtattaattcttttagtcattttaacaacccaaagaggtaggtactactattgttgtattttacagataataaaacttaggcgcaaaaacattaaataacttgcccaaggtcttgaagttagtatgtagcagaggcaggattcatgtttagttggtttggcttcagaggtcatactcttaacctatactactttgggcattattagttcttatgtttgttaattttggtgcctttgtaatattggttaagatgcttttttgcaagaaatagaatctgatactggttagcttaagtgaaaatgaaaatatattgggaagataataggacatttcacatactccaaggaagaaaaatcgagttgtgagcacagtaggtgtggtacattagaagaaagcttagagtaagaatgtgtaaactttctttcttaaatgttgccattcatgtaattcagtttccttgacttccatccagtctgtgggtctcttagttaattctgccaagagaaattttaactgacacagctcaagagtagtggtggtggtggtgatggtttgtgtgcgttgggatggtgtttggggagttggtttagttttgctttaaaaagctgtgatgagaggtggagtgggtgggcaggttttttagacaaggcccttagagactcaaccttgagttcaggaagcagttctcaaaaaaacaaaaaattctgtgaatccatctactctatgagtctgttatataaaaatgaagagttaagcatccaacattcaaagtggattaataatttagtagcattcacaaaatcaatgtgttttggcaagtaacttgagaatgttcatgctgcattaggttagtgtttctatgtttgtattgtagcaaataatgcttgaatgagtacagctttcttccttccttccctcctattatcaactctttgctaaatgtgatataacatagttgagactgttagaagaatttatttattgaccattacagaagtttatttaacagagtctaatatgaaaatatacatgacttaatttttacatcatagtaaaacaggcccttttgagagggagacatgggtttttctgctgaacagccattatttatacttgttccaaggcttctaacatgatgatgccattacatcgcattaccaccattccaatattgttctgttgcccactagttgccatctccacacattaatctatcacaagattcataaagggatcaaatccccacaatattccttggacatgtctgccaccatttaattttcaatgataactttttgtccatcaattttttcaactcgggagtgtaagctttgctcatggtgtctactccacaggttcacagatgccttggaatggaatgctggaagaatttattttaatgtatcttctattcttgactgcttttgttttgctgtttttaatttactcatttagtatttttacagtatgtctaattgtttaattgctttttttttactatgtaagtaatacatagaaaaaaagcatgaagaaaataaaagttgtctttaattccattgctaatttaaacagttctttccagtcttccttctgtgcatataaagaagatgctcatttaagccaaactttaattatatatatttactggaaaagacaaactgcctctcaaaaattatggaccaggcacggtggctcactcctgtaatcccagcactttgggaggcaaaggcagatggatcacctgaggtcagaagtttgagaccagtctgaccaacatggtgaaatcccatctctactaaaaatacaaaaattagctgagcatggtggcaggcgcctgtaatcccagttacttgggaggctgaggttggagaattgcttgaacccaggagccgagactgtgccattgcactccagcctggacaaaagagtgagactccatctcaaaaaaaaaaaaaaattgtgagttttctttatttaggtgtagacagtcttccagcttgcaacagatggtccttgttttggaggagagttatagcagtggcctcactagataggtttatttaaaacaagggcacagcaatttctctggaaggtttaacaggatttttttgttgttgttgttatttcccctgctatcttctcaatacttcttagtatgcagagatcctaggttactgggttgagtgtatttgaataggggcagtggacattgcagttgagactctgaccacttctattttgagttcagctggaatgaaacctctgaagaatcgagatagctccaatagaggtccacaggcagaaaggatttcaaggatcttcaaagggtaaatgtaccctggaagagggatactggacctgtgataggtacaatgatttagatcattcaatgttattttttgaagtaatttattaaggtaaaatttatttccaaggtaaaactccttaccttgtaagcagtttctcctcattctttactctccctggcctctgacaatcaccagttggcattctgtccctacatttatcttttctggaagtttcctataaagggaatcatataacatttgacatttttagtctgactttcacttgacataacgttttgtatgttcattttaattgtagcatatagcagtacttcattcctttttttttttttttttttttttgagacagagtcttgctctgatgcccaggctggaatgcagtggtgcaatctcagctcactgcaacctctgcctcccagatttaagcaattctgcctcggcttcctgagtagctggagttacaggaacgtaccaccatgcccagctaatttttgtatatttttttttagtagagacggggttttgccatgttggccaagctggtctcaaacccctgacctcaagtgatccacccgccttggcttcccaaagtgctgggaatacaggcatgagccactgcacctagccacttcattcctttctatggctgaataataattgtatgtatatgccacagtttgttcatttatctgtcggtaagtatttgggctgtttctacctttctgctattctgaatagcactactgtgaacgtgtgtgaacatgtactcaattgagtccttatgttcatttcttttgggtgtatacctaggagtggaattgtgaggtcatatagtaaaactgtttttctcagcatctgaaccatttgctttcccgccagtaatgtattccactttctccgcagtttcttatgagaagtctgctctcattcaaattgttactctctgtaggtaatacatcattgttctctgactgctttcaagattttttgttgtcttaattttcagcagtctaattataatgtgtataggcatggattttctttatgttttctgggcttcaccaactttcttgaaacttatgtgtttatatcccttgctaaattggaagttttcagccattaagtctttaattttttttttttttttttagcattaatactctttctcctctccttttataaatctgataatatgaaagttagactttttgttattgtcctatagttttcttttttcttctttttttttttctttgagacagggcctcactttgtcacccaggttggggtgcagtggaacaatctgggctcactgcaacctcctcctactgggttcaagcgattcttttgcctccccagtagctgggattacaggcgcccaccaccacacctggctaatttttgtatttttagtagagatggggttttaccatgttggccaggctggtcttgaactcctgacctcaggtgatctgtctgccttggcctcccaaagtgttgggattatgggcgtaagccagtgtgcccagactgtctcacagttttctgaagcactgttaattttttaaaaatcttttttctctctgttgttcagattggataatgcctattgataatcttcaagtttcctgactttttttctgttgtgttcattctgattttgagccactccatgagttttatttattattgtgtttttctgttctaaagtttccatttgtatttatttcttattgtgtttttgtgttctaaaatttccatttgattctgcttaatgtcttgtttctttgctaagattttctatttttcattgctttcaagagtactttcgattgtttgctgaagcccttaaatagctgctttaaaagttttatcagataatttcaaagtctgtgttatttcagcattggtatctttgattttattttcttagtagagttgctatttttttttttttttgaggcggatccttgctctgtcacccaggctggtgtgaagcggtgcaatcttggctcactgcaacctccgcctcccgggttcaagcagatctcctgcctcagcctcctgagtagctgggattacaggtgtgtgccaccacacccagctaatttttatatttttagtagagacagggtttcaccatgttggtcaggctggtctcaaactcctgacttcgtgatctgcccaccttggcctcccaaagtgctgggattacaggcgtgagccaccgcacccggtcagctattttctacatgcttcatttgcagtgtaatattggattgtatgagactttgggttttgtgttaatacctacagaaaatgttgatattttctcttagcaggctgtcaaccaggttaggttcaggtcataagtttctacccacattctttgaactgtagttgtcattttagtttatttttcaaaaacttttgcagtacctttttggtctgtcttgtgtgtgccttgcagtgaacagtctggatttggacagtggtctgtctgttagttcagtttctcaagcctttgtcacactaataggattggatttatgtatgtccagcttgggaattattacaggaattaaaaacaactttttagagtgctttcctgagctctctttctatttgttcccccttctactttttgcttccctgtggctgctgtttctatcctccagccagagagctagtgtttattttctccattgtgttacacacttgtgcagctgcaaccaccatatccagggcccaatggtaggaggtagagaagaaaagcaaaagggattggcctcatcctcttacaacgatagttccattgaatagagagaaaggttttcctgcctcagagtgttggctgcactaggcttttgttactgtagtctggccctgttaccatgggattgcttgcatgtggggatacaggagaattcagaaaagaaaaaaagatttgctatttctacattctccctgagcattaagacttcccttgcccattcctcaattcaaagctaaggcttcttctggagctgcctctgtgggcggttcgggagataccaaaggagaaaaagtaccactgttgatatggtggtatttcaaattctggtctaccctatttcacatgccttgtttacttttcagagctgacagattgctgctccatgcattctgtccagtttcctaagagagacagcttggagtatgcttaatccatcttacctgggactgaaacagctgcttattttgccgttaaaaattacatgcagtttactgcgtggctccgggtttgtttgtttgtttttcctctttaataggtttattcagaaaacatgtccactgcaattagggaggtaggagtttggagacagaccagaacacttctactgaagaattacttaattaaatgcagaaccaaaaagagtagtgttcaggtaagttaaataactctttcttatgcttttttgcagtttattttgcttgatatattctatcttgaagtgatgatttattttgctaaatatatttttattataattttatttttctttgcttgtaaagtaaaagcttgccatgttagccacagaaaaataactgaattacttaatgctttctaaatgttaaaaattttaataataatttctacatttagttaatttctaacatctgtgcttcattttcagcttttaggcatgtgtttcctaagtttcatgaactaacattccacaataactttgattccagagttttatatcccacaacctcgtattttatggactctagattgagttgcccatgagtattaatattatgacacagatttgtacccacagcatacattacttttgataagggtaaaagaaaggaagaacttgggtaaccagctagtaataatttcaaaggatgaaaacatattattcatcttccctgaaactggtaaaacaattaaacagcaagatgatataatagctcatttctactaaaactgaccgtagaatttaattcagtatggttttggtagtatacatttaggtataattaaagtatgatttctaattcagaattgaataaaggcatttttatggtgaatccatatagggatgttcggtaaattgctttagataaaattatatgagtaaatttattatgttttatgtcaataatctaagatgtttaaatattatcttttatgtcaccttaatttattttgtgacttgaattttaaaatatttcagtaaaactaaatacaaaggaaaaaataatatgcatgttgggttggatgaggtgttcaacacaaaattcttttgggatagaattgcttttattttattcataagaaaggacaaccaaatttcctgttttttcttagtattatattatttgccaagaaatcttgatgatttttgctgccattgttatactttgtaattactttgtttcttttattgtaggaaattctttttccactattttttttattttggttaatattaattagcatgatgcatccaaataagaaatatgaagaagtgcctaatatagaactcaatcctatggacaagtttactctttctaatctaattcttggatatactccagtgactaatattacaagcagcatcatgcagaaagtgtctactgatcatctacctgatggtattgtgagcttatatatatattctgtttataatattaagccttttcaatatttatcagcttgctttattgaatgaatagcagtcttaacacttagagatgtgttcctccaccaaagtcagttttataaaaatactaaaattatttaattctgttgccttatttttcttgtgaaacattaatttatattcttggtggtaggaagcatattttatgtacttttatatttaattcttagaccatttataaaatagtttaagtatacttgtataagatacaagctttgatgggctatttcattttgattctgactttcatataattatgaagctagcaatgtttagctgaatgtggtagcatgtgcctgtagtcccagctactcaagaagttgaggtggggggatcccgtgagcccaaaagtttggggctgcagtgaactatgatcatgccacttcattccagcactccttactctgggcaacagaatgggacccccatctataacaataaaaaatttaaaaaggaagctagaaatatgtgataaagactgtaaagcagtcaccttttcagcttaccatgcttgtttatagaagtgtatggtgtaaactgaagaagtacctaactttggagactacaactatgactatggctaagtccctaactctgttttatttatttatatatatattttttgtagagatgggatcttgctatgttgcccaggttggtctaaactcctgggatcaaatgatcttcctcccttggcctccacctaaagtgccacctaagtcttttttctcaatgtgcacttctcacaaagaaatgaactagaaaacagtgtaagcagtgaagtgccactgaacttaaagtggctgtgagagaacctaaagcaaaagctggagaaagtgacagaaattcttatgctattaatgattaaacaaggaagtgctaaattgtagaaaatgacagattagcatgttattttttgccatatgggatagttgtaattagcttatatgtcatcgcattattggattttatgtcattgaatggaaagtgttaattatacagtcagaagccaggtaacttttattccattggtttctttctctggctatttctatttaatattttgattaaatacacttcttgttatatggtagtgtatcatattaggtacaagtagtatagattaccatgagaatttagtgtacaagctcaaaaagctgattaaaaatgttgaaatgaaattcattggtaattctgagtaggaggaaagaatataaaccaaagaaatatgaggccaggcatggtgactcacgcctgtaatcccagcactttgggaggccgaggtgagcagatcacctgaggtcaggggtttgagaccagactggccaacatggtgaaaccctgtctctactaaaaatacaaaaaaattatccagccatggtggtgggtgcctgtagtcccagctacttgggaggttgaggcaggagaattgcttgaacccgggaggcggaggttgcagtgagctgagattgtaccactgcactcaagcctggcgacagagcaacactcaatatctcaaaaacaaaaaacaaaacaaaaaaagaacaaacaaacaaaaaacaactaagtcagtgtgtattagatgccaaaatagtgtatacatatacacaaatttttttagacttctgtatttttaacaacagaactatctgaaaatgggttatgcatacatacataacatgactggtaggatgttgaactaacaccctctttattcatgtaaatcctggagttccctgtccctcttaaaaggcctggaaaatctattaattaacatttaagtaatactttagaatctatgaagcattttttttttgtctttttcttcttttgtttgagatgggatctcactgtcaagctggtttgcagtgctgtgatctcagctcactgcagcctctgcctcctgggctcaagtgatactcccgcttcagcctcctgagtagctgggactacaggtgcacaccaccacacctggctaatttttgtattttttgtagagacagggtttcgccatgctacctaggctggtctcaagcaatctactcctggactcaagcaatctacctgcctccaccttccaaagtgctggcattataggtgtgaggcaccacatccagcctacaaagcgttttgatgtttgttacttcacttgttcttcacaacaacccagtgtcatcagctaggcattgtagatgaggacactaaagtctgaagagttcaaatcgcctgtctgtgctcacacagttaatacatgaagacgttaagtactaattctatattctttccatttcaccacatgtttgaagcttctgtagtgaaaattagttgcttgtaaacaaaactacaagaaaatatttaaaaattagtcttatctgatgagaaagaatgattacagtattttttccacttatcttctaagaaaggaacaagcaatattggatttgaatgacaatttttatttaaggaggagttgtgtcatagttactaaaatgcctatttagtttctgagaaggattgtggaattttctttataagaaatatttaaaaataaaaaattcatatatttactaaaaagttatttttgtgcaggtgcactggctcatgcctgtaatcccaactagtccggaggctcaggtgggaggatcacttgaggccaggagttcaagaccagcttgggtaatgtagtgacacctcatttctaccaaaattaaaaacaaaaaattagccaggcatggtgatgagtgactatcgaccaagctctactccagaagctgaggtgggaggatctcttgacccctgaagtttgagtgcaagatccagtgcactgcaggctgggtaacagaacaaagccctgtctctaaaaaaatataaaataaaataacgaagttattttttagtttaacttcgagatagataaatgaactgcattactaataatttttataattttattgctgcctgaaattagtataattaattgaggttttgagaaacagcaatttcttgaagaaatatgagttctgcatattgttttatactatatttcatatatttataacataagtataacactgacacatttctgtaatcaaatgacagctgagtagtgtctgcaacattgtaccattttattattattattttgttggaagaattgtcttctttttgtttgtttgttttttttgagacatggtctcactctgttgcctaagctggagtgcagttgctcagttatggctcactgcagcctcgacctcctagctcaaatgatcctcccacctccgcctcccaagtagctggaagtgcaggcacacatcactacacctggctaatttttttattttttggagacagaacctcaccatgttgcccaggttggacttgaacttctgagctcaagcaatcctcccatcttggtcttccaaaatgttgggattacaggtgtgagccactgtgcttggactgttttcattttttaagaagtaaatatagcaaaagtgtttataaaatattccattcatcaaaataattgtaaacttgatctactgtattgtggtattttaatttgtgagctaactatattgttatgatatcttacagtcataattactgaagaatatacaaatgaaaaagaaatgttaacatccagtctctctaagccgagcaactttgtaggtgtggttttcaaagactccatgtcctatgaacttcgtttttttcctgatatgattccagtatcttctatttatatggattcaagaggtaaatagccctacataatcattgaagatcaattaaatgcatatctttgctgcttgcagttcatagtcaaaattttatatagttcaatattggcattttcaactattcttacttgttccaataggaaaactgagaagtatagcataaaaatatttatttataaatacctatctacttctacacataaaacatttttatatatacccattttgatttaatacatttatatatattaaatacagtagcataaagcaaaattgcattttgggttatatgactttctaaatctctttttttcatgtaattgtttttacttgtggtatgtacaaatctttaaaatcttgaggtcttctactagtgaacttgattagttttatatttgaaacatgggaaacaacctttggttgtttaaatctatgaagaaatattatcaaccacaaacatttattgagcaatgttaaagtcactatgctaaatactgaatttgtgactttatttcaaaaagcccttctgaaaattcttttttcctgtttgcttaactttgacttttccttgcttctggaagtgctttagagctaagtcatgtagaatgatttactttaaaacaaaaaagtaacttgttttaaataactacaattaatttctttctttacatttttattcatttactatttagtattctaacacatataacttttatttcaaaatttcaagtaaatgatcagaaatcttgtaagtattgtttacctttgaaagtcagtagcttatttctttggtcctgtaaagattgattgattatattgttttggtaggtatctctccatataatatctttaaaacgatgcacttgcatgttgtacagaatcttagatctcatattcttccccccatagctggctgttcaaaatcatgtgaggctgctcagtactggtcctcaggtttcacagttttacaagcatccatagatgctgccattatacaggtaaatatgataaaggaagaaatacaaaaactatgccattttaaaataaatatttccttattctttacaatagtatttggtttgactactgtcaaatgtacaaaatatgtaacctactacaactcctttgagaaaaaagataaaaaagtcatattttctgatttggtactttttgttgtgtttcatattttagcagaaaaactggccatgaaatttatttttaaaaatcttacttttgtgtctgggctagataacagtagatgaagttaccttagaattcaaactattcaaattaaccatatttcattcttccatgttctgtatggatctgtggcttttttttccatttgccctttctaattgaatttactatgctacaaaatttactatgctacaaaatattgtaatttcaaaatgtatatcaaccatcttgtctgctaaacaatacgtttaaagtatgtatgaataatgatggagctggaatcaaaatctgaacaggagtcttgtctctgttgttacactgctatgtagtaaaatgactattataatagtactttacttgacagcattgtcgtaagaaccaaatgagatgatttatgtataattgtcttgtaaacttttgtagtacagtataaacatattagggacgtgtaatattgcacaaattcaataatacagaaatttaaggtaaagatagtgaaatacggatctattacattgatgatgttgtatcacctatttgtattttggccaaagtttttagccatccacagcacagaccacactggatgaataggcaggatagatttcaatttaggcattaattggaatgttagaagtattatgtggcataaatagttttattatttggtctatatgtgctaaatatatagactttaaagcagtagaagggcatggtatttagaagaacattttttaaacaatcataggaatgatggcactaataatcactcctaaattcctaaattttgaagatgtatatttttactaagatacatataattgtctgcttaagatgataattgtgcaattttattttatttgacaaattatttaatcaaaatttatacacttactgactttaaactttaaactttatggtatacttttagaataaattgaatgcaatattctactcagaattatgatattggggtcactcactttatttcaggtatggagctttttgaggattgtatttgtactaggttactgaccaaatttagggatatagctgtcccgttttactaggggctgctatcataactaaattaatttgatgtatttacattttctaattatagttgaagaccaatgtttctctttggaaggagctggagtcaactaaagctgttattatgggagaaactgctgttgtagaaatagatacctttccccgaggagtaattttaatatacctagttatagcattttcaccttttggatactttttggcaattcatatcgtagcagaaaaagaaaaaaaaataaaagaatttttaaagataatgggacttcatgatactgccttttggtatgttattaaaaatttattacttaatataattaaaaattgtattaaatatacagattttcaaaattgtaattttgatatttacctaacttgatgatgtgcttatcctgttttcttacaatgattgccttagtcttggaatttgagattagtcaagaagtttcaacaactaattggcttcatttaacataagggatgaagaatgtcaaagcttgtgttgacaatacgtgtttaaattttatttcacattttatttgaatcatgggcacactccgtgtatatttcagtgtatttcaatatactccacgtatatttctgtgtatttcagagttcaggaaatgtgaaatcttggaacattagaaattaattgcttgttacagttcttccataatatagcatatatataatattaaaaatttagttatagtgattaaagtctgtatatgtggtatatggactttttttccctcgaaagttttagttatttgggtgaattaagatgaatatggaaataattttagagaaagaaatgagaaaaccatgttttcactagtgacctttaatgtatcagcatttttgtacagtgataattttacaaaggcatgcatttttataaatctaagtgtagtttccttactcttttcactatgtaatgaagttcattctggggggaaggttaatactgtgcatgtgagctgttatagtctgttttacaaaattttattccaattagcccaatgtaacaattaatcattaacactttacataatggaattattgtatataacatatttcctttgcttgtttttctttcatttgttattttagaaattattggttttggattattttttgagacagggtcttgctctgtcacctaggctggagtatagtggcatgatcatgggtcactgtggcctcaaactcccaggctcaagagattctcccatctcagtctctcaagtagttgggactacaggtgcatgctgtcatgcccaactaattttcaatttttttgtagggacgggggtctcgccatgttgtgcaggctggtctcaaagtcttggcctcaagtgatcctctcatcttggcctcccaaagtgctgggattacaggcatgagccactgtgcctggccaaaggattggtttttaaaatttattgggttattaaagtattttatggagaaccggtagctggaagaatttaggcaaatcattctctcagggtctcagttttgcctcagtaaaatgatggattcaattttgataatttcgctacctttttagccttaactcagtgatttcatgacatcattaaatcctgagctaacttggaaaaatatgtaaaataaaacttaatactgcagcaattccattgagctctgatttgtaaagaagtcttgagcaaaaatagtgaattcattactgatcttgttgatttcacattgtgtaattgtagtaattatgtcattgattagtgaggtaaggtagcctttattgtttatagttacagaagccatcagaggtttaattgtagcacatgccataaagaaaattgttatcttgactcattaaactcctacattttaagaaaatcagagacattgtgtgctattgaacttttgagaatattagatttaaattaattatgaattactattcattttgaaagcttttttaactctggaagatagtattttttatcagattacacttttacctatcacttaaccaatactatttttaattacttacaagactattaatttttagtacataagcatacacagaaatgaacagtgacttaattttaagaataaaatggctaaaatctaaaaattttgtttaaaatgattttttaactggttaagcctatgcatttgaccataactatatctgtattctcattttaggctttcctgggttcttctatatacaagtttaatttttcttatgtcccttcttatggcagtcattgcgacagcttctttgttatttcctcaaagtagcagcattgtgatatttctgctttttttcctttatggattatcatctgtaagtattttaacttgtgataggaataaagaactgtcaaaatgtttgataacatagcaaagtctttttcttcagtttacttatagtcaatttgccatgaaagacagattttactaattgataagtgacttaataaataaatgatgtggcatcactgtattcctgtatttttagtaatgttacaaaatagttttagatttagatttagcttttgtcatatgatgtatttcacatacaactcctctatctgttgtctttatataatgatgtatataattaagactgtcaagtattggactatttttgtttgtcttcatggaatccttactctttcaagttaatttatgctccaggatgatgatttttaaagatacatctttgcaaatgtaactctttagcagtcttgatattcatttgatatattggctgaatgagaggttttaatgaccagcctttgttttaagtggttccatcttccattctgattggtttatgtgcccaccctgtatcagttgttaaatgttttggctatcatttctgctctttaaaataataaattgcaaataactaacatacttccatatgtaattgcctggtttttttttaaatgtttaattttacttttttgagacagggtcttgctctgtggcccaggctggagtgcagtggcacactcatggctcactgcagccttgacctcccaggctcaatccttcaacctcagcctcctgagtagctgggactacaggtgtgtgccatcacaccttgctaatttttgtgtgtgtgtatgtatatatgtatatatatatatacatatatatatgtatgtatatatatatatacatatatatatatgtatgtatatatatatatatatatatatttttttttttttttttttttttttttagagtcgaggtcttcctaagtgtccaagtttggtcttgaactcctgggctcaagtgatccacttgccttggcctcccaaagtgctgggattacatgagcgagccactgcagcaggccttctggttttttttttctttttaaactgttttttttatcttatgaataaattaagtttaaaatatgggtcttgtacttaaaatttttgttgatttattattttttcacatattttatgcatcttactgcagaaacacatggctatttatggtttctgtaatgtagaggtggtcatgtttacctatgatacagataaaaatacagtatttaatatttgttagtttaagaccagatgtggtggctcacacccgtaatcccagcactttgggaggcaaggcaagaagattgcttgaggcaaggagtttgagaccagcctgggcaacatggtgaaaccctgtctctacaaaaaaaatactaaaatgctggacgtggtgccccacgcctgtaatcccagctacacgggaggctgaggtgggaggatcacctgaacccaggaggtggaggttgcagtgagccaagatggcaccactgcacttcagctagggtgacagaacaagaccctgtctcaaaaacaaaatcaaaacaaaaacacaaaaatatttgttagtttaaatttttaaaaggtatatcactatttgtttgaaaataaaataccatagcatttagaaattatagttgtatttttatgaatgcatttttcatgaaaatagcttgttctttcagaagcaaactttaattttgttttcatactggtatatatgaacattgcactaaccttaatatttgtattttataggtattttttgctttaatgctgacacctctttttaaaaaatcaaaacatgtgggaatagttgaattttttgttactgtggcttttggatttattggccttatgataatcctcatagaaagttttcccaaatcgttagtgtggcttttcagtcctttctgtcactgtacttttgtgattggtattgcacaggtaggtaatatattaatcttgcattcactaaatattttctttctgttttatgtagcttcttatactaccatgaatactacctttgatttaccaaaaaaattattttaaaattttagcatgaggaagaaatgatttctagagtatattttatatctagttttatttatgtttgtccaattttaagtttttagttaaatgttctgtttataaattttttactttttacttcagtgtatctcagtgatttatttcactgcagaaactcagtttgatagtaatgtgtttaaatgtcaagtaattcttattgcctatggcctggttatattgctatcatttgtacatttatctcagaagaatgcatgggagaaaattgtgtgtggagcagaacaaatttaccgtgagtgtagtggtggaataagtaggcctggtggattttgttggcccaggcttcatggaattgtcattcaaaataacattcagacttacaaatattatttttattagtccttacaggagtagttaggttctaaatggaagaagtcttataagaaatggctttgtagtggaacatgaatttggctaatgtacaaagaaaaaaatgtaattactaaatataagaaattactcatgttggttggatagaagttctgatttatgagatataattaaatattgagttaatcattttacttttttgagacctgagaatgattgttatacattttgagagttcattgagtccccgagtccgcgttctctaggaacgaagaattatagattcataggtttttgttgtgagtgggatggcctttcagtgtcattgaatttatcttcttcattttataaatgagaggactgaagcctagaatagtataattaaagcgtattcacttaatggcagggctaggacctaaatgaggcttcaacctccagtacatttctctttccatgctatcacaaatatctactatgaatactttaataattgtgttaattaatcaaaatacttgcttttctctattggaaagatgctaacctaattttattccctaatacttaatttgtttggctttcatatggatcataacccttttgtttgcatttgttattattaatattgcagtttgtttttatttcatttgttagtaattacattggaattaaatgcccctagagtgaatatatcccagttaaagaagcacaacattaaaaacatgattgaaaggaattggtttgataaacttacatttttgtaaagtctttattgttttccttataaatttatattattaatttggtcaagtgtttaatctattaaaaggcccagttggttactatcactctggatatgctaaataactcttaagtagtgttagcttttgcttgtttttgtcatttttatgtaataaagttagtgtttgtatttttcaggtcatgcatttagaagattttaatgaaggtgcttcattttcaaatttgactgcaggcccatatcctctaattattacaattatcatgctcacacttaatagtatattctatgtcctcttggctgtctatcttgatcaagtcattccaggtatgcagatggtttttgaattttactttaaagatttttaggcttttttgcccacatagggtcagcttaattttaagattttttttcctaaccagggtaccctaagtcatattcattgttaaagcttttaatttgactttaaataagtatattttgtaccttaggctatagccactagtgaacataaagagatcgtgtaaaaagagagcagttttgaaagccttaagtctctagttgatcttaccttggtccttctttatatcagtcttttttaattgaagtattttattttaccctctaaggtctaaaactatgaagtgatcttgtaactcctaccattttctttatctcctgtccacatctatagccaatatagcaaactcctgtagattcaatagtaatattaagtattgagcatatttccttttccacttgtattcctcattacctgtgtctgtattctacacctgtactgtcctgtatggtaactactagccatgtgtggcttttaaaatttaaattgattacaattaaatcaattaacaatttatttttttcagtagcacaggccacattccaagtgctcagtagccatatatggctgttagttactaaattgcatggtgcaatctagatgttctgtagaacattttgaccattataaaagttgtattgtgtaatactagtctagactagaggttcccaacccccaggacacagatcttactagctgcctgtgaggaactgggctgcacagtaggaggcatgtgagtgaagcttcatctgtattcacagctgctcctcattgcttgcattaccacctgagctccacctcctgtcagatcagtggcagcattcaattctcataggagtatgaaccctattgcgaaccgcgcatgtgaaggatctaggttgcatgcttcttatgagaatctaatgcctgatgatctgtcactgtctcccatcacccccagatgggaccgcctagttgcagaaaaacaagctcagggctcccactgattctaccttatagtgagttgtataattgtttcattatatattacaatgtaataataatagaaataaaattcacaataaatgtaatgcatttgaatcatcctgaaactatccttgctccctgtctgtggaaaaattttctatcacaaaaccagtccctggtgccaaaaaggctggggaccactagtctagaccattgcagtatctctcatctagttacatacctcaagtctgtctgagcacttcacccctttttttgaggttttattattttttaatagatttttggggaacaggtggtgtttggttacatgaataagtcctttagtgttaatttctgagatattggtgcacctgtcaccctagcaatgtacactgtacccagtgtgtattcttttatccctcacccccctcccaccttttccctgagcccccataatccattgtatcgttcttatgtctttgtgtcctcatagcttagctcccacttatgagtgagaacatacaatatttggttttctattcctgagttactttacttagaataatggtctccatttccatccaggttgctgcaaatggcattattttgttcctttttatggatgagtaggattcctttgtgtgtgtgtgtgtgtgtgtgtgtgtgtatgtgtgtgtgtgtgtatcacattttctttatccagttgttgggatgggcatttaggttggttccatatttttgtaattgtgaattaattatactgttatcaacatgtgtggggaagtatatttttcacataatgacttcttttcctctgggtagatgcccaggagtgggattgctggatcaatcggtagacttaccttagttctttaaggaatctccacactgctttccatagtggctttactagtttacattcccaccaacagtggaaaagtgttcccttttcaccacatccatgccaacatctattattttttgatgtttcgataatggccattctcgtaggagtaaggtggtatcacattgtggttttgatctgaatttccctgatcattagtgatgttgagcattttttcatgtttcttggccatttgtatatcttattagagttatctattcatgttcttagcgtactttttgatgggattgttcgttttgttcttgctgatttgagtgactcatagattctagatgttagtcctttgtcaacatatatatatagtgaagaccttctcccactctgtgggttatctgtcaactgctgattatttcttttgctatggagaagctttttggtttaattaagtcctatctatctttgtttttgttgcatttgcttttggcttcttggtcatgaagtctttgccttttttctgatgttatcgtctcaaatttttatggtttcaggtcttagatttaagtcttttatctatcttgagttgatttttgtatagggtgagagatgaggatccagtttcattcttctacgtgtggcttgccaattatcccagcaccatttgttaaatagggtgtcctttccctacatttatgtttttgtttgcttgctgttggagcagtaacagttcccagaggaatgccaagtactgataaaatcaattggaatcctctgtacttggcatcagatccctttgaaatgtggccaatctaaaagaagagtagatatttgaaaaaaatgaggagtgtaggtattttgagagggaaaagggagaaaatggaacatgttgtctgggcagttaccactgtatgccctttctttccttctttccttccttccttccttccttccttccttcctctctctctctttctttctctttcccctccctcccttccttccttccttccttccttccttccttccttccttccttccttccttcctacctaccttccttccttccgacagggttttgctgtgtcttttttgagacagggttttgctgtgtcttccaagctggagtgcagtggcacgatcacagctcactgcaggctcagcctcctgggctcaagtgatccccttgcctcagcctcccaggtagctgggactacaggcatgcaccaccgcatctgactaattttttgtattttttgcagagacaaggttttgccatattgcccaggctggtctcaaactcctgggctcaagcaatatgccagcctctgccttccaaagtgttgggattataggtgagagccaccatgcctggcctcattgtataccatttctaagtctcatatttctatcctgttgttttgttgctctccataattctgtagtcttttccatgaagcatatccacttttctagttactacctattttcaaagatcatttaagatggtgcccattcaagtcttcaacacattcagcctgtgttgtgttcttgccatttgctatctacttgtactcataaaggcattagttcctttagcatagaagatgtgctttattcacctttacctcccactcagcaattctgaaactatttatggactagaattatttatcaataaaactttgattcatacaatattgatttaatacaatacagctaatctttatttacttattacttttcaatgacaaatgaaaattgtatatatttattgtgtacaacatgatgtttggaaatatatatatgttgcggaatggtacctaaactttagatgcaggttgtcatatgtttgaaatgctgtctttatgatttaaaaactaattatggtaactcagttttttaatgtttatttttcaggggaatttggcttacggagatcatctttatattttctgaagccttcatattggtcaaagagcaaaagaaattatgaggagttatcagagggcaatgttaatggaaatattagttttagtgaaattattgagccagtttcttcagaatttgtaggaaaagaagccataaggtatggttcaatctttggcaatttaggtataagaactgctgatgaaacatttaaatcctattctttaaatatgtatgtaaatatggtatattagatttggtacatatgccatgattttaaaacattaataagggctacttttctctttttcttattttctttgcaaccatttagaataaagttggtgctaggtttgaaattttatgtttctttctttctgttttttgagacagaatctcgctctgtcgcccagcctggagcacagtggcacaatctcggctcactgtaacctccacctcccagattcaaacaattcttgtgcctcaacctctcaagtagttgagtctacaggcatgcgccaccatgcctggctaatttttgtatttttagtagagacagggtttcaccatgttggccagactggtctcgaattcgtagcctcaggtgatccacctgcctcggcctcccaaagtgctgggattacaggcgtaagccaccacacctgtcccctgaaattttatgtttggatggaaaattttaaaagtaataaaacctgatgtttatacaattaatgtttaaagcttttcccattatgtagactgaaacatgataaatattaactatataattttgttcatgctacattgttttatacagcatattaaattgtcatctgttaatttcatagatttttagggtttgaggcataattagaacatttcattactttaatttttaagaaccaaagaaattcattacgattccttgttaggtcagtcagtaccaaatttagaaataaaattaggtgaaagaaaagaaataaaataaaatgaaataaaaaagtgaagcataatattttttaaatttaagaaaaatgtaaaaattccagagaaagtcaaaatacttaagatgtaattcattggccagtggcctgctttcttaacggtaaattttaactgattaacaaatcatttccttaaaaaaatatgaaaaaaataaggtagaataagaaaatcacttcacatttgttaatggtttgaaatttgtgctgacatgaaatgacatctggtttatatcccccttcactgatgtaacaagtgtttgataatcagaaatgaaaaaaaatccataaattgcttaaatcagattcttcacttagttttagaagttgggttggcatgaaaaatgaatcaatgacgcttacaatggaaaggaatactatgcttttctcttgtaccttctttaaaataattttatagttgatccctgaaaaatacaagtttgaactacaccagttcacttatatgtggatttttttcagtaaatatattgaaaatttttttggagatttgtaacaatttgaaaaaactcgcagatgaactgttagcctagaaataccaaaaacaaatgttaggtatgtcatgaatgcataaaatatttatagatattagtctattttaacatttgctaccataaaatatacacagattatagtaagttatgctttatcaaagcttaatgtacacaatattgacagacctacattatgccaatgcccagttgagagaaatgtaaacaaatgtgaagatgcagtattaaatcatagctgcataatattaactacagtattactgtaccactgcaataattttgtagcaccttcttttgctgttatggtgagcttgtgtgttccaagcatatacttcgaatgccatgtgactcaattatctccttgtgagctgttcatctctccagtaaattgcatatcatgataaaaagtaatgtctcagggttcttgcttattttttattatgtgtagtgcaataccgtaagccttgaatagcatcatgggatccataggaattgccactagtgatgctggaagtgctctcaagaagcagagaaaggtcatgacattataagaaaaagttgaattgcttgtatgtaccatagattgaggtctgtgggtgcggttacctgtcatttcagatagactgtgcatcttgttcatcttataaatagatgatgtgaactgacggcattgataaatacagtataataatgtaaatatatattttttccttataatttcttaacattttctttagtgtacttcataaaaatacagtgtttaacatgtaaaacctacaaaatatatgctaaacaacggtttatgttatctgcaagacttcttatcaatagtaggctattaatagattagttttaggggattaaaaatgttatatgtgtattttcaactatgtgtggcagttggcactcctaacctgtgttttcaagtgtcaattgtattttcattatcaacattatttggttcattgttttagtaggaaagtactttattattattttattattcttataaaatgtgatagcattgataaaaatatgcatggtaaataaacacacatacttataaattgctttaaatacttaaaatataaaactttatatttcagaattagtggtattcagaagacatacagaaagaagggtgaaaatgtggaggctttgagaagtaagtagttttcctagtattcaggccatagtatttaaagtacaactagaaaaataatttgcatagcttgtgggaaatttaaacttctctaccatgattttctgtcttgcttttattttattttattttttttgagatggagtctcgctctgtcacccaggttatagtgcagtggcgttctcttggctcactgcaacctgcgccttctgggttcaagtgattcgcctgccttagcctcctgagtaggtgggattacaggtgtacgccaccatgcccagctaatttttgtatttttgtggagacggggtttcaccaagttggccaggctggtctcaaactcctgacctcaggtggttcgcccgcctcagcctcctaaagtgctggaattacaggcatgagccactgcgcccagcccctgtcttgcttttttgagatactttcgtttatgtgattaatattcaaaataaaactaacaacatgacatttgtaaaagtaaaatgtagtatctattaaaatgaaaaatactcaattatttgaataaggctatgtccttgtttcagtttattattttgcatgtatatgcaatacatgttagttactttttgaaaaattcatttggcctatcgtagggtttttcaacctcagcactactgacattttggtcctgataattctttgttgtgaagaactgttctttaatgtagaatgtttagcattgtgtcaatgtgttagtcagtccccagaaccaatagaatacacacacacacaaacacacacacacgcacacacacacacacacacacacacacacacacacacaccagtatgattgtagggtgggggattaggggaggtttgttttaagtaattacttcatgagatagtgggccctggtaaatgtagaaatctgtaaggcaggttggaaactcaggcaagtgttgaagtttcagtcttgagctcaaaatttgtagacaggctgacaggctgcacactcatgtaggagtctgttacattcttgaggcaggactcttccaaggaacctgttttttctcttaaggccttcaactgattggataaggtttaccattattatcaagactaatcaagtttaactcagatgattataaaagttaatgacatctacagcaacttctacatcagtatttgaccaaataacggcaccatagcctagccagggggacccataaaattaaccttcacaagcagcatccctggctttgatcaccaaagagagaaggagttctgcctcaagaatgaaacagattcttgcgtgagtttccagcctgtcagcctatgaattttggacccaagatggcaactttaactcttgcctgagttttcaacctgccctacagatttttgggacttactagaccccacaatcttctgaagcaatttcttaaaataaaccttccctaatcccccaaccccacactcatacttgctccattgtgtgtgtgtgtgtgtgtattctgttggttctggagactgactgacacgctgctaaacatccctggcacactgctaaacatcctctcccagttgtaacaaccaaaaatgtctccagtctttaccaaatgtcttctaggaggcaaattaatttattaagaagaaagtaggtatagtggtatactaatagggttttagtttgcatttgcctaataactaatgttattaatcacctttttatatgattattggcatttggaggttttcctttatgaaatgcctattcaagttcttttcacatttttgtttcaagacctttgttagatacaggtatttaaatatttgatctcagtctgaggcttgccttttaattctactagcagtgtcttttgacaaacacaagtcttaatttgaatgaagtccaatttatgaatctgttcttttatggttacagtgcttttcacgtctttttattcaacattggagattatatataacctccaatgtaagttattggtacaactagttaagtataattataattgtaataacaattacaactaattgtttctaatgcaaagaagcaagagaatgaaataaaaggcatccagattggaaaggatgcagtaaaattatttgcagttgacacaataatctatttttaaaatcttttagattgacaaaaaataatagtggaactaaacagtgagttttgcaagatgataggatacatgataaataatggaaaaatcaattgtatttctatatgttaccaacacataattggaaattaaaattaaaaatagcatttagcatcaaaaaatatgcttacaggtaaataagacaaaaatgtaaaagacatatcctgataagtccaaaacattgctgagagaaattaaagaagatttaaataaatagaaataccacgttcatggggcagaacacttaacgtttagttgttgagttccctttcttattttaacttagattattggcgttaggatctgagactttttccttcttgttttatatgttagccttcttagtctagtttttgttgttgtttgtttgtttttgagacagggtcttgctctgtcccccaggctggaggacagtggcacagtcttggcttatcatagccctgacttcccaagctcaggtgattctcccacctcagccttccgagtagctgggactacaggtgccaccatgcccagctaatttttatattttttgtagagacgggatttcgccatgttgcccaggctagtctcgaactcctgggcccaagtgatcctcccacctcagcctcccaaagtgttgggattacaggcacgagccactgtgcctggccagcctagttttttgataagccatttctgcttcatcatttcaggtccccatctcctgtcttccttcattcctttacatatccattcagtgatattgcttcattaaatctaacctttcaagccatttctatgctattggttaatttcttgtttttttgccagtttatttaaatgcctataaatatccttgggaacaaatttttgtttaattccattggttccattggtaattcccaaaaattgggacacagaaaattcccaaatattttgtatactcttaaatcttactgtatgaacaaataaagtttatttttatttactttcattactgtttatatcgttgactgtaacaaagaagctgttttacctgctatcaaatatgctggtaactttaaatatgtatttatagatatagtgccttgaagattgctcaaatattatgaattatcatgcatagctgaacagacataaaaattacatttgagtcttcttttttcctgaactagatttgtcatttgacatatatgagggtcagattactgccttacttggccacagtggaacaggaaagagtacattgatgaatattctttgtggactctgcccaccttctgatggtgagttttctgtcttaaagaaaaaaaaacttcattatatatattctttaaatgtgtattgaataatttttgtcaatgggaccaacttctgtatctgtaaaggtgttttctttttttcttgattatacacatgtggttgtttttagtagaagataaaaatgattctatcatgtttaataaagtaaaaaggatctaattttgtacatatttctatacatatacacacgtagatgtgtatgtatgtgtttttattcatcattttcaagggaggataaatgagtaacttattggaaattaaatcagaactatagactatttgaggttgagaaaataaacacaaatatctaaatatacagcaatagttcagcaggaaataattgtaaatgttcatactatcttctaaaatagaattttaaaggcatacctcaaaagtataattttgatatgtgattgtttggtaggtgagaattcattatagtagctccatattatgacagtaaccaaatagagtggcagtacaataaatattttactttacaaaagggctgaattgtattgaatctgcatttcaactctttaaatgttatttaacttttaaaattagtttgattttgttctttgtccttagttgtatcactctttgatggtagtcataatatcttacatttgtataagaatttatgatttttcctcatgattcttcataatgtatgattgttttaattttcactattaaaacaatgaatatattagtgttcactgtataaaaaaggaaagctggaatttaaagagattaagtaatttggccatgaccacacagctagttaggataaaatttatagttctttaatccctccactattgcacagtgtctagaaaattgttactggaatacaagtgtaaatagtgtatcaatagatatttatgtttagtgtcaagcttttactttcttgcttttcccactatgttatatgacctgtaagtgatggaaaatgagattgaaatataagtggatgcggatcaccaataatattgaagggtgtgttgtgccttgtaaatttatattaatttttaccttatatgtctgttataaccaaataactaagttatcaggatacttgaaaacatacacattataaaataattaatgtacatttaaatatatattttgcttttagggtttgcatctatatatggacacagagtctcagaaatagatgaaatgtttgaagcaagaaaaatgattggcatttgtccacagttagatatacactttgatgttttgacagtagaagaaaatttatcaattttggcttcaatcaaagggataccagccaacaatataatacaagaagtatgctattcatatagaaatctttacttttatttcctgtaatcaataaccttttgtaatgacttgtgcaataaaaatatgcttgaaaatctaaatataacacttgttctgagccagcaaacagaaagctattacaaagaattagacagaatttggagtaaatgttttagcacacataaaagtttgtttcatctggaggatgcttgcctgccttattcctgccttctcttgctctcatctcctctaccccctcccacttccacacatacattaagagccatcacagtgatctcttattccttccctaccacccaagaaggcacaaaattaaaacctttccctcaagaatcttgttacctgttgttttcataattatatatgagtatatgtcaaaggcagttccatgctaaaggatcatttttaaagttgatattaaaattatttaaaaacctatgttacttaaatatctaacacattaaaacttaaaatatttaaaaagtaatattgataattatataaatggtatgatttttaaaataacattgttcatgctttacttttacaggtgcagaaggttttactagatttagacatgcagactatcaaagataaccaagctaaaaaattaagtggtggtcaaaaaagaaagctgtcattaggaattgctgttcttgggaacccaaaggtaaataaatattacttttacagatgagctcattttaaattatgtcgaattaaaaagcaggttgtagaaagatataatacattatgtaaaggttaagtgtacataaaatgctgtatgttattatggatataatcatagtaatgagattttaaaagtgaagtcagaaagatgtataactttttttaattttagtagctgtcaaggtactaaaggtttttggttacatggatgaattatatagtggtaaattctgaggttttagtgcacccatctcctgagtactgtacatggtactcaatatgtagttttttttattcctcacccccttccaccctttcctttctgagttataacatctttatgataactggttacttttaggaaggagaatggaagaatagactttagttatgactgccatgttttctttctttctttctttctttctttctttcttctttttttttttaatttgtagagacgagaccttgctatgttgcccaggctggtcttgaactggcctcaagcgatcctcccgcctttgccttccaaagtgttgggattacaggcatgagccaccacgcctggcctccatgttttatttctttaaaaaatgatctgaagaaaatgtggccaaaaaataacattgctgaattggaatggtagctataatagtattactctcttgttctctatagtttaaaaaatatttgttatagttaataacaaaagttaagaaatagaacaaaatcaaaggagtgattcagtttatcactgtcctgctttgattttgtatgtatttgttttatgctgttctctgtcatagaaacagagaaacaactgatgtaccactttacacagggcatcaaaactgacaggtgcatgcatgcagctaggatgatctcctattgatccccaccatcctgccacattcccccttgctgttgcagctggggaatgattctggatcctggctttatgttcattagtcttcctctcagccaccaccaccatgttcttttttatattaaaaatagtcttgaaacaaattgcttcccttgaactactataaaaccatatattcttctccaaaaaagcaagtgttacatctacaaatttaattgttaaggataatagcaatatacttaatgttttgtttttagtttgtttgtctgactgttgttatacttttgtcttgtgtattacaggcagtcttttagaattaaacctgggaaaatattcacatgtcaaatttataattttaaaaatttatgtgaactcaattatgaatgaaaaaatctgatctaatatatttctgattgaaaataataatttgaaatggggcagttttttagtgtccacatgcctgtttaatatttagtttttctgaggattccctgcccttcttcacctcttttcacacagatactgctgctagatgaaccaacagctggaatggacccctgttctcgacatattgtatggaatcttttaaaatacagaaaagccaatcgggtgacagtgttcagtactcatttcatggatgaagctgacattcttgcaggtgagatttttgttttattttcgaaggctgagatcatgggccaaaaggaagatggatatagagatgctaattcctgaggtataaatagagaagcttttacctagtggtatgtttccttcacaaaaaaagttctaaaaaattttaaaatgatacatttttgtgttgagaatctccaagaccatcccaggtttagtgatgtcctagaagaactcatatgactcagcacatagtcatactcatgactatgatttattacagcaaaaggatacaaagctaagttagcaaagggaaaaggtatatgaggcaaagtctcgaggaaaccaggtagaagcttccaagagtcctactcccagtggagtagacagatgtgctttaatttcttcagcattgagttgtaacaacatgtgtgaaatatctacttgggaaagttagtatatactcagtgttcaagattcttattgggtgctgatcacataaacatcttctgcctagcacataccaaagttccagattctcagaaggaaagaagttgtttggcataaaccacattgtttgtacagtttaggcactgagccactcttacctgttttgagaatagtaggaaccctcccaaatccaagttctcaactaacagccaagggccaaccttgtaagcaggcctttctaaggatagaagcctctgacctgctatgttaactcttttctgcacaattttatacacatacatacatataaagaatccaagttgaagtcaacacatgacttttaatagctatgacagatatagaagtttgaaattcttgagcaacttctgtctgcttataatataatctaataaaattgggcaagtcattcatgtcttcagtagtacctttatttttaaaaacccaacaaactaacatttgttcttcttattacttttgttgatttttggagttgtttctacatttggttataaaggaaattgtgaaagtgcttgtattggtaagccttttaggaaaaatatatttggaataacatatggtaagtagactctagagtcagactccttgagtagagttcctggctttgttacttaatagctgtatgaaacatatataaggaatgtattttctttttaccttagtattcatatctgaaaaatagttgatgataatctagtaccatcctcataagactttttgtgatgattaatgatatcataatgtggatgactctcatatgagaaaccataaaatgtaaatgccaattattaatgctgttgatactttagaaattgaaatgtaaatatttatctgcagataggaaagctgtgatatcacaaggaatgctgaaatgtgttggttcttcaatgttcctcaaaagtaaatgggggatcggctaccgcctgaggtatcattcatttttattgacattattctatattatactcttgctatactgttattatgttggaggcttgctgttatatgctttgaccatcatttatggtactaaatttaatttaaagccttcataatttacttttggctgtttattgtataatcattaattgtgatttttggtattctctagcatgtacatagacaaatattgtgccacagaatctctttcttcactggttaaacaacatatacctggagctactttattacaacagaatgaccaacaacttgtgtatagcttgcctttcaaggacatggacaaattttcaggtattacttactttaagtctcttggtgtttgaactgggatcctatattgggaataggtttcattgatttcctttttgtttccttctccatgtagtattgccatgctcccaggtggccagagttaatattctgtttctgctttattttgtttttgaaagccagaaaaaacacagcaaaatttttttttttacaaacaccatgcaagaaactgtaactaatatattaaatacttaagaaaatgttaaaaaacgtaaaaataattgtgtttactttgttgtcaagaaaaaaaagaaattgcttgtaggcctcctgagagtaaggcatatatgtatatagtttatatacattctcaggttcttttatagtttcatgatttcataatgaattatatgataaatccttgaattcttttaattgaggcattattttttaattttttaatgaggaactcaaactcagtctccttcctctgtttaggaattgcttgatagacaaaaggatgttattgatgtaagtacattgtgcagaattttcatagcatttatctcataatcagaaaaatacttgttttttttttaaaaagaaatcacaaattaagtggactgaagtacacttgccaacttaatgcactctgcctatcattctatctacttatacccacctatctcctattctttagtaacatttatatgtgcttattttctaccagatgctggtctgtgccttttgcaattattagtttatttcattatcccaatatttcaagaaatacatgagataaatactattattgctttcattttacaaatgaagaaactgagacataaaaagatttaaggaacttgcccaaggtaacacaggtagaaagtggtggagctgagttttgaacccaggcaaatcagttccagaactcatggttttcaccaccatactttgttgttgactcttacatttctttgaaaaattgtcacggtatttcactggatttcacagtgtcttctgggatctcctgtaggatggaccgtaagacctcttaagggaattcataatgtcagcactttttctaataataccaaaatgttatttgccttattgaccctcagcttctcatgattatacagtgttttccagagactgcataatatgtgctatcacaacagattgaatacagaaacaaatatgagaacccatctgtcttctgttaagacagacattaaagagatttgcagaaatgtaaaacaatattctcttctcattatttttgttttaaaagatgcagtttttaaaaataaaattgtgttaacccgtaataggtttacttttttattttttaaaagatgaataagtatttaaatgattactgtatgttttctaatgtacatatttattttattattcaatatagtaacattctcagttttaatttcaaatactgtaaaatttttgttagtttataatatgatatagatataatatggtaatagatatgataatagatatattcccatatataaaatttctttgaggtccttaatttataagaatgttaagcctgttacttaggctggagttcagtgccacaatcacagctcactgcagcctcaaactcctgggctcaagtgatcctcccacctgagtctcctgagtagctaagactacaggcttgcatcagtatttatgcctagctaatttatttttattttttgtagagatgggtcatgatatgtttcacaggctgttcatgaacttatttttaaaggatattttacaataatttatgataatatgcttaaagatatactattctttcatttttttcttttaggtttgttttctgccctagacagtcattcaaatttgggtgtcatttcttatggtgtttccatgacgactttggaagacgtatttttaaagctagaagttgaagcagaaattgaccaagcaggtaaaaacagaactaacaaaacattttaggcaatgaatcagacagatggtgaataagacaaaaattatataaatgtaattttatattttttttagaataaagggtagaaataagtaaataagtaatgagatactgatagtgataggagtaatgcaggaaataatggggtggtcttagaaggcagcgaacttagattatatcatcaggaaggactttgttgagatgatacttgacctgaggcctgtataatgagaaaaatcaagtaggtgaagattttagggcagaaattttcagataaagaactgcaactgcaaaggtattaactgaggaatgagttggatgtctttgagggataaaaaaaggctaccatggccggagccatagtgaagctattacacagcaaagtcaggaggatactcaaagggatagatcatgttctgcctttgaacgtctggaaaacaatttcatttgttttcctattgtagtgtggaagctatcagagagttttaaagcaaataggtaccatgatctgatttgaatttttaaaaaaacacgttctggttgttgaatgataagagtattataaaggaagtgtggaagtaggaagaccagttaggaaactgctatagttaatactatcttgaactagggtgtcagtgaaaatagggaggccgggcgcagtggttcatgcctataatcccagcactttgggaggccaaggcagggagatcgcttgagcccaggagttccagaccagtcttggcaacatggcaaaaccttgtcacaaaaaacacaaaaattagccaggtatggtagtgtgtgcctatagtcccaactactctagaggctgcggtgggagaatcacctgaggccaggaggtcaaggctgcagtgagccatgattgcaccactgcactctagcctgggcatcagaaggagaccctgtttaaaaaaaaaaaaaaaaaaaaaaaaagggaaagaacagatatttgggttatactggtggtagtggtgatgagttgctgatagattgagtgttagaggctcaggagaagttggaatgaagaataattcctaagcttttgataactgggaatgagattgccatttcctgaaaataggggaagaataggtttgtggaaagaaggaatgcaggcatgagttttttccttttttttttttttttttgagtcttgctctgtcacccaggctggagtgcagtggcaccatcccggctcactgcaacctccgcctcccaagtccaagtgattctcctgctgcctcagcctcccaaacagctgggattacaggcgcccaccaccacgcccagctagttgttgtattttttagtagagacagggttttgccatgttggccaggctggtcttgaactgacctcaggtgatccgcccgccttggcctcccaaagtgctaggattacaggtgtaagccactgcgcccggccgaggcatgaattttgagtatattgtttgagatgcatctggagttaaatgaagatgttacggctgaagatacagatttggaagttactcacaggtagatggtgctatggaattggatgaaatctcttagttgggtaaggagtgtagataagaattgaggggcaagcctcctgggtgagcagtggagaaggagccaagagggctgaccgtgaatgagcaattattactctactttttcatgaaagagtggaaatggaaaaacctagaaaaatggtgtttaggaaagaggaagtggtcagttatttgtcaattgctgtgaagaataagatgaggacaaaaaaggtagttttggtaacagaggacggtgagggatttggtagactgtaagagtggtgatcttgacagatcaatttcatgatgcagtaaggagcaaggtggatctattcagtttacggtaagaacatgagttgaggaaactttcttatgatcgaaggttagcaaaatgtttgtagtggcaggtgaggagagcaaaggaaaccaggatgttagttcacagttgttaaaagagttgagatgctgcaaatacacattttgcatgaatgccgagtgggtgatgattaaaatcattgtgataccaaagtcaagaatcaagctgaatatatcatcatgaagtaaacttgcttatattatgctaaaataaatctggaacttaaaatattactagaatttaattattcatggtttggtagtcaaattttaaaagattggccttattgtgtgggaacaataatttgtcagcattgctaactgtaaagttgctcctgtagtcctacgtttatgataccagatgcccactttcaaatgcagtgaggagaagccatatatttttgagttcttaatttttcttttgttattatgtctggatcaaagaagatttatctgaaaattaatgtatgtgattttgtagtttctccttcttttgaaatttttaaatgatgaagtgggcattctgcttttagttcaccctcacaaattgtggaagaatccacaataaaacttttatattgaaagtgcgtggccttaatggaattaaataactaaaaaaagaagcaagtctcccaaatttgttttaatatcttgagtactaatatactgaaccactacataaaattaatattatataatctgatttctttttatattattatctaaattaaaaaatacatgtattggcccaaaagttataatgttcttcctaaagttatctcactagtacattctctttaatatttgcattaactgttaatatttttctgtgttgaaagttctgaatgtttttgagtttaaaataaacctcaattgtgtagtattttattcttgccattaaataaatatatgtttatggtttaattggtagaattttatttttttatttatttatttttatttttttttattattatactttaagttttagagtacatgtgcacattgtgcaggttagttacatacatatacatgtgccatgctggtgtgctgcacccactaactcatcatctagcattaggtatatctcccaatgctatccctccccgctcccccaaccccacaatagtgcccagtgtgatgttccccttcctgtgtccatgtgatctcattgttcagttcccacctatgagtgagaatatgcggtgtttggttttttgttcttgcaatagtttactgagaatgatgatttccaatttcatccatgtccctacaaaggacatgaactcatcattttttatggctgcatagtattccatggtgtatatgtgccacattttcttaatccagtctatcattgttggacatttgggttggttccaagtctttgctattgtgaatagtgccacaataaacatatgtgtgcatgtgtctttatagcagcatgatttatagtcctttgggtatatacccagtaatgggatggctgggtcaaatggtatttctagttctagatccctgaggaatcgccacactgacttccacaatggttgaactagtttacagtgccaccaacagtgtaaaagtgttcctgtttctccatatcctctccagcacctgttgtttcctgactttttaatgattgccattctaactggtgtgagatggtatctcattatggttttgatttgcatttccctaatggccagtgatggtgagcgttttttcatgtgtcttttggctgcataaatgtcttcttttgagaagtgtctgtttatgtcctttgcccactttttgatggggttgtttgtttttttcttgtaaatttgtttgagttcattgtagattctggatattagccctttgtcagatgagtaggttgcgaacattttctcccattttgtaggttgcctgttcactctgatggtagtttcttttgctgtgcagaagctctttagtttaattagatcccatttgtcaattttgtcttttgttgctattgcttttggtgttttagacaggaagtccttccccatgcctatgtcctgaatggtaatgcctaggttttcttctagggtttttatggttttaggtctaacgtttaagtctttaatccatcttgaattgatttttgtacaaggtgtaaggaagggatccagtttcagctttctacatatggctagctagttttcccagcaccatttattaaatagggaatcctttccccattgctcgtttttctcaggtttgtcaaagatcagatagttgtagatatgcggcattatttctgagggctctgttctgttccattgatctatatctctgttttggtaccagtaccatgctgttttggttactgtggccttgtagtatagtttgaagtcaggtagcgtgatgcctccagctttgttcttttggcttaggattgacttggcgatgcgggctcttttttggttccatatgaactttaaagtagttttttccaattctgtgaagaaaggcattggtagcttgatggggatggcattgaatctgtaaattaccttgggcagtatggccattttcacgatattggttcttcctacccatgagcatggaatgttcttccatttgtttgtatcctcttttatttccttgagcagcagtttgtagttctccttgaagaggtccttcacatccctcgtaagttggattcctaggtattttattctctttgaagcaattgtgaatgggagttcactcatgatttggctctctgtctgttgttggtgtataggaatgcttgtgatttttgcacattgattttgtatcctgagactttgctgaagttgcctatcagctgaaggagattttgggctgagacgatggggttttctagatatacaatcatgtcatctgcaaacagggacaatttgacttcctcttttcctaattgaataccctttatttccttctcctgcctaattgccctggccagaacttccaacactatgttgaataggagtggtgagagagggcatccctgtcttgtgccagttttcaaagggaatgcttccagtttttgcccattcagtatgatattggctgtgggtttgtcatagatagctcttattattttgagatatgtcccatcaatacctaatttattgagagtttttagcatgaagggttgttgaattttgtcaaaggccttttctgcatctgttgagataatcatgtggtttttgtctttggctctgtttatatgctagaattttaacataaagtacgtaaataaatttttattccaaatacatttggaatgtttaactgtaatttaaatgaatattaaatattaaaatgaaatctgaatgacataccttattcacactactgaatttgttataccttttaagtgttgtgctaataatctgtatgatcacactgtcattgatcatgtacaacctcagtaatcccaggaaattatattgaagtaggcattggctcttaaaccttccaaagactaaagatgaagttgaagggcagaatttggctgaaaactgagcctgaggctaaattttaattgagaagtaatgtaaagccaggagaggactctcaaacatggtgataagagagaagtctcgtgtatgatcaggatatgatgctaagttgtggtcagagaggaaaagttcacataaaagttggatattatacagatacagagataataagatcttaaatatggatatgtatccagtttgattttgaactagtggaattataccatgtgtctcctttgcatctgtcctctttcactcaaaatgacatttgtgaagttcagccatgttgttatgggtacagtagtttgttcattttcattggtttacactattccatagaatagtgttcttgttcttagtagaacaagaacattctcatgttcttgtacatgtgttttggtgaaacctgtattcatatctctgttgggtttatacctgttggggatctcttgggtcataagatatacatatgttcagctttaatagatactgccagaatataagagagttccatttgttccacataactgccagaccaatgcttctttaaatgttcctgcttcagaaagtttgtatcttttttaatgaacatactgaaatgtttgttttgttttggcaaatagattatagtgtatttactcagcagccactggaggaagaaatggattcaaaatcttttgatgaaatggaacagagcttacttattctttctgaaaccaaggctgctctagtgagcaccatgagcctttggaaacaacagatgtatacaatagcaaagtttcatttctttaccttgaaacgtgaaagtaaatcagtgagatcagtgtaagtataattatcacccttatacctgatggattgctttttaaggatacacattggttttaccatcttaatttttaaaatgttaacatatgtaaataatttatatagtttcgaaagattaccactgtaatttcacaatgttagagaaaaaaattacaataatttcatcgaataccctgtcttacactttttaaactagcatttattgtctcatctataaagtgaggaaataacaaatattccctaattgtataattttttaattactgtcattgtatctttttctttctttcacctgggagcacagattcaagtttccttgaatatattaatacactccccattgtatcttaaattttgttttgcgtttctattttttcgctattttttgcgtctattagttagtttttataaccactttttgtaagtagcaggaaaaatgagttttacctctatttatcctatgaggaaactgaaaaataaagaaggctacatagctagtagatctgggatcaaaatgacatctcaagttagctttagcccttctcagttaggttctcctagggtactaggaactgaataatttggaaataacattaaccactttcatataccacacacctatcttgttaagtccaaaatgtcagtagtaataaggcttaatcattaagattaagaatattgttatatgtttggaatatgctaaatttatatgctcttctttgaccaaattcagtgtcaaacaaatgtcaatcacgtatctgatttattccctggtcggcattactgaaagaaaaatgtttatttaaatcagcatgtttcaatttattttattatttttttatactttaagttctgggatatatgtgcagaacttgcaggtttgttacataggtatgcatgtgccatggtggtttgctacactcatcaacctatcactacgttaggtatttatcctaatgctatccctccccagtcccaaccctccaacaggccccggtgtgtgatgttcccctccttgtgtccatgtgttctcgttgttcagctcccacttatgagtgagaacatgtggtgtttggttttctgttcctgtgttagtttgctgagaatgatggtttccagcttcatccatgtaccttcaaaggacatgaactcatccttttttatggctgcatagtattccatggtgtatatgtgccacattttctaaacaccactctcataaaatacactcagaaaaataattaaaataccatctgggctcggtggctcaagcttgtaatcccagcactttgggaggccaaggcaggcggatcacaaggtcaggagatcaaggccatcctggccaacatggtgaaactccgtctctactaaaaatataaaaaaattagctgggtgtggtggtgggcgcctgtagtctcagctacttgagaggctgaggcaggagaattgcctgaactcgggaagcggaggttgcagtgagccaagatcgtgccactgcactccagcctggcaacagagtgagactccgtccctgcccccccgcccccccaaaaaaagaaaattaaaataccttagtcagctttgactgccatgacaaaataccatttactgggtgacttaaacagagtattattttctcacaattctgatggctgcagttctgagatcagggtgccagcatggtgatggctgtcttcctggcttgcagaaggccaccatctcactgtgtgctcatatgacctcttcatgtacactggcatgcaccctctggtgtctctttataaatgtactaatcccatcatggggaccccaccctcatgatgccatctgatgcagattacctttccgaagtcccatttccaaataccatcatatgggagttagggcttcaacatacaaatttggggaggcacaaacattcaatccataacaaaatgtgttccatggtcaaatacatttagaaaatattactcttatattccctatattaaagagttattcattagcataaaaaacatgagatgttctctggtaaagaaattccttcaactttgtttaacctcatgtttccaaatattatttaattgtgaatattttttaacctaaatcacttcttaacttattatggaacttgatcaatgccatatgcttttgaaatcttagatataacaatttaagaatttttttaaaaaaattacggggtatgtgaaatttataaattgctgaagtatgataatctaagctctccaactgcttgttaggacacttattacatgtgatatatagatattttatcagataagtagctgctcttcagataaaagggcattgtagtataccttgctttgcctcctgagagcagcagtggcaattaatatgataaaattgcgattaggatgagatttcaaagatatcagccattcagagtttaattgtatttttatttgcttctctatatctaaaatatttttcttgttacgtgaaaagtaaatggggctgggtgcagtggctcacacctgaaatcccagcactttggaaggctgcagcagctggatcacttgaggccaggagtttgagaccagtctggccaacatggcaaaaccctgtctctactaaaaatacaaaaattagccgggtacagtggcacatgccagtcgtcccacctacttgggaggctgaggcatgacaatcgtttgaacctgggaggcagaggttgcagtgagccgagatcacaccactgcactccagcctgggtgacagagcaagactccatctcaaaaaaaaaaaaaaaaaaaaaagtaaatggttaagatagagacaggacaggaagtaattccttcaggagtagagacaaatatttgagacataatgtcttgtgttttaacagttataactacgtgtttacatactcttagaaaaatttaagggcatcactgatctaaaatacacttttataacttttaattttgtcgtacagtattggctttctctccagtattgtcataagatcattttggggaatacgatttcttatttttttttttcagttttttttctttgtttttttcagtgattatcttttaactatctagagtttaaatctataccaatgtaggctggtcaaggtggctcacacctgcaatcccagcactttgggaggctgaggcaggcaagctccttgtttgagctcaggagtttgagaccagccttggcaacatggcgaaaccccatctctataaaaaataacaaaaattagttgtgtatggtggcgtgtgcctgtagtctcagctatttgggatggtgaggggagaagattgcttgagcctgggaggtggaggttacagtgagctgagatcatgccattacactccagcctgggtgacagaaccagaccctgtctcaaataaaaacaaaaaaagtccatatcaatgtgaagggagagttttaattgattttcatattaatgtacctttgtaccctgagctgtgttgttttttttttcttttcaggttgcttctgcttttaatttttttcacagttcagatttttatgtttttggttcatcactcttttaaaaatgctgtggttcccatcaaacttgttccagacttatattttctaaaacctggagacaaaccacataaatacaaaacaagtctgcttcttcaaaattctgctggtgagagtgtgtgaaggtctgtgaacgagtgttggcatggagcatggggttgaggggtggataaaggtctggattttaaaactatatttaaggtaaaggcatggtctgtctgcatgaaatctaaattatagttcaatacgtatcttattgatgctgaagaatatattacagtaaattttggtttacaaataaatgacagttttggccaggtgcgatggctcccacctgtaatcccagcactttgggaggccaaggcgggtggatcacctgaggtcaggggatcgagaccatcctggctaacacggtgaaaccccgtctctactaaaaatataaaaattagccaggcatggtggcacgcgcctgtagtctcaggtactcgggaggctgaggcaggagaatcgcttgaacccgggaggcggaggttgcagtgagccgagattgcaccactgcattccagtctgggcaacagagggagactctgcctcaaaataaataaataaataaataaatagttaaaaaaatttatactttgtataatagtagaatttccttttttaataataacgttattcttactagcatgttttatgctgataagtccatgatgagcaaaatatacttcaaaagttgaaaaaccctctttacaaagagttgtagtacataatatttatacaggtatgtgtctgcatagaagtgttttaattcttcaaggacagtctgaagaattagttaaaactaagaaaaataagacttaaatataaatatctctaattgaatatattagatttgtaatggatatttttggctttgctattagtattcttaccatgtagttgtcaaatatgaaaaaaatttaaacatacagacttgagcaaagctcaaaacaaaaaactgacatagtgttctgattttcaaaatattaaaagctaatacaaactttattcatatgtgatcagttgttcctataacatctcctattctgtagcagactctttggggtttaacctttctaacacttcacctacattctagtatcattcctttttgattcactaattcaaaaaagactttgcccagtattaaaataataagcatggctaggaatgattataaattagtattaaaataatcactgttaaaatctggtgcgtgttatattacataaccttcattctttctggtaaagatgtatttattgatggataaatgagtgagaacatggaaaattacctggagcatggaaaattaatggaaaattactcgaatggaaaatgttaggttttgcaattttttttctttcattaggaaatttcattatgaattctcgttttggttttaaaatacattttatattgctaatatataatccttacactgtgctaatcttgacattttttatatgtgtccagggaattgtacatgtatctcaaatatttcttttttttttaaaggaacttggattcaaatcatatctttttgctttgagttaattctcattgatctgcagaaattctagtattttcagtttgtctcttaattttttattattcttagagttgcttgcttatgcatgccatattttcctaagccttgtgtgtgttccaaaataaaaccacttttttttgaaccactggcctctgtgtgtatatatattgggtggtatcttacccaccttgcagagctttttgtatctcttgtgctgtggttccttcacttataatgtgtctctcttctcagggtacatagctggtcttgcaagttagagataagagatcagttaaggtactaggttgggagtaaagtagtgtcaccattctctatgacactgagatctagtgctgtgtctgatccaccctgccatactattcagttactagtaatgttttgctttgtttgatttaaatttctctctaaagtcacatttgtccttccctgaatcctgatttttgttatgatggaggagaaactgcatctattcggcagacatgttggtatagatttaaatcccgacaggatttaaaatcttactcttggctccaggtactttagagaatgtagagatgtgattatgtgtttgaatattttaaggtagttaaggcaattgacatgtctgcccagagcctacaaaaaattctctagggagtgatgttaccacacctatacctttctgaacttagcaggttatcttgttacctaaaattgtcagatagatttttattcttattatttaaccaaatttcatgtgttataggttaacttttcaatgttaataatagttgtagcagcagcagcagtggtggcagcagcagcagcagcagctaaaatatgcgcagttactatgtgtcaggttctaaactctgtgtatatattcagtcatttaattctcaggatgatcactctacctataaggcagatatacttattttacccactttacaaaagagggaacttaaggtccagaacatctaggtaacttgcttgaaggacgaatagtttaatgttacaactcaactttaaaaccaggctgactggcttcagagccaatgtacttacttgcgtattcgctaatgaaaataaaatatttctctaaaaatagaattatcttcccagtgttactaaaagcctcgtttagactcattttttattatttgcttattttctaacaccagactcagatatcagtgatcttattagctttttcacaagccagaacataatggtgacgatgattaatgacagtgactatgtatccgtggctccccatagtgcggctttaaatgtgatgcattcagaaaaggtaagatgaatgcagtgaatgaatatccatttgggagttatgcaagattaaaacgtttcttctaaaattaattatttgttgatttgaccttatgagttagaaattagattttacttttggaaataactagctgtctttatttatgatatatttcattacttcacagatgaccaatatataaagttacagaaatttagttttttaaaaaattatatgcttgtttaaaatattaaaatatctgtacattccaaaccagattgtctttatctgtcattgagtattatttctgtgagttgttgaagcagtttttctgtatgagaattagctttgttggtgagaaaagcttggtacatatcaataatatatccgcttatatacagtatgtaataagtgtcttttttttaattgtaggactatgtttttgcagctgttttcaacagtactatggtttattctttacctatattagtgaatatcattagtaactactatctttatcatttaaatgtgactgaaaccatccagatctggagtaccccattctttcaagtaagccaatgtatatacagataaatttccatatgcatgtcatatatataataaccattaaaaactaagcaaaaataacaaaatatgtagaaatttatcttgtgagatctcttagacttcttaaaactcaagtgagaaacggtttacattaaggtttaggattccccagtagaagtatgtttcagggtaaaggagattctgttttggtattaatatttgtataaggaataagtgtgttctatattgatcatagaataaaatataagataatttttaaatgaatattttttacctaaaatccaggtattgggtattgaaaaaaacttgagaagtcacccaggcaaccatttttcctctagatagaactgttggattgtacatatcagaatcaagattacagaaaagtatccaacatattttctcttaatccttttgattttcatatgctaaaaaataaatggacaaatatctgtaacaatattttctatcttcttcttttcatacttttaaaaacagcttcattgaaatataatgcccaatcaacctgaccattattcaaagtatacacttcggtgtcttttattatgcttatagagttgtgcagtcatcactacagtcagttttaaatatgccatcacccccctccaaaaaaaataacccttatactcattagtaatcactcatttcctctcatacccactcccaaccctaggcaaccactaatgtactttctgtttctatggatttccttattttagacattttatataaatggaatcatacagtatgtagtcttttttgtctgctttcttgtacttagcatactgctttgaagattcatctgttttgtaacacgtatcagtgcttcatttatttttactaccaaatcatatttcattgtgtggaatgtatggaatgtttatgtgaaatactgcattctacttatctgttcatcagttgatggcatttgggttatttccaccttttggctattatgagtaatgcttatgaatatttgagtagaagattttgtatgagcatatgtttttatttctcttggatatataattaggagtggaattgctagatcatctagtaactctatgtttaacacttgaagaactgccaaactgctttccaaaatggttgcatcattttccatttccagcagcagtgtctgtggagaggtatctcatattatgaaatatttcaaacgtacagaaaacgaaccacctactatccaaatatttcaaatgttaatattgcataatatttgtttttagtaaaacttttaagacacaggtgaaaactcatgttacccctctccaatcttgtttccttctctcctccgtaggagtaaccgcaattcacaatttcacaatttgtaattcccatacgtgtttttttgatgttactacatatgtctgtatccataactattacacaagattttacaacttacaattttcaacaacactgacatataatcatactatatttcgaaagaaatacatgggagtttttgaagctaactattcatatatagtcgtattaatatttcaaatttgtttcttcattagattctgtatgattggatccaactgtagtctcattcatttccacttcttgcactactagtctacatatttgtgggttctttctgagcctccactgtcatattacgagagtttcagacaaattctgcaatgtcatatgacctgaactttggaattgacttaattgctaaataggaaaactcagaaggctaggtttcagcaagacagtgatgtactctgtctctatgtcatcccatggaggggtgtgccagtgcgagggtatctgctaggcactgcggattctattccagtgcagagtaccttctctgtcccacgggtctgtattcttatagaacaaggggaggaaactgaccttggtgagggtggctgataatatagtatccttggacttgggtaatctgcatttgaagtgctagctgtttattgattgtctgggaaagttagctgactgcacctggatccctggggaagctaacgacattggggcctgtgggagttaattcctcttctgcttgggagaagaagttctagttccataggaagctgagcttggatatagcttttcccaattaaaaagacaagagcaacaaatatcattcttagatatttattattatttcataggaccactatggtggacatactaactgcttttcaaatacatcattcatttttatgaaattgtgaagcgtaatttatatgcctgattattctgtgttgtagacaggaaaatgaaagtaaaatgatttgcttaggatcagatagttattaataagtggcagagttggtaatattgtccacaaccacctgttaatacatctgccactcattctttcatgtagactatgcctgggttagatattctaatacattctttctgaggttttgatttttttttgatataagatatatcctaagatatatcttaagatataaaatgattctcagttccatttgttactctgtggttgtctttcaggaaattactgatatagtttttaaaattgagctgtattttcaagcagctttgcttggaatcattgttactgcaatgccaccttactttgccatggaaaatgcagagaatcataaggtaatgactcagttaaaaatatataatttgctaataagaagtgtcatataaaaataacctatttgcttgattgcaaggcttagtataattgttatttcagaaataagtaaatggaatataaatacatttattatagtttcttattgtaataagtgataattaatatttattatttgagacttgctacatgctttaaaaattatattctctaattctcacaacattgtgaggtaagttttttgttactgatttcttatagatcaggaaatcaaagatgggattgttcatatgacttgctcaggttgactcaacttgtttaaattgtggatttgggaagtgactgtgatctttatgttcttaactggcaaactaacatgcccgtcccttttatcctttaacagaggtattaagtagtcaaggtgctaaattcttattaatggaaaaaaaatagatgaaagtgattgtcatcattagggccttggagaaattgctaagtatacagaggttctttggtattctttcactttctttttacgcctttcccttttgttttccttcaggcatatagcgatcttgtacagtctttggttgttcaaagcctcccactttttcactctgctgagattatatcttactgctctaataaaaattctgatcttcttcatggatgatcttaattcagtaaaaacaaatttgtctaaattaatttacagactgtgatgaataatgagctcattattttaataaattctaaaaaaataaattgtaggccaggcgtggtggaccacgcctgtaatcccagcactttgggaggccgaggtgggcggatcacctgaggttgggagttcgagactagcctgaccaacatggagaaaccccgtctctactaaaaatagaaaaaaaattagggcgtggtggtgcatgcctgtaatcccagctactcaggagggtgaggcaggagaatcacttgaacccgagaggcggagattgcagtgagccgagatcatgccattgcactccagcctgggcaacaagagcaaaaactccatctcaaaaataaataaataaataaataaataaaataaataaatacattctaataaaaattttgttatttgtttactataaaagtaacacatatctctatttttaaaataatattcaatttttgttaaatatactcattgtagtaatgtataaattatagaaaagtataaggaatatagaaatccataacccactgcacaataataaaatttactggacatttgcattttctttcttgtttcaactgaaacattttttttccaatataaattttttatttttatttatttattttttaatttttttatttatatatatatatatttttattatactttaagttttagggtacatgtgcacattgtgcaggttagttacatatgtatacatgtgccatgctggtgcactgcacccactaacttatttttaattaaagtttctattttgagatagttgtatattcatgtttgtttgttagaaatgacagagagatcctgtgtactctttacattttgtcccaataataacatctcgtaaaattatagtacaatgtaacagggtattggcattgacacagtcaagatacagaacatttctgtcaccaaaaagattcccattttttgctctttcctagcctctctgacctgtggcaaccactactctgttctctatttctgtaattttgatagttcaaaaatgtaaaatggcatcacaataagttttcttttgggattggcttttttcaaatagcattttttttgaagttcatcctatttgtatttatcaataatccattccttttcattgctgagtaatattccatggtatggatacatcacactttctctaaccatttgcctgttgaagaacatttggattgttttccgtttttggcttttgtaaagttgctgtggacatttgcatacaggttttgtgtaaacatcattttcatttctctgagataaatgcccaagagtgcaattgctgaattatacatgttaattttataagaaattgccaaattattttccaagatgagtgttccattttatgttatccctaccagcagtgtgtgaatgacaaaagtttgaattatccaaaataattgcatttgccttagcttatgtttttattcttgtattagaatttacatgtgtctcatgttctcataattcattgaacagaaaacttgccaattttgttcatttctcctcttcttaactaatctttatatttcatgcttcctttatctctgtggacagctctttcatataataccttcagttattaggagtagatatttttatagatgacaaaaatcaactaaataaaattgttaggtatttggatttatgaaatattttagaaatttcaaattaaatgagaacatgagataggaaaactatgatcatttgagtttaccattaacaaacttgtgacgtaaataacaccttagatttatatgctataccagtgtacacaaaaggctttgaacatttcaaaagctttcacttaagctgaaagccttatgtaaatccaaaggatacttggcaatttattagtgtttttatttatgaaaggttcatttttaaaactgagaattctttttctgtgtaaacatgtcttcccatctgtttccacagtatttcaaaagtagtaatgttttggctatttattatttgtatagctgtaaccccaaccgccatgacaccttttgctttattttaatctcagtttcttggcagcactactgtattctgattcttaaaaattttgttgaaattgttacatctcagaaataatgagccaaattaaaggctaaatggaatttgtatttagtgtgagggggacttttattacctataagcctggaatgtaacctttttggttttgctgatgtaaaattaagagatctacaataatttactaatttatttgtgtgtttctaaagtgtctaaaattataataaattgtttttcattttttttagatcaaagcttatactcaacttaaactttcaggtcttttgccatctgcatattggattggacaagctgttgttgatatccccttattttttatcattcttattttgatgctaggaagcttattggcatttcattatggattatatttttatactgtaaagttccttgctgtggtaagttaacgttagttgtactcatgctatttatagatagaatgttatttaaaatctgttataaacatgacagttgacttattgcataatttggttattaatttgttaaagaaaatagagcaagtgtgtctggtatttaatacatgtaatcattttatatgataagtgacttttaaaaacaataacttaccaccattttaaaataatttcttgaaactaaagtgatctttcatgtagaccacctacttgggtgtaatcaggaacgttttaatatattccttccttaaaatgccttccttcgtttttcttatgcctgaaaataatttcacaaaggataagctcttttattccatagtttaaaatatagcttaacatttctctatctcaataatgggcaggctgcgagccagatgaagaacacaactccatttacaatagccacaaaaaattaaaatacctaggaatacatctaacagaggagatgaaagatctctacagggagaactacaaaacattggtgaaggaattcagagatgatacaagcaaatggaaaaaaatttcatgctcatggattagaagactcaatatattaaagtggccatactgcccaaagcaatctacagattcaacactattcctatcaaactaccaacattattcatcacagaattttaaaaagctattctaaaattcatatggaaccccaaaagtacccagatggctaaaggaatcctacataagctgggcgcgggggctcatgcctataatcccagcactctgggagaccgagacgggtggatcacgaggtcaagagatcaagaccatcctggtcaacatagtgaaacaccatctctactagaaatacaaaaaaatagctggacgtggtggcatgcgcctgtagtcccagctactcaggaggctgaggcaggagaatcgcttgaaccggggaggtagaggttgtgttgagccaagatcgtgctactgcactcaagcctgggcaacagagagagactttttatcaaaaaaaaaaaaaaaaaggaatccatgtaaaaagaacaaagccagaggcatttcattacctgacttcaaactatactataaaggctccagtgaccaaaacagcatggtattggtacaaaaacagacatgtagaccgatgaaacagaatggaggacccagaaataaagccacacatctatagccatctgatcttcaacaaaattgataaaaataagcaataggaaaggactctgtgttcaataaatggtgctgggatagctggctagccatattcagaagaatgaaattggacctccacctttcaccgtatgtaaaaagtaactcaagatggattaaagatttaagggtaagacatcaactataagaattctacaagaaaacataggaaataccattctggaccttgggaaagaatttatgggtaaataagtcttcaaaagcaattgcaacagaaataaaaattgacaagtggcacctaattaaactaaagagcttctgcacagcaaaagaaactatcaacagagtaaatggataacatacagaatgggagaaaatacaaactatgcatccaacaaaggccaagtatccagaatctataaggcacttaaacaattcagcaatcaaaaaacaaaactccattaaaaagtgggcaaaagatatgaacagacacttctcaaaagaagacatgcaaatggacaacaaatgtatgaaaaaatgctctacatcactaatcatcagagaaatgtaaatcaaaaccacagtaagataccatctcatgtcagttagaatggctatgattaaaaagtcaaaaccaacagatgctggcgaggctgcagagaaaatgaaatgcttatatactcttatatactcttggtgggaatgtaaacttcagcagccatggaaagcagtttggagagttctcaaaaaacttaaaacagaactaccttataactcagaaaccccattactgggtatatatccaaaagaaaataaatcattctaccaaaaagacacatgagtatgttcattgcagcactattcacaatagcaaagacatggaatcaacctaggagcccattgaccagtgattgaataaagaaagtgtggtacatatacaccacggaatactgagcagccataaaaaagaatgaaattatgtctgttgcagcagcacaggtgcagttggaggccattattctaagtgaattaacaaaggaacagaaaaccaactattgcatgttcccacttataaatgggagctaaattgggtaaacatggacataaaaatggcaacagtagacactgggcactactagacgggggcaggaggaaggggagcaagggttgaaaaactaactgttaggtactgtgtccagtacctaggtgacagaatgaattataccccaaacctcagcatcatgcagtatacccatgtaacacacctgcacatgtatcccctgattctaaagtaaaactagaaattacttaaaataaaatatagcttaaaatatcaaagaagagactgatttgcattcatgttcacatgtaaatgactgacagcaggccctttcattgattactttattaggaaaaagggaaaacagagttacatgaggttgatgctgaaagtaaatttaccgattttgtcagagatcataatgaccttatatattagtttctgccatataaaataataatgtttttcttacacattaaaaaataaagtgctgtatattaaaatagtagctaatatttgagagagagaacgttgtagctagctatacttgctttttataataatgagagatagtattttacttggtacaaaaaactacaagtagtgttcagtttaaatgatttatttaggattatattaataatttcatattttaatatggctagtatttcatgtcatgtgtattgcaagctattcatatttttatagaaacatatttctgatttacaggttttttgccttattggttatgttccatcagttattctgttcacttatattgcttctttcacctttaagaaaattttaaataccaaagaattttggtcatttatctattctgtggtaagtcacattttacattatttcaactttccatagcagtttaattaacatgaattctttcctgattatactaaaaatgttacatgtcttttgtaagtgaataatttagataggtaattggcagcttctttttgtgtgtacatttgtcttctgaatcatcctttccacgtaggaacaatatggaagagatttagcaactagtgtatcaaggatactagctacaaacaagtggtattcttgttgcttgctggctaaatatcatctcttgttccatgttttattagaggattgaaaaaatagtttaatgcgtagacaccaatttgtaagaagtttctaaacactttgtcacttttatttatttatttttttctttaggcagcgttggcttgtattgcaatcactgaaataactttctttatgggatacacaattgcaactattcttcattatgccttttgtatcatcattccaatctatccacttctaggttgcctgatttctttcataaaggtaattctgctaaatattttaatatgttaaaaaacataaaataaatatggtctaatttggggatgttagttcttgtatagaaaacagtaaaatgcattgggctaatggctactacttgatttagatattattaatgcagcataaattattgtgagctcttgtcaaactgtaaattctcaaaggaaaagggctatgttcattacaggttctctcatgctcaaaatgatgtatataattagaagtgtgacatggtttcagtcagtatttgtttttaggagtttatcagtgattaaataacgtatttcactataaagggatgagaaagaataaagtgtaagagattttctccaagaaaaaatagagacaaaaaccagattgattttattaaggctggataattgaaagaaatttccatgtgattagaaaaaatattgttatgaattcttggtttggaattgctaattaattctacttactaatcctactacccctgcttccctttttaggtctcagttcaatgtgtttaatttatactgatcctcagaaatattttgggacagggaagattttaagtaaaaaacataacttactaatatgaacagctaacttattatagaaagtacacgtttgctaaacaaaatacattttttcattttaatccaaatatttctacatattgcagcgtatatattttcaaatctttttgtcttagatttcttggaagaatgtacgaaaaaatgtggacacctataatccatgggataggctttcagtagctgttatatcggtaagaaataaagtgtttttgtgaattagcatgtaccttaagaatggtttggtcctatggttttaactatgtttagttttttatcctgttgcatgaaaaagaaggtgcataaaaagttaagcatgttagttaacgctagctaatctgtatttcagtggggagtacctttcatttactgaatatgttcactttaatatacttagccttttacatgttattaattctgtttaattacagttctgtcttagaagcaaaaacaaagtttttgtgttcgattatattttatgaagctgacaataaatgaatgatacagaggcagaaaatatgtgaataatttgctaaaaataattctgctttggtttgtattaaaatttatttttaattatctttatcatgtaaaatataaaaaagttgtgattacttcttttggtaatggcaaggaacttgatgtatgtagtcttagttctgttggcaaaggaaaaaacaacaacaacaacaacaaatcttttagtcatgagctgctacatgttcttcttttagccttacctgcagtgtgtactgtggattttcctcttacaatactatgagaaaaaatatggaggcagatcaataagaaaagatccctttttcaggtcagttgattttttaaaaattttaaatgtttttagtatatttacagaactgtgtaaccattaccataacataattttggaacatttccagcactccaaaaagaaactttgtacccattaacagccactttcttatccctattcccatagctcccagtcttaggtaaccactaatctactttctgtttctgtcagatttgcctgttctgaacactttatataactggacaatggaaatatgctttggaaaacttgagtcaaaagaccaacaattctcttaaataccttgtatttaacttttatatctgtttgctttttaccatagttggttggcatgttattttaatgttggaaaatcatcagatttgccagataacatctttgaaaaattgctaggatttgggcactataattagtatctagcatatggttttacacttagtataatgtttggagggcttatcatgtagtcgtgtgtagcactttttatatatcttaatgagttgcttttacttttcaactattatgaacaatgctgctatgaattcagctattatgaacaatgttgctagtttgtatacaactgtttgtatggacatatattttcatttctcttgggtggatacctagaaatgggattgctgggtcatttgaggaattgccagactgtttctaaagtggtaataccattttacactcccgctaggaatgttttagggttctattttctccacatccttgccaatgcttgttattgtttgtcttttttacatattcttccaaatatattagctaatttgtttttactttttcttctatccagccttgcttacatgattcatcactttattatcatttcagcatcctcaacttttgtcttttcgaactgtccactaaaaattataattattggtgaatcgaattatatgctggaaaaaataacataaaagttccatttgataatactacatatttattccatataaattcagctggttttttaaaaaaaatattttagatttgggggtaaatgtgcatgtttgttagctgggtatattgcatactggtggggattgggcttctattgtaacattacccaaatggtgaacgttgtacctaataggtagtttttcaacccttatccccacccccttttggagtccacagtcctagtgtttccatgtttatgttcatgtgtatccactgataagtgagaacatgttgtatttgattgtctgtttataagtgagaacttataagtgagaacatgtggtatttgattgtctgttccaaattagttcacttaggataatggtctccagttccatccatgttgctgtaaagaacataatttcattctatttatggctgtggagtattccatggtgtatatgtaccatattttcttcacccagtcaactgttgatggactcttaggttggttctatgactttgctattgtgaatagtaccatgatgaacatatgagttcaggtgtcttttttatgtaatgattttttttttcctttggatatatatccagtagtaggattgctgggttgaatggtagttatattttaatactgtttggtaacgaataacattttcctagttagcaccttcttatctctttcttttcaatagttattcaaagctttctctttattccttgtattcctcaaatcaccttatcttacttcctacttctcagtaaataatcttgtcatttatctcagaaaatagaagcacttaattataagttataaatttctacaaacttactcacatcttccatcatttttgccttttcccagtcctagaggaagcagcagtccatcctattacccaaatcttcatttattctatatacttggaatattgctcaattttctttttctctttttctctttcctttctggatctcaaaagtgtattttttctctttttctctttcctttctagatctcaatagtgtatttttttctctttttctctttcctttctggatctcagtggtatatttttggggttggggagggtcacctttctttcatatatgaaagaacccatggatctcatttgaacatgaatccatccctaattcctattctatatctctctttcctttcatagccaaaattcttctatctccagttactcaccttccatccactcctataactccctgcaatctgggttttcccttacctttccattgatactattttcaataagataactaatgattttgtcttttcattgtctaataggctcaacttatttaactaatctgcaggctttaatatgattgacattgttctccttacacatttttctttttttttttttttttgagatggaatctcactctgtcacccaggctggagtgcagtggcatgatctcagctcactggttgaaacgattcttctgcctcagcctcccaagtagctgggattacaggcatgtgccaccacacctggttaatttttgtattttattttttagtagagacagggtttctccatggtggctaggctggtgttgaactgctgacctcaagtgatctgcatgcctcggcttcttaaagtgctaagattacaggcaggagccactgcgcctggccacatttttcttgttcctttgttttccattatgtcttctgtttgcctctgtacttcaaaattgcctttgcaagcacttcatcctctgtctatccctaaaaatggtgttactgtgggttctgatgtcaaccctctacatctactctttctgggcaatttcatttatactcaggttgtaaattttttgagggcaaggttcatgttttttcatctttctttctgtgtaataatacctgacacctactagtcataaataatattgttgaataaatgaatgaatttagataatatcgtccaaatgttatcagtcattgaaaaataatgcttgtggctgggcatggtggcttgaacctgtaatcccagtactttgggaggctgaggcaggtggatcttttgaggccaggagtttgagaccagcctgggcaacatggtgaaaccctgtctctactaaaaatacaaaaatgagccgggcatggtggcgcgtgcctgtaatcccagctactcaggaggctgaggcaggagaatcgcttgaacccaggaggcagaggttatagtgacctgagatcgtaccactgcactccagcctgggcaacagagtgtgagaccctgtcttaaaaaaaaaaaaaaagaaagaaagaaagaaaaaaaaagaaatatcgcttataattccacctttcagagataatcctagatcttatgttagtgtattttttcagtcttttctctacctagtatctgaatttcttactattttaattatttgaaaacctactgtcttttatatttattatatatatgtagaaacctttcaacgaagtctaaaaataggaagcttccagaaccaccagacaatgaggatgaagatgaagatgtcaaagctgaaagactaaaggtcaaagagctgatgggttgccagtgttgtgaggaggtaatttattctttatggctaagtcatagtaaatatgaaatgatcaattcccggtatatagaaattaatctgaaaaatatttttctttgcatatgaagcaatctgaaaaaaatctttcttggaaaaaaatacttcgtttacttacttttgaataagccagaatttcagtcataaatggatatttatttgtacagtatccccttattagccaatataatttttgtaatatggatatgaggtatgtgcagcctgtcatttcatgataagttttataactttctttttaaatacaatttttcttattagaaaccatccattatggtcagcaatttgcataaagaatatgatgacaagaaagattttcttctttcaagaaaagtaaagaaagtggcaactaaatacatctctttctgtgtgaaaaaaggctggtatttaatttttccttacataacttttctagaagagtaatttctacttttagtatgatttgattatgatttttttttctttcaattcctttaggagagatcttaggactattgggtccaaatggtgctggcaaaagcacaattattaatattctggttggtgatattgaaccaacttcaggccaggtatgatatataagagtataggatatgttgaatgtgatttatattgttaattaacataaacttttagtgacaaattcggattttatattcaatttttatgtatatttttagaattttttgtacagcctgatcaaattatgatcttttgggttatctgtaaaaataatgtgcatggtgaaattttcatagacacatgtagacacacgcatatacagtatttctgcttttgtaatgcttacatgcgtgagttatttgtctaccaacttaatggaagacagttttattagcttcaggagatatgggagcttgttttgacctgccatcagctagtcttttattataagcatgtcactgaccactttgtggatacttcacaaaactaccctgatcccatttcctgcttctctccccttgcttactttatgccagccacactaactcattgctttcctggaaaatgccaggcatactcttttctttgggtttttgcccaagatgttttctttgtttggctataccttataccctagaaatacatatactaaattcacttacctctttggctcaaatgtcaccttccagtgaagctccctgatcattagaattacatcttgctttttcatccaactctgtattaccctttctgaccaagtctctgaactctgacttagctttatatgtccttccatcatcaaacatcaaaaaggagtaaaacatctgggcgggtgcagtggctcattcctgtaatcccagcactttgggaggctgaggcaggaggatcacttgagctcaggaattcaagactagcctgggcaacgtagtgagacatcttccctcctaaaattcaaaaaagaaaaaagcaatagccaggcatggtggcacatgtttgtagtctcagttacttagtgataataataataatgacaataaaggagtacaaatctgacttgatattagtctggctgtaggaaggggttttaattaatgtacttgccacttccttcacagtgtaaattaagcaaaataataaaaattggtttgtgtttctataggtatttttaggagattattcttcagagacaagtgaagatgatgattcactgaagtgtatgggttactgtcctcagataaaccctttgtggccagatactacattgcaggaacattttgaaatttatggagctgtcaaaggaatgagtgcaagtgacatgaaagaagtcataagtcggtaaaataattgtctttagattccttttgttacttagaggaaaggtttgcatttcatatttttaaaatttcataacaagcatttctgtggacaatgatttttatagaaaatgtttattactttttcatatattctttatgatatatgaaaatatactgatagctgtaaattatgatagttataaaaaggtcattttttaatttctagttacaggataaatatacctatagatatcatgaaacttattttaattcaaagtgaaccattttatcaagatattaatttatttaaaatgatgtaaattggagacttttgcccttacctacttataataagcttcgactaagtaactattctagagaaaacaacatcagggatcacacccagttggtatttgtgtttatatatatcatggtattctcattttgtattgttcattttgcagaataacacatgcacttgatttaaaagaacatcttcagaagactgtaaagaaactacctgcaggaatcaaacgaaaggtactttcattaaacaccaaataatgcctgtatttttattgatagtttagtacctgatattgtcttgatagattccttatagtgaacctttgttaatttcccacccatctttttctttccatgtagttgtgttttgctctaagtatgctagggaatcctcagattactttgctagatgaaccatctacaggtatggatcccaaagccaaacagcacatgtggtgagtatggtacttgtgacacagtacatgatactttagaatagaacagtttcttttattataatagtttaatgttagttatatgtacatcttgattttaaatcctattcaaacgatacactagtaattaaaaattaaatagatttagagatttccttaagcttttaaaactttgcatatttttcatgaagtgttcataatattttacatattccgaaacagaaataagcatgagtcattattaagataaagagttctagtgttctgaatagtttttaagtttttttctagtcatttagcatacaaatgatcttttccataataatagtgtcttaaatttatgttgagactctttctaggacagtcatgcattgcctaatgacagagatacattctgagaaaggtgatgttgtcgttgtgcaaacataatagagtgtacttatataaatctctgggtggttatagcctactacacacctagactatatggtatagcctattactcctaggctataaatctgtagagcatgtcactgcactgaatactgtaggcagttgtaacacaatggtatttgtgtatctagatgtatctaaacacagaaaagatacattataaaagtattataatcttatggaatcactgttggaaatgtgtttcatcattgactgaaatgtcattatgcagtgcctgtaaagtactaattagttgaacaactctttttttttttttttttttgagtcagagtcttgttctgttgaccaagctggagtgcagtggtgccgtcttggcttactgcaacctctgcttcccaggctgaagcgattctcctgcctcagccttccaagtacctgggactacaggcaagagccaccaagcccggctaattttttgtatttttggtagagacagggtttcaccatgttggccaggctggtcccgaactccagacctcaggtgatccgcccccttcggcctcccaaactgctgggattacaggtgtgaggcacagtgcctggccttgaacaactctttaagcctcaacttccatgtctataaaatgtaaggtttggtttggatgcatgttacggttttcttatgattcaaagcctgttttggttataacatgaaaaggcatcaattttaaaatttatttgttgtcatacttttagcccatattaacatttgaaatcatagattttttttttccatttgacaagctttcaaaatgaagggaaaataaattagaatataaaagtcatggcctggcgcagtggctcacgcctgtaatcccagcactttgggaggctgaggcagcagaccacgaggtcaggagatcgagaccatcctggctaacacggtgaaaccccgtctctattaaaaatacaaaaaaaaattagccgggtgtggtggcaggcacctgtagtcccagctactcaggaggctgaggtaggagaatggtgtgaacctgggaggtggagcttgcagtgagccgagatcgggccacttctctccagcctgggggacagagcgagactccgtctcaaaaaaaaaaaaatcatagttgggcaggatgtaatagccatagcaattgatatttggtaagttttaattaacttaattaaccaaccggttggatttttaaaaacccatttttttttaacaaacagatgtgttcctctctttttgttttatttatgttttataggcgagcaattcgaactgcatttaaaaacagaaagcgggctgctattctgaccactcactatatggaggaggcagaggctgtctgtgatcgagtagctatcatggtgtctgggcagttaaggttgatgtctaaatagcgtgccattcaggggaagaggttgggggttggattttgaaagtcatcatttcaaaaacatggcaatagttagtaatttaaatgttaaatattttagtttttgagttagcttttgatagattgacttggaagtatgttgagttttttaaaaatatggctgtctactttgaatttgaattcacttaatatttcaataacttggaatattatttttaggcatagtacttgttatttcaaaaaattgttatatattggattaattatgtaacacaaatatgaaataaacatatgagtttctacttacataaataaataattgagtaaagaaatgtgtcagagaagaggtacatcttccttacagaacaattccaaataataatatatgtagataatacccacttcaagggaggaggcttaatctcctatcccccaagtttggacgggacttagccagtttcttgtaaaaaatgaacgacagaaggagaaaaatagtaactttacagttgagaaagctggcaaatactaccttaactaaacgatgttgtgcagatatcatgtattcactgatatgatatgatggaaaaagtactacagctgtgtaatattctctccaaaacccataacccaagtgtagtcatgagaaaaatatcagactaacccaaattgagggaccttctaacacacacctgaccagtacttctcaaaactgtcaaaatcatgaaaaagacagaaagagtaagaaactgtcacccacagttagagactaaggtgacgtgacagccaagaacactacggtatcctggatagaacctggaataaacaaaggacactaatagaaaattggtgaaatctaaataaagtatggagttcagtgacaaggaatgtaccaatgtcggtgtctcagttgtgaggaatttaccatggtaatataagatgataagattagggaaactgaaaccggataaagagtgtatggggatgctgtattttctttgtaatttttctctaaatataaaggtatatttttttaaaatgtagttatatgtgtgagagattattctttgaagctgtcattttatatctgagctttcttttaaaaaattacttcagatgtatcggaacagtacaacatctaaagagtaaatttggaaaaggctactttttggaaattaaattgaaggactggatagaaaacctagaagtagaccgccttcaaagagaaattcagtatattttcccaaatgcaagccgtcaggaaaggtaaaattttaaagaatgtggttatatttctttatagagcaaaggttataaaaagttattatattaaggattaagtgaaaaatcatcttttcattcatagaccatatatatatatatctctgtgtgtgaatatatatgtatattttttcatatatatgaaatatatgtatctgtagatagataatttatatatctctctctgtattatcaccaatactggactaatgaagtctgatggctggtgttttatatctgccttagtattagatttttcaatattcagtagtatttaaatttttttaacattcttagtagtaatgagagttgttttgcatgaaaatgttattattttaaacaattttcatccaactaaataccaaaataagttattgaatttaattttgaattttaaacatgttgaactttagctttagaacataatagtagtaatttttaatttttttccatattttatctttttttccagtttttcttctattttggcttataaaattcctaaggaagatgttcagtccctttcacaatctttttttaagctggaagaaggtaagtagtatcttctattttggcttataaaattcctaaggaagatgttcagtccctttcacaatctttttttaagctggaagaaggtaagtagttgaaaagcacttatgttgtagctctcaaattatgaaagaattttatttaaaaagtttaaaactggggactcggtttattttagaaactatggcagataagaagataaccttttattcatttaatctaagacacaggtaaacactaatgtcatagggattttgtagataaactctattgtaatgtaaaccttttacaatttttagagagcattgacacagtttatcacattgcatctatgagaagggtcagcttaattatcgagtctttgcagttagtccagcagcaagagctctgagtttcttgaatccttacttcatactggtccatagaagtagcaacactatcaagactccagtggcaaagagaattctgagtgtagcgaggggtgggcagtccccaaaattttaaggaagcttatagaatcttggcatttaaaaaataagtggtatgtaggataaatatatatatgctggtgacagttgagggagatcacctcctggaagaatcaggtattcatatgcagattattttatggcatttataaactgtgaaacaacctatatttatgtataaggtttattattaataattttcaaaataactacaggatttttatgattgttctttatgtgattactgaatacaaaaagatttcctgatactgtatatattcttgttgcagctatggattaatgggtttacttttgccaagaacactaattaattattttttggtctgtaatatatggcctgcatgatgttcattgtttattcatgtttattggccggcatggtggttcacacctataatctcagcactttgggaggctgaggcgggaggatcccttaagcccatggttcaagaccagcctgagcaacatagtgagactctgtttttacaaaatattttttaaaattacccgggtatagtggcatgtgcctgtagtcccagctaactcaggaggctgaggtgggaagattgtttgagcctgggaggtcgaggctgcagtgaaccatgattgtatacttgctgtgttgcccaggccactgtataccagcctgggcaacagagcaagaccttgtcttaaaaacaaaacaaaacaaaacaaaaggtttatggagataggaccaatatccagaatctagttcaagaagccagaataggctacagtggagttggagaatgggagataagagagcagggatcaaaagaagacatgaaaagaatcaccaggaaaaagataatggaggagaacttagaaaaagtgaaataagacaagtaacattcaacatacagtacttagggctatagaggaattataggtgtggggaagagaaaggaagtaagcgggaaaaataacatgttttggcagcttcaaatttaagtgggttgattacagagatattttaaaacattgttagccactttggtaggtattgccatttttttcagatattgataagtaaaatactatttttatattttaatagctaaacatgcttttgccattgaagaatatagcttttctcaagcaacattggaacaggtactataaagttaaatttttaaaaattattttatagaagaaagtatctgatatcgattgttttggtttatattagagagggagagatatcgtaaaccagtgacaaattggtacagaatgatcttaaacttggtataattttaatcaaccttaggttcttcacttactaattttttaaattttattttttaaattgatattattttaaattgacaaatcacactgtttattgggtacagtgatgttttgatacatgtgtgcaatatggaatgcttaaatcaagctaactttcatttgctgattttgaatatctgtttttttcattttgtaaagaaagtgagtcatgatggtggtgtttcacattagtgtatttgaaattacattgtttaagtagttatgaattattttttaaaaaacatatctattaatctaaaatagtattcatctttgcatgtaacttttgaaaataatctgtttgaataatgttaatgttaataaatctcttgatacttgttgatataactagatatagccttgtaccatttctgatttagttaaaagttctttgaggtacttgagatacagcatactgtattcatttatttcttttcacctaggtttttgtagaactcactaaagaacaagaggaggaagataatagttgtggaactttaaacagcacactttggtgggaacgaacacaagaagatagagtagtattttgaatttgtattgttcggtctgcttactgggacttctttctttttcacttaattttaactttggtttaaaaagttttttattggaatggtaactggagaaccaagaacgcacttgaaatttttctaagctccttaattgaaatgctgtggttgtgtgttttgcttttctttaaataaaacgtatgtataattaagtgaagctgcatgtttgtattgaagtatattgaactatatagtttgtatgtcatctttttcaccattcagaaacagtgcttctgaatttgtgatttaaaggaattgtaatagaatagttttatttttaagttatctttaagtttatgccatcttcttaaataagtacgtaatgttccaatctaaataaaaaactaattcataactaatgcatagaaaagatacataaagcaatgtgaaagtttcttgcttctcctttttaatttctaaaaaagccactttgaatggaagttgtcatccgtaaaagctgaagtgtaagcactaggaaatctcaatatagagatttgaggaaagttatatccactaggtggcagtcattgatcataataagtgaaatgagcccttgttctagtacatgattttaggcttaggtaattaggtatgtgaaattacatttctttaatttaaagtaaaattcagaaggttttagttattataattaaaggaagactgtgtgtagaatcttacgtaatagtctgattctttgactctgtggctagaatgacagttatctatggaggtggtagaattaagccataccttttccttcatcactcttggaacatataaattttttgtcatcttccttgcaaagggcacatttaattttgttcttgaataaaatattttattgggtatttgtttttattggtaaactttagtgaatctcttctataaaattgtaagtagatcagtgtgtagatttatttagtaacttacctcattgactttggaacatggtaggatatgaataaactctttcaagggttaaattaagaattgtaagtgcagtgcgcctatttctttttaataagaaccagaatttcatttttgatagagttaaaggcatggctaatattttcttagaaatacttccttgtacaacccatgtattggctcaaggtataaaatagtgtaaataatgctagttgacattacatttcaaccaaatgaaagtattaacttcataaaacaaatatattgagagtgtgattattgtattagacaacaacaacagcaatgacagaaggatttggtactgaattactttaaataagcaaaacctttcagtggcattattcattctttaatgtaggcaaaatttaatgaacttttagctttattgtgtaataagacatctgtgattttaggctctagcagtggatttaaaagtgttctttctcggtacaaagtacgtggctgatattttcccccattgctgggggcagttgctatacactttcctaaagtatatataatgttcacataaatacccagggacctcttttttgggatgtgcttttgtaattatgtgtaaccttgaatacttaagtttagtaaaagcaacaaaattatatctatagtttactaaggcagtcacgaaaaagcatagttttttttagaacctgaccatcctaagaaagttatgtcatctgaagatagagcatgactaatgaagaaaattacctgcttttgcacgtagatttggtaactttcactttacatttgtgaatgtgtaattggtgcaaagtaaattttttttcctgcaaagtgaaagttgagtagtcacaatcatgttatttattttgttcatttagttactttgcttttaatgtatatgaatacatgctcttgtaaacaattttaaaagacattcaaatttttttttagtttttatatactcagaatatattttggttgttaaattaaattatgttccctttttcacagtaacaaaatctgactcaggagaaatataacttaattcttaggaaaacaagggtaagtgagctggaaagcaaaggaggcaaaaagtgaaatatatttatttacagtgtacagttcatgtttatgaacatactaattttaaaatgtcttaaattactgatctcaaaacttttttctatgtcagtacagataaataaataaatatacatattaggcaaaagcaacatcaccaaccttatatttcccattcatggtcaaattttcaaaggaaagtaaaagctgagctttactgagtgagtgtttactgactaataaggcaagaaaaaacatgatgagtgtactttacatcttacttttgtgggctcttaatttttttttctagtttgttttcagtaaagacagtgggttttctttaaaataatttttttcttttaaatttgcacaaattatcttaggtcagtattttggttttaatcattaaaacatttttagagtaatgtaatttaacaaatattttaagtgattatgtttccagaaatggattctttggagagaactcggatgactatcagttttggccctgtaagatcgtggagatctgtaagatagatacttatataacttacataaaatatatataatatattacttatataacttatataactagctattattttatataactaactataatatgacaaatcctttgctagtagtactaacaacgttttataggagcacaattaattttacttaggataagtgttgttattattgtttttattgttgttctgttagttactcaaaacttcattctaattgtgccctgagtttgttaaaataccatactgtatttttgtgtaacatgtaaataggcattaatttttgagaaatagaaatgtttatccttaatgtatttttaatttgctaacattgattttttattttctttcctgaaatagcttatttcctaaaatgaaagaatttattctcagatgaataatttttatatcagctattcttatcaggtaaaagtttaattattttttatttataatatatgtaagcaattctcaatgctgctctttaagaaaaataaatatgattatattaataataagctttaagagttgaaaatttaagacaagtcattttgtatactgaagtgaattctttgttatttagtgctgataattgaataatgagtagctcatattaaaaatgatgcaaaaacctggcactaaaa

SEQ ID NO: 1117 - DNA, 25576 bp, Homo sapiens
tcccttggcccgcgcagctccgacggagcaggccagtgagtgacgggcaggtcgcccaatagcagcgtgcagaggcaggggcgtgccccggcgctgctacctgcgcgggcaagctcagcgcacttggcttaaggggcggcgcgctccctgcctgctgctgggcggagggaaggcggcaagagctgcggagcccctggaaggtgagaaggactcggagagggaagaaggcccgagactcgagaatgcggggttggggccgggagggatgcaagttccctgggaattagggggtccagcctctgacctccttccggtgaatgttgacgacggctgaattgatcactgattctcaaggggggcatcggacatctgggacccttaagagggcctttgccgatcacacacctgcagccccctgcccgttagaactcctgcactcccccttgccccgtcttacaaatggagaaactgagcccactcccccagatcctaagtcccgcttgatgtaaaggaaagaaccctggcgtaagggtctgggtctgaggtcccagttccggcctggtcacctttagcaacttcctgcccctctgtcagcgtcagattctccatctgtgtcagaggtggaccggcccaaggaaaatagatcaggaatcgctgactccaggagtctctatcccagccccttcgcctgactctttctctggctcccgcggtccctctgagcgattaatgctacataaggtgtgggcagagctggggtcgtgcctccagctgggcaactgcctgtctctctgggtgcctgggtttgctttcttgggcctcggtttccacttctgtagagtggggtgatagtccagcacttcccctgggcgtgtgaaatgtccagcactgccaatattcgttgctgttatcttcggagaacagtgaggggaaaggaatccttgcctgggctgggccaggcaggaggctgggggtcaggacctggaagaggcttccaggtgaggcttggggtggagcctggtgacgaaagcgttaagcccaaactcggtccctggaggattagaggatgatctttaagtccccagctgtcagccctgctcagagcgacagtcctggcagccaatcagatgcgaggacggctgcgggttgcgctcccattggtttactccacccctggggtagcggagcctctttatcgagtgactactgtttgcctcgctctaatcagagcttccaggaaccctgcgctgtgggataaaggaatgaggttcagaaaggggcagggagttgcccgcagccgcaccgcacgtcttcagcccgaccgttgtcctgacctctctgtcccgtcccctgcccagtctcaccatggccttctggacacagctgatgctgctgctctggaagaatttcatgtatcgccggagacagccggtaacgccccagtgtgagaccagggccgggtgggcaggcagcccccactgtcccccaccgtctcccacctattctcccccaggtccagctcctggtcgaattgctgtggcctctcttcctcttcttcatcctggtggctgttcgccactcccacccgcccctggagcaccatgaatgtgagcccccccagggaccaggcactttgtgtgtgtaggggaaggcagatggctcacccgtgcacaggaatcccccgtgcatgtcagggagccttcaccaggccgccaatacatggcatgggagtgagctctccatcgctggaggcatgcaagcggtgccgggcgacccgatgggggtggagtcaggcagagtccacagggcctcagcaccaggcgtctccccgcaggccacttcccaaacaagccactgccatcggcgggcaccgtgccctggctccagggtctcatctgtaatgtgaacaacacctgctttccgcagctgacaccgggcgaggagcccgggcgcctgagcaacttcaacgactccctgtgagccagaggcagtgggtgcggccggcctgcaaactcggggctgcagtgccggccggaaccccgcctcctgccctctctctgtccccagggtctcccggctgctagccgatgcccgcactgtgctgggaggggccagtgcccacaggacgctggctggcctagggaagctgatcgccacgctgagggctgcacgcagcacgggtgaggaggccggggggcctctggcagggctgagctctgagcctcaacttgccgggccgtgaaatgggcacagggtgggggtgggtgcctcagaccaacgtccccccagccccatgctcccgtgcgctcctcccccagcccagcctcaaccaaccaagcagtctccactggaaccacccatgctggatgtcgcggagctgctgacgtcactgctgcgcacggtagggtgtcggggcgggaccgcgctgacttcctgggacactgcactggggatgtcctggcactgccccaccccgggccaaggacctcccgttccaggcatccaggctgtccctggtctctgcggtgatgctgcttgtccgtctgggcccccagacagagtgtgtctgacccagtgaggaagactcgtctgtgagatctccaatgagtccctttgcctctcagagcctcagtttccctatttgtaaagtgggggctatgatagtatggtctgcctgggaactggccagagcgctggacccctagtgagtgttcaaaatcattgtcccccttgtggtctttctccccaggaatccctggggttggcactgggccaagcccaggagcccttgcacagcttgttggaggccgctgaggacctggcccaggaggtacgaggccccactcatcctcaacccccatggaggcaacgttggcaggcagcctgcgccgggagggtctggggcagcccgggcacttcccttgggtgggttttcaggaggattagacagcgagagggagaggctgcccctggcccagtgccctgccctggttagggcttggaggtgggatcattgccagctccgtctggtaacctctctctagctcctggcgctgcgcagcctggtggagcttcgggcactgctgcagagaccccgagggaccagcggccccctggagttgctgtcagaggccctctgcagtgtcaggggacctagcagcacagtgggcccctccctcaactggtacgaggctagtgacctgatggagctggtggggcaggagccagaatccgccctgccagacagcagcctgagtgagtgactgacctcggtttcccctcttgggaagtggaactctgggcaggggggcagggcctcatggcacccccatcccaggccccgcctgctcggagctgattggagccctggacagccacccgctgtcccgcctgctctggagacgcctgaagcctctgatcctcgggaagctactctttgcaccagatacaccttttacccggaagctcatggcccaggtgggggcagcctggatgctggggtgggagggtggtggccagagcccatccagtaccctcagtccaggtgggccagggccaggccggagggtcacggaaactatttgaagaagtaggagttagccgatggagggggatcagcttgtgcggaggatcagaggcacacgcaggagcaaggcagagggggcagggggtgggcaggggtcctcagaggaggagagggtcatcagtggagggggtgctgtccacaggtgaaccggaccttcgaggagctcaccctgctgagggatgtccgggaggtgtgggagatgctgggaccccggatcttcaccttcatgaacgacagttccaatgtggccatgctgcaggtgtgcgggggtgctggggaggtgggatgtggctccccggtgaggagggtagacaggcccggtggatgggaaggtgggctccgtgcagacccccacttttttttttttttttttgagatggagtctcgctctgtcgcccaagctggaatgcagtggcgtgatctcgactcactgcaacctccacctcccgggttcaagcgattctcctgtctcaccctctgagtagctgggactacaggcgcccaccaccacgcccggatgattttttttttttatttttagtagagacggggtttaaccatgttagccaggatggtctcgatctcctgacctcgtgatccacccgcctcggcctcccaaagtgctgggattacaggcgtgaactaccacgtcctgctttttttttttttttttttttttttaagagatggagtctcactctgttgcccaggctggactgcagtggcgagatcttggctcactgcaacctccgcctcctggattcaagcaattctcctgcttcagcctcacaagtaactgggattacaggcatgcgccaccactcccggctactttttgtatttttagtagagatgggctttcaccatgttggccaggctggtctcgaactcctgacctcaggtgatccacccgcctcgcctcccaaagtgctgggattacaggcatgagccactgtgcccgacccagactctcactttcacctgcgccccccagcggctcctgcagatgcaggatgaaggaagaaggcagcccagacctggaggccgggaccacatggaggccctgcgatcctttctggaccctgggagcggtggctacagctggcaggacgcacacgctgatgtggggcacctggtgggcacgctgggccgagtgacggaggtgagggcctgtccacctgcggggtctgtttcagtggggagggcaggtcccatcctagtgttcccaccctggtgttcccagggggaggcgggcccggccctagtaagagcctgggatttgtagagatctcaggagggagccggccgtgggcctacgaggggaaaacatggcccagccccgaggtccagggggaggagcggagtggtctaggaggcaggcggaccccagcgcctaggactcacccccgcatcccacagtgcctgtccttggacaagctggaggcggcaccctcagaggcagccctggtgtcgcgggccctgcaactgctcgcggaacatcgattctgggccggcgtcgtcttcttgggacctgaggactcttcagaccccacagagcacccaaccccagacctgggccccggccacgtgcgcatcaaaatccgcatggacattgacgtggtcacgaggaccaataagatcagggacaggtcaggcgagggagggggcggggggatgagggactgggcggggccaagagcgtggtgggtggggccaggcagcattcagcctattggagaccatgatagacaggatctgggctgtatcaacagtggtatggtagccagagcccggggctccttagaccaataggggcccgtgatgggcggggcctaggtgcatgaggggcgtggccatgggcctgagataagatgagagcaggtataggttgagggcaatggtgggcggagccaggtgtattattaggtccctggaataagggtggagctaaaattgcaccgggtgctgagcgcagtagatcttgcctgttatctcagaactttgggaggccaaagtgggagaatctcttgaggacaggtattcgagactagcctgggcaacatagtgagaccgcctcccccccgcccccctcccccaccaacctcacgaaaatatctttaaaaattagccaggtgaggccgggcacagtggctcacgcctgtaatcccagcactttgggaggctgaggcgggcggatcacgaggtcaggagatcaagaccatcctgactaactcggtgaaaccctgcctctactaaaaaaaaaaagtacaaaaaattagccgggcgtggtagcacgcgcctgtaggcccagctacccaggaggctgaggcaggagaatcgcttgaacccaggaggcggaggttgcagtgagccgagatggcgccactgcactccagcctgggcgatagagcgagactccgtctcaaacaaatgaataaatgaataaaattagccaggcgacttgggaggccgagctggggggatcgtttgatcccgggaggtcaaggctgcagtgagctatgattgcagctcttcactccagcctgggcgacagagcaagaccctgtctaagaaaaaggttattcagggtggggccccgggagtttctagcccttccctacaaccggccaccatgcccctctcgcaggttttgggaccctggcccagccgcggaccccctgaccgacctgcgctacgtgtggggcggcttcgtgtacctgcaagacctggtggagcgtgcagccgtccgcgtgctcagcggcgccaacccccgggccggcctctacctgcagcagatgccctatccgtgctatgtggacgacgtgtgagctctggcacccctccccgctcttccccgcggcgggaaggtcccgggtgtgggggtgggcccaggctctgttgggaaccttcctgcggtccaggctgcgaactttgcacctttacaccactccacgtgacctgctgcagcgggaggagcaggggactctgagggtctggtggggggggggactctgagggtctgggggcccccggcgcagggacagcctgggctgcactgatgcctgagagccaaaggctggctggatcaggttccaaggaacagggaggcaaatcttcccgccttgagatcccgggacacgaaccagtcgtgccagatggtgggcggagggggggtctgcggagggtctccagcctccaccccagccgtccccaccccaggttcctgcgtgtgctgagccggtcgctgccgctcttcctgacgctggcctggatctactccgtgacactgacagtgaaggccgtggtgcgggagaaggagacgcggctgcgggacaccatgcgcgccatggggctcagccgcgcggtgctctggctaggctggttcctcagctgcctcgggcccttcctgctcagcgccgcactgctggttctggtgctcaaggtgggcgcgcctcggcctgcccggctgcagaatgggtgcgctggagggtgacagacaggggcggccccacgtgggtgcgcgcccccaggccaatccaggagctgcaccctaagctcccgttgcctctcacagctgggagacatcctcccctacagccacccgggcgtggtcttcctgttcttggcagccttcgcggtggccacggtgacccagagcttcctgctcagcgccttcttctcccgcgccaacctggctgcggcctgcggcggcctggcctacttctccctctacctgccctacgtgctgtgtgtggcttggcgggaccggctgcccgcgggtggccgcgtggccgcggtgagagccgggtcgggcgtggatgggggacgccccccgcttcggccgctcactgaccgcccgcttttccgcagagcctgctgtcgcccgtggccttcggcttcggctgcgagagcctggctctgctggaggagcagggcgagggcgcgcagtggcacaacgtgggcacccggcctacggcagacgtcttcagcctggcccaggtctctggccttctgctgctggacgcggcgctctacggcctcgccacctggtacctggaagctgtgtgcccaggtgggccgtagggggcggggctccgggccgggtcgcacctgctttgcgggaggctgagctaggggtgtggcctccaggccgtttgggggtggggggtggcttattcccttggagagaaggcggggcttcttggcacacgcatgcaggtggctgcattggaggggcggggcctgaggcaggtgggcggggtttctgggccgcctcatacctggacgccctgattccaggtgtatggccagaagctggcacagtcgccgggcgctgtggctcacgcttgtaatcccagcactttgggaggccaaggcaggagaatcgcttgagcccaggagtttgagaccaggctgggcaatatagtgagacctcatcaatacaaaaagttagctgggcgtggtggcacgctgggcgtggtggcacgctcctgtagtcccagctactcgggaggatggggtgggaggatcactcgagcccaggaggttgaggctgctgtgagccgtgatcccaccagcctgggcaacagagtgagacctccatctctttaaaaaaaaaaaaaaaaaaaaagctggctgggtgcggtggctcacgcctgtaatcccagcactttgggaggccgaggcgggcgggtcatctgaggtcgggatttcgagaccagcctgaccaacatggagaaaccccgtctctactaaaaatacaaaattagctgggtgtggtggcgggtgcctgtttcctagctacttggaaggcagaggcaggagaaatgcttgaatcccggaggcggaggttgcggtgagtcgagatcgcgccactgcactccagcctgggcaacaagagtgaaactcagtctcaaaaaaaaaaaaacaaaaaaaaaaaaaacaaggccgggcacggtggctcacgcctgctttcccagcactttgggaggccgaggtgggcagatcacgaggtcaggagatggagaccatcctggctaacacggtgaaaccccgtctctcccaaaaatacaaaaaattatccaggcatggtggcgggcgcctgtagtcccagctactcaggaggctgaggcaggagaatgacgtgaactggggaggcggagcttgcagcgagtcaaaatcgtgccactgcactccagcctgggcaacagagcaagactccgtctcaaaaaaaaaaaaaaacaaaaccccaaaaaaagcctggtacactcctggggggtgggctaagcaataacccgcgcccctccccgcaggccagtacgggatccctgaaccatggaattttccttttcggaggagctactggtgcggacctcggccccccaagagtccagccccttgccccaccccgctggacccaaagggtgaggcactacgaggcttaatagctggttgtccacatatgcccagttcccccccaaaacgagattccacagatgccaatgacaatgacctggacaccccaaccctcacacctgccctgaagacactgcggtccccaagctcccgcagcttttataggccccggcccagcaggtcccggattccacagcccagctctgagggacttgcaggccccaggacccccatgacctccatggctgagtccaccccatctctgcagtgctggtagaagaggcaccgcccggcctgagtcctggcgtctccgttcgcagcctggagaagcgctttcctggaagcccgcagccagccctgcgggggctcagcctggacttctaccagggccacatcaccgccttcctgggccacaacggggccggcaagaccaccaccctgtgagcccccaaccactccctccccgtgagcccccccactcccaccccgtgagcccccccaccactccctccccgtgagccccccaccactccctccccgtgaaccccccaccactccctccccgtgagcccccccaccactccctccccgtgagccccccaccactccctccccgtgaaccccccaccactccctccccgtgagcccccccaccactccctccccgtgaaccccccaccactccctccccgtgagcccccccaccactccctccccgtgaggccccccaccactccctccccgtgaaccccccaccactccctccccgtgagcccccccaccactccctccccgtgaaccccccaccactccctccccgtgagcccccccaccactccctccctgtgagccccccgaccgctccctccccgtgagcccccccaccactccctccctgtgagcccccccaccactccctccctgtgagttcccccaccactccctccctgtgagtcccccaccactccctccctgtgagccgcccaaaccactccctccctgtgagccccccaccacttcctccctgtgagctccctgtgaggcccccgaccagtccctccctgtgagcagtaatggcgccactgcactccagcttgggcaacggagtaagaccctgtctcaaaataaatagggcgggagtggtggctcacgcctgtaatcccagcacttgggcaagccgaggtgggaggattgcctgaggtcagagtttgagacacagcctggccaatatggcaaaaccatctctactaaaaatacaaaaattagccgggtgtgatggtggcgtgcacctgtaatcccagctactcaggaggctgaggcaggagaactgcttgaaccctggaggcggaggttgcagtgagccgagactgtgccgttgcactccagcctgggcaacagagtgagactctgtcacaaaaaaataaaaataaacaaataaataaaaataaggctatcacagggttttggatgtagcatttaataggtgctctgtggccaggcgtggtggctcaggcctgcaatcccagcactttggggggccgaggcgggtggatcacgaggtcaggagattgagatcatcctggctaacatggtgaaacagtgaaaccccgtctctactaaaaatgcaaaaaaattagccggacatggtggcgggcgcctgtagtcccagctactcgggaggctgaggcaggagaatggcgtgaacccgggaggtggagcttgcagtgagccgagatcgtgccgctgcactccagcctgggcaacagagtgaaactccgtctcaaaaataataataataataataataataataataataataaataattaaaaattttttaaaaacagaaattaaaaatagaagctctgtaactgccagtgcactctgtgaagggggctactctgagacccctctatccacaggtccatcttgagtggcctcttcccacccagtggtggctctgccttcatcctgggccacgacgtccgctccagcatggccgccatccggccccacctgggcgtctgtcctcagtacaacgtgctgtttgacatgtgcgtctcggcaggcccagagtgcagcggtgggaagggactggacgccctctgggactctgcctgccatgtgggtcactctgctctgtgcactggccgcaggctgaccgtggacgagcacgtctggttctatgggcggctgaagggtctgagtgccgctgtagtgggccccgagcaggaccgtctgctgcaggatgtggggctggtctccaagcagagtgtgcagactcgccacctctctggtgagcccatccccaagggaggtcacctcacagggaggggcctggggattcatcctgaaggcagggggaagccgggtactgaggtccacgtgggtaggcaaccttgcccaaggctgggtgtgacacactgaggtcccttccccatctctaccaggtgggatgcaacggaagctgtccgtggccattgcctttgtgggcggctcccaagttgttatcctggacgagcctacggctggcgtggatcctgcttcccgccgcggtatttgggagctgctgctcaaataccgagaaggtaagagctggggattctgctcgaggggccagaaaaggcttctgacaaggaagtgctggggatggggttttgaggaatgagtaggagtttgctacatgtggaccccacttgttgctatggcatttaggggctactgctcaaataccgagacagtaagagttggggatagacagaggttcccctggattctgcctgaagggccagaaaaggtttccaacaaggaggttctggggatgaggttttgagggatgaataggagtttgcttcatggggcagacaactcctggcagaggccccagctcgggcaaagacgcggcggcctgatggtagttgtgggttggtcccccgtgcctaggtcgcacgctgatcctctccacccaccacctggatgaggcagagctgctgggagaccgtgtggccgtggtggcaggtggccgcttgtgctgctgtggctccccactcttcctgcgccgtcacctgggctccggctactacctgacgctggtgaaggcccgcctgcccctgaccaccaatgagaaggtggggaccggccttctcctgacccctgacccccgggactctgttcagccctgaaggccaagccacttggtgcctctctgcccgcaggctgacactgacatggagggcagtgtggacaccaggcaggaaaagaagaatggcagccagggcagcagagtcggtgagggccggggtgggagacccaaggcgggtgggcagtggggtggctgtgccttaacttgaggaggaggagggggagggggaagaggaggaggagggggaggaagcggcagaggaggttgaggcggaggaggagggggaggaggagggggaggagtaagaggtggaaggggaggcgaaggggaggagtaggagggagaggaggagggggagggagaggaggagggggaggagaaggggggaggaggaggggaagggagaggaggagggggagaagaaggggaggagtaggaggggagcagaaggggaggaataggagggggaggaggagggggagggaaagggggaggagaagggggagaagtaggaggaagaggagggggaggagaagggggaggagtaggagggagaggaggaggagggagaggagggggaggagaaggagaggaggaggagagcacttgagaacctgagatgatgcccccatccctgggctgagccggaaccatgagactaacttgaacactgaccccacctttaacccaaccagggctgagcccagagacaaacctacccctgacctccaacactaggtccagcactgccctcaagatctctttttgtttgtttctgagtcttgctctgtcgcccaggctgtagtgcagtggtgtgatctcagctcactgcaacctctgcctcctgggttcaagcatttctcctccctcagcctctcgagtaactgggattacaggtgggttccaccatgcctggctaatttttgcatttttggtagaaatggggtttcaccatgttggtcaggctggtctcaaactcctgacctcaggtgatctgcctgcttcaaccctcaaagtgctgggattacaggcgtgagccactgcgcccggccgcacctggcctacgttcttaaccctgatctctgtctgccgggacagtcccctcacaggtcaccaatgcctcttccccagggagactggggtggggcgtgagccggggctccctgaagcacccctttgtccacacaggcactcctcagctgctggccctggtacagcactgggtgcccggggcacggctggtggaggagctgccacacgagctggtgctggtgctgccctacacgggtgcccatgacggcagcttcgccacactcttccgagagctagacacgcggctggcggagctgaggctcactggctacgggatctccgacaccagcctcgaggaggtgtgaggcctgggtggtggtgaggtggggccaggaggagggcttcctggaggaggtggtgttttgaaggatgaatagcgtgtttatgagcagcaaggacattcagggaggaggcatggcacatgaggagctctggtggctcagatgtcccttgggaaggcctgggggacccatggtgtaggaggggtggggggctcacaagcccccagttctccctgtcggtgtccagtctctgagcccctgcttgtctccccagatcttcctgaaggtggtggaggagtgtgctgcggacacagatatggagggtgcggccacagctccctgacccctgaccccagtccagagtgggaccagaggccaggtccccatccctggcttagtgtggcccaaggcatagcctttaccctatacctgattcctgatcccccaatccgtgaccctcaactttgaccctgacccctgatggccctgcagatggcagctgcgggcagcacctatgcacaggcattgctggcctagacgtaaccctacggctcaagatgccgccacaggagacagcgctggagaacggggaaccaggtaagtccttcccagtggccctggggtcctcccagccacccccccacagcagcgtgagcactgaccctctcatccctcacagctgggtcagccccagagactgaccagggctctgggccagacgccgtgggccgggtacagggctgggcactgacccgccagcagctccaggccctgcttctcaagcgctttctgcttgcccgccgcagccgccgcggcctgttcgcccaggtgaggagggctagcaccagggagtcgcatgggagtccctgagttccctaccctggccgtccactcagtggcctaatccaaacccttacccccgtgtgtattcccaacccaaagcacatttattgagggcactggggagccatgggtggttgtagagcaggagcagggacaggtgcaagcaagcctggagggtggatggaagcagcagctgatgggctggtcccccagatcgtgctgcctgccctctttgtgggcctggccctcgtgttcagcctcatcgtgcctcctttcgggcactacccggctctgcggctcagtcccaccatgtacggtgctcaggtgtccttcttcaggtgggtgcagaaggaaggggctggtggcaggaagactagggacctgggggtacagccctgaccctacatctcccctcacacacagtgaggacgccccaggggaccctggacgtgcccggctgctcgaggcgctgctgcaggaggcaggactggaggagcccccagtgcagcatagctcccacaggtgaggcgtcttgttggcctggacctttcccctctctggcctcagttttcccatctggtccctggccagggagcctcagggggcacctggagcatcccctgtgcccacctgggagctgggagcctctgtggctccaggaacccccagaagctgggtgcccacagaccttcaccttgaccctgcagcgcccttgagtgtgcacagcccattgtctgcaggttctcggcaccagaagttcctgctgaagtggccaaggtcttggccagtggcaactggaccccagagtctccatccccagcctgccagtgtagccggcccggtgcccggcgcctgctgcccgactgcccggctgcagctggtggtccccctccgccccaggcagtgaccggctctggggaagtggttcagaacctgacaggccggaacctgtctgacttcctggtcaagacctacccgcgcctggtgcgccaggggtgagccatgccctgggactcagtttccctggctatagcatgggtccttgggttgctggggctggtgtggtcctggaggaggaagtggaggggttggatgcccagcttggggctacgggctgggagtctcgcgtaccttcctttcctctttttttttttttttttttttgagatggagtctccctctgttgcccaggctggagtgcagaggtgtgatctcagctcattgcaacctccacctcccagtttcaagcgattctcctccctcagcctcccgagtagctgggattacaggcacgcaccaccactcccgactaatttttgtatttttagtagagatggggtttcaccgtgttgccaggctggtctcgaactcctgacctcaggtgatccacccgccttggcctcccaaagtgttgggattacaggcaggagccaccgcgcccggctttctttcctgtttttgtccacccttgactctgtgctcccctctcaccatctctctctctgtcccacatccctgtctgcctgtgtctctgtccatctctcccacagcctgaagactaagaagtgggtgaatgaggtcaggtgaggaggggtctagcttggggtcccctgccccagttccactcccatgccctctgcctgccccctgggagctctcccggcccccccggccctcagctccccttccctgcctgcatggccccacagatacggaggcttctcgctggggggccgagacccaggcctgccctcgggccaagagttgggccgctcagtggaggagttgtgggcgctgctgagtcccctgcctggcggggccctcgaccgtgtcctgaaaaacctcacagcctgggctcacagcctggatgctcaggacagtctcaaggtgggaactgggggggcaggtgggcgtcctgtcacagcaaggtccaaccccattgctctgaccctatgaccttgacccccacccagatctggttcaacaacaaaggctggcactccatggtggcctttgtcaaccgagccagcaacgcaatcctccgtgctcacctgcccccaggcccggcccgccacgcccacagcatcaccacactcaaccaccccttgaacctcaccaaggagcagctgtctgagggtgcactgtgagtccctccaccctgcatgtcctaccctgcacgtcctaccctgcctccatttctctgtcgtttggggtggtgggagctggatttgaaccctgacacactcttgctttataaatgggggatagaaactgttcctctgctccctaagccagggaaatgggacctcctcagactcagcgggccccagcctcccccacacatcctcatcccaccaacctttatcctgcctgagacctgtacaacctctgctgccaaatcccaggcaccctcatccctaaattgcccctgccatctctgccactgctgactgccccatagacctttgtcccatcaatggcgtgttcagctctgctctgagcaacccatgcaccctcaccctacaacagctctcatgtcttcacctccaggatggcctcctcggtggacgtcctcgtctccatctgtgtggtctttgccatgtcctttgtcccggccagcttcactcttgtcctcattgaggagcgagtcacccgagccaagcacctgcagctcatggggggcctgtcccccaccctctactggcttggcaactttctctgggacatggtgcgggggctgcttggacgggtgggggcccagccactgcttgccactgccctgtctggccccttgtaggcaggggcttgtccaagatggcctgggtaaagtcttgaggattgtgggagactttgtgccttcctactcaaaaagcaaggaggtcagggtgggaacagggctgagggtggcagtgcccacctctttaggctgataaaggtaactgccatctccaatgcagtgtaactacttggtgccagcatgcatcgtggtgctcatctttctggccttccagcagagggcatatgtggcccctgccaacctgcctgctctcctgctgttgctactactgtatgggtgaggcccccagtccctcagggcctattcttactgaccccttactgccttccacattaatgctgctgagatagaactctgcagtgactcccaaggagaggatatggaggtctgaggtgatgccgtgtgtgatccaattcagtggtgtgccaaggtggccttaaaagctcatcttatcctgactcatattagtagagttctaaggcagcccatgcctgtaattccagtactttgggaggccgaggcaggaggactgcttgtggccaggagtttgagaccagcctgggaaacatagagagacccacctctaaaaaagaaagaaagagagagaaagagaaagagagaaagaaaaaaaaaaaaacagaaatgtgctttgggtgaaaatgtcaaggtctaaggcagagaagatgggaatggagatttttattcctctcagggcttctcagtctgagtggttactccagtgactcctattgtcccttcagctggtcgatcacaccgctcatgtacccagcctccttcttcttctccgtgcccagcacagcctatgtggtgctcacctgcataaacctctttattggcatcaatggaagcatggccacctttgtgcttgagctcttctctgatcaggtggggcaccacgaggctggggcttgggctgggttgggtcgttggactcagcccctgaccaacatccgtctcccacccttgagcagaagctgcaggaggtgagccggatcttgaaacaggtcttccttatcttcccccacttctgcttgggccgggggctcattgacatggtgcggaaccaggccatggctgatgcctttgagcgcttgggtgagaacttcctgtcaggtggggccatggctacagatagctagcacccttggagacctagagttaattatacagagtggagaaaaacagccccccagggagacagccagggttcttaggtggccctaaggttgggccaagttggaggtacaagaaagcagccataaaaagctaattcttagattacatcacaagaggcctcttctgttttctatgccaattagactccagctgagtggcctatccaatttgtgttcctttcccttaagaatccagagtgacatggatggagaaagggccagaaaccaagactctcatggacccagtccctcctttctatatccacaggagacaggcagttccagtcacccctgcgctgggaggtggtcggcaagaacctcttggccatggtgatacaggggcccctcttccttctcttcacactactgctgcagcaccgaagccaactcctgccacagttagtgaggtctatggagagggtggcaggggccaaggacctactttaagcccacagatattctgtccccaggcccagggtgaggtctctgccactcctgggagaggaggacgaggatgtagcccgtgaacgggagcgggtggtccaaggagccacccagggggatgtgttggtgctgaggaacttgaccaaggtaggtgtggtcaggtcgactgctgggtggggggtgctcccactggcccactcacctttctgaaagacctgcactctcccaggtataccgtgggcagaggatgccagctgttgaccgcttgtgcctggggattccccctggtgaggtgagtccaggggtggaggccaggtgcagggacagtgagtggctgccctactgcatgccctgcccatcatcctttactgaacacctactgtgtatccaccaccttttattgggcacctactgtatgccaatatttgtgctcctatttttattttattatattattatttatttatttatttatttatttatttatttgagatggagtctcactctgtctcccaggctggagtgcagtggtgggatctcagctcactgcaagctccacctcccgggttcatgccattctcctgcctcagcctcccgagtagctgggactgcaggcgcccaccaccacgcccggctaatttttttgtatttttagcagagacggggtttcaccgtgttagccaggatggtctccatctcctgacctcgtgatccacccgcctcagcctcccagagtgctgggattacaagcgtgagccaccacacctgccctattttatctttttttagagacggagtctcactctgtcgcccaggctggagtgcagtggtgagatctcggctcactacaagctccacctcccgggttcacaccattttcctgcctcagcctcccaggtagctgggactgcaggcgcctgccatcacgcctggctaatttttgtatttttagtagagacagggcttcaccatattagccaggatggtctcgatctcctgacctcatgatccacccgcctcagcctcccaaagtgctgggattacaggcgtgagccactgcgtctggcctgtgcatttatcttgagccaacaaaacctcattaagcacctactgcatgcttacctctgttaaacacacactgtgctcactaaagaggtgtactgaatacttttgtgtccatcaacgtttatcaaataccaatagaatttattggacccctattgtatacacatctacatcaagcacttgctcacagccagcatttatcaggcacctgctttgtaccagttcacattcaagcacctactatatacaaatgtatttgctgtgtgccacttattggccacctactagggctggtacacatctgcaaacaagtgctgtttgttagcacacattgcagtatatatatatatttttttttctttttttttcttttgagatggagtctcactgtcacccagcttggtgtgcaatggtgtaatcttggctcacggtaacctccgcctcccaggttcaagcgattctccagcctcagcctcccgagtagctgggaccacaggcacatgccgccatgcccagctgattttgtatttttagtagagacggggtttcaccatgttggccaggctggtcttgcactcctgacctcaaatgatccacccaccttggcctccgaaagttctgggatcacatgtgtgagccaccatgcccggcctttgtttttttctttttttttttttttgagacaaagtctcgctctgccacccaggctggagtgcagtgtcacgatctcggctcactgcaacctctgcctcccaggttcaggcgattctcctgcctcagcctcctgagtagctgggattacaggcgcccgccaccacaaccggctaatttttgtatttttagtagagatggggtttcacaatgttggtcaggctgatcttgaactcttgacctcaggtgatctgcccacctcggcttcccaaagtgctggggttacaggtgtgagccactgggcctggcccacagtatatctttactaagcacctactgtgtgctggccaacctctctaccttgggctgactgtgcacctagcctaagtacacacagtgtgccaggaaacatatggagagctcatgccctgatatttgttgagcactgctgcacacgacctttatagggtacccactgtgtgccaaaagccattccctgctaagtgacagctttatgcctcgctacataccccaatatctgcctagctcccccggggccccacccacggccttccatgtggacactcagaaatcagaggtgctgaggccaggcgtggtggctcacagctgtaaccccagcactttgggaggccaaggcaggaggatcacttgaggtcaggagttcgagaccagcctggccaacatgccaaaaccccgtctctactaaaaatacaaaaattagccgggcttggtggcacacgcctgtagtcccagctactccggagcctgagacaggagaattgcttgaacccaggaggtggaggttgcagtgggccaagatcgtgccattgcgccggggtgacacagcaaggctccgtctcaaaaaaaaaaaaaaaaaaaaaagaggctgggtgccgtggctcacgcctgtaatcccagcactttaggagttcaaggcaggcggatcacaaggtcaagagatcgagaccatcctggccaacacggtgaaaccccatctctactaaaaaaaaatacaaaaattagctgggcatggtggcaggcgtctgtagccccagctacttgggaggctaaggcaggagaattgcttgaacccgggaggcagaggttgcagtgagccaagatcgcaccactgcagtccagcctgggaaacaagagcaaaacttggtctcaaaaaaaaaaaaaaaagaaatcagagatgccggaaccagggcctggggcctcactgagcaccatctgtgggcatccctgtagtgttttgggctgctgggtgtgaatggagcagggaagacgtccacgtttcgcatggtgacgggggacacattggccagcaggggcgaggctgtgctggcaggccacaggtgaggggtgccaggtagggtcagggtggggcagggttggccctgacgtccttgtgcttccccacccctccacctccagtgaatggactgggctcactgccccacacctgcatggtctctgagacccctgcacctctacctcccacacgcggaccaggccctgagacacccctgtcccttatcagcgtggccctggatgggtgggccctgagacccctgtgttagccaccagtatggtcagggactagccagctctctgagcccccggcgcccccatccccagcgtggcccgggaacccagtgctgcgcacctcagcatgggatactgccctcaatccgatgccatctttgagctgctgacgggccgcgagcacctggagctgcttgcgcgcctgcgcggtgtcccggaggcccaggttgcccaggtgagcccactttgtccccaccgctctcacctcccagggcccacccgacccaggccgtgcctctaaagcctggcccaatcccgcactctctcgccttggctccatccctgtccctgcccccagaccgtgcttccttcccctatacctctgtcccccatcctggtccaatagggatgtggctagcccgcctctttgccccgcaacaccaagttccaccattctcattggtccacccacccttccttccgctgcacgttgcccctctctccttgactctgccttctgtggccctgcccacttgctcctcttctgcctaccccctagggcttcgcgcctttctcgctggggtcacggtcacattctcactctggccgttcccagtttgcagccgtttcactgcctcttccatctgcttgggggtcttgtctttgccctggcccgccccaccctcacactgtcccaccccatgccctttctggccctgcctcatacccatgttggctccacccacaccatggccctgctccatacccatcccagctccacccataccaaggccccaccccatactcatgctggctccacccacaccatggccccgccccatactcatgctggctccacccacaccatggccccgccccatactcatgctggctccacccacaccatggccccgccccatactcatgctggctccacccacaccatggccccaccccatactcatgctgtctccacccacaccatggccctgccccatactcatgctggctctacccacaccatggccccgccgcatactcatgctggctccaccagtgtggccccgccccatactcatgctggctccacccacaccatggccccgccccatactcatgctggctccaccagtgtggccccgccccatactcatgctgtctccacccacaccatggccccgccccatactcatgctggctccacccacactatggccctgccccacacccatcccagctccacccacaccatggccccgccccatactcatgctggctccacccacaccatggccccgccccatactcatgctgcccccaccacactatgtcccattctcacatttgccctgccccatgcccattatgcccctgctccacactcaatgctggccccgccacactgtggccctgccccatactcatcaatatgagtccccatgcctactctggccccaccccacagaccgctggctcgggcctggcgcgtctgggactctcatggtacgcagaccggcctgcaggcacctacagcggagggaacaaacgcaagctggcgacggccctggcgctggttggggacccagccgtggtgtttctggtgcgtgggagcggtgcctgggtggggtggggcctgcgacggaggcggggccttgcttatgggatcttccgtgctccccaggacgagccgaccacaggcatggaccccagcgcgcggcgcttcctttggaacagccttttggccgtggtgcgggagggccgttcagtgatgctcacctcccataggtgggccgggctctgatgccctgggctgtggttaaggtgatccaggcctggagagagagccccaaagcacaaggccacaggggatggggggtcctggccctagtggggcgagggcgccaggccccggggtgtaaggacacacagaggtgggacgcggcgccgggatcagaacggtctggggaagagtggggagatgtccacaccagaagggtggcccaggccgggggaagcaggcagtgtggcgccaggcacaggtggccccggcctcacggagctcgtggtgccgggtcccgacagcatggaggagtgtgaagcgctctgctcgcgcctggccatcatggtgaatgggcggttccgctgcctgggcagcccgcaacatctcaagggcaggtgagccggcgcggcctccaggcaggtgtggggtgagggtgggcacgtaggtaggctcaggggagaggccagacgtagagccgggtgaggaaagtttggctccaactggagagatggccaaggctttagattgtcctgcaggggtgactgagggggcgagacaggctggggtgtgctgggggcgcaggaccaggaggcgtgagccgggggctctgggtggatttagaagacacaatcaggtgtgcgttggagtaggtgcagcctggagaggtgagggtggattgatgggtggagttaggggagggcctggttagtgggcggggccataggaaagtggggcgggggtatttattgtgtgggcgggggtagagtgcaagggcgaaagaggagtgtccgaaaaaggagtcaagtggggtgatagcttcgagagcaacctgggcaacctagggagaccccatctctataaaaaatttaaaaattagctggacatggtggtgtgtgcctgtggtctcagctacgcgggcggggggtggcgggggactgagacgggaggaccacttgatcgctagggtagtacaagtatggggcggggccagagagtattaggggctggagggtgagctgaggtgggacctgggaaaggcccgatccggtagccctggccccactcactgcagattcgcggcgggtcacacactgaccctgcgggtgcccgccgcaaggtcccagccggcagcggccttcgtggcggccgagttccctggggcggagctgcgcgaggcacatggaggccgcctgcgcttccagctgccgccgggagggcgctgcgccctggcgcgcgtctttggagagctggcggtgcacggcgcagagcacggcgtggaggacttttccgtgagccagacgatgctggaggaggtgatcacggcgccggggtcgggctgggggaggcaggctgggggccaggcccgtgggctgaccgtccctcttgtcccctctgggctgcccaccgctaggtattcttgtacttctccaaggaccaggggaaggacgaggacaccgaagagcagaaggaggcaggagtgggagtggaccccgcgccaggcctgcagcaccccaaacgcgtcagccagttcctcgatgaccctagcactgccgagactgtgctctgagcctccctcccctgcggggccgcggggaggccctgggaatggcaagggcaaggtagagtgcctaggagccctggactcaggctggcagaggggctggtgccctggagaaaataaagagaaggctggagagaagccgtggtggtgaaa

SEQ ID NO: 1118 - DNA, 57477 bp, Homo sapiens
cgggggcagggagaccggacccagaggcactggggtagggctcggcagggcgggtccgggcggagcgcggggtgcggagggcggaggcggctccggcgcccgctctgcccgccgctgggtccgaccgcgctcgccttccttgcagccgcgcctcggccccatggacgccctgtgcggttccggggagctcggctccaagttctgggtaaggcgcggggctccggggtcactgcgcgggggccagggtcggccggcttcgcccggtccccgccgcctgccttcccgcggggccggcaggtatcccgggacggagcccctgagacggcctgggcgcccgggagggggcgatgggctcgggagggaggttggctgcgccgcccggagccgggtcccacgcggtgtcggggacctgccctgctctgcccttcccggctgcagcactggggagcccgggaaagtgaggaagagtgcgcggctggggcgcaaaggcacagtgcgtggctgggtgagtcggctccatcccagcccctccgtcgggtgcggaaggggcgtttcgcaatcagccgcgggttcctgatggagggtcttccctcagcatctgcctcaggttaggactcggttgcccacctgggcatggattgcccccagggcatccagagcacctgctcaaccaggtgttttgggaggccggctgtgcagtgtcccacccttcttaggaaggtttcctgccaccttcttttctctaggtaagactgaggtctgagagcaggccatccccaccactccggactcagaagggagaagcagaccccagtctggagacaggtgcagggtgtcaggattcctgtagtccaactcccttctcacagatggagaaagggaggcccagagagaggaagggacttgcccaaagttacccagttcaatgaaggcagagctgggatagaaaaacaggctacaggccaggtgcagtggttcacgcctgtaatcccaccctttgggaggcagaggtgggaggatcacttcagcccaggagttttagattactgtgagctatgatcgcaccactgcactgtggcctgggcgaaagagtgagaccctgtctctaaaaaaataaataaataagaaaagaaaatcaagcctttggtgactctcactccaaatctctttctaagacaggctgctcttcagcctgctgactccagcctccagcacagttcaggtgagctaagtgcatacagcctaggagctttcttaccaacttgcaaaacttacttgcctctatgaggcaagtgatcatgtggtctccgttttacagagggagctcagattaaaggtgcttctctgtggtcattaaaggggtgtccagggcttgtgaatcccaatctctaagtcttttcctattttgagtatttgtacatatatgccctttgtgtgtgtacgcacacacgcaggcacgtggggtgttacccaagagttcgtgctgtgcacgtgtgtgcacaggtgtataagtctggagctatgctcttgggctgtgtttagaatgggctgaaggcgttatatggattttttgaaacttggggcaatggaggtaaaaaaaaaaactgtaaaaaggcatatttgggattctctctttttctgtgggtgacccaaaggttaatccgagatggtgcaacttctctgccactgcccttctttcccagtcccacaggaacttcatgtattattcagcatggacaggccacttgccaccagggtccagaggttgtgcctttgcctcatgagcacacttcctttcactgccctttgggccaggctggtatgaccgtggcaggtttgtggtgcctgggatgccaaacagaaaatcaagagggtagttgtgcccaagcttcaggcacaagggctcattgttcctgggtagcctcctgaaccctgagagcttaggactctacagagacaggtctcctggaccccagagttgggaaattcaggactccctttttgtcccatgttcagacatcctctggctctaccttaacatgggattgtggaatccaagaaagtgggagcttgggagtttgaagcagcgagtccaacccctcagtgtagagctggggaaactgaggccaagggagtgaaggtcacaggacaatcaaagacagagtgctgggctgggaaaccggaccccggggctgtggttacagggttgccattgcctggctgtgagcctttgagcctctgggccctctggcccgcgcacttctccttgatgctcgtgagctatacacacctcctctgaggatgcaggctcagtgggagtcagctcatctacattatgaagccctcgtgagatctctgcttggataccttaaatggcaaactgaccaccccccttcccaccccaatctctaaacatctttcacattctcttctggctcctgaaagctgttccaggctgcacccagtgtggctggtgactggggaaggagcgtggagagagaaaggaggctcccagctcatcctctgagggaatgacagggtttgtacagctgaaaggagagagagtctacactggaagctggatcctctgccacagcctaattacaaaaaaggcctggagttctgggctgttcatttgtgatgtgctgtgttgcatctcatttgcatggtgtattattaaggcacaactccccctgaacctttaccttaggggcctgtgggtgacccactttgtgggaagtggttcagggcagcccggaagtacctgaactaggagtgaaaatgcaaggagggggtggggtgttcaggcccctctgggccgctcatttaatctaccaagatgctcagtagctcatccttatagcttcagtttctccaccagtggaatgggaaataacccaacccctacccacctcacaagatttttctgatcaaatgagacagggaatgtggaatgattttaagaactaagaagttttctatgggtggcaagttctgacattccccggaagagggaggagaaagaaaaatggggttagaagaaaatgtcagacgtgggaagacctgcagggaaagagctggtagggctgtcgggccagtggctcccatttcagctgtttgctggggagctgggagctgttcctggctcagtctgagggtaggagactggagaggaccatgccccttgggacatgtgtacacacatctgtgtactcacacaccacctgccaggtgaatgatttgtgtgaatccttctctctctcacccatatcgactttgaagcaggttaccaacttccctgaatgtgccttgggagtttttgtggaaataaattccaaaagagtgaactgtgtaattaaaccacctcactactcaggaggccagaggtgcctcagaacaagggaggaggtgggatcctctgcctgcaggattcctctctgttctgaaccacagaggttgggagcacctgggtggtgaagggagtatgtggaggaagggcctggaggtatttaccccccgccagataaacacctgttggcagaattagccttgatctgacagccccaggaagcttagaaatctgaagatcctgaccatgaaagccatccaaagatggcaaggaccgcctgagaagtagtgagctccctgtcactggggggtatgtaaggacatggttagtgactgcttggcggagatgctggagagaggattcaagccaggaaagaaggtggggtcctgagattctgtgactgggtagagggaagatgcggccagtggggattcattagttcctcctctgagatttctggactcctccttccctggctctctccctgctctacatacggaatttgcctagaagcagctcttggtagaggcctctgggtctccccttggttaggcccacatgggaaaggtgacctcattgttcccttagctgtttacccatcctagggaggggcagatccctggtcccttggaggctcagctccctgtgtctcctgctctgttttagctagccccaattctgctattcaccagctgtgtgactttgggcaaatgactcaccttctctgggctccagcagggctgaggtgggctctggggcctgcttcaggtctggagttgcccaattttggaaggatgagccttgggcttgggggcgaaggctatgcatgattagggcccttcaaagcttagagctcctgggtatcagggtctcctctgccttcttagtaggcagccacaaaaatgtatgagtaatgggcaaggctcctatgccaatgtattttgactcacaaatgaagacagtgtcctgcacatccatggggaagctgagtgggaggtagacactcctccgcttagcagacaccatagctcaccctcccctcaggaacccagtcctccctgcaaggccagagctcccggggctcctttcctccatctcagctgctgcaagcaaacccagtgctggatggctttgacctctgagctcttggcttctggctacggcatttcattgcttgtggcctcaggctggcttctcctcaatcctgctgttcccccacttcacctgggccttaggtccctgagggccagagagatacggggaaggaagtgagtcagggaagtggcattcaggagggagctttgccaagcccgcctgtagtccccagacagggaaatggtcttgaaacactgggcaggcttccagggaggaaggacttggcagggatgaccagctgagccaccccggagtagggccagagcacccggactgtattcagtcctctccattggggcaggatccctggggagttgggggtgaaatgagacctggtatgccattgctggggtggctgggcccctccccttcccgaactgaagttgtttctgtttctggtactgcggtgcagtggttggggctggcagggggcagggtgggatagtgaatgagagcctaactctaggcttggattttggatttctccttttttttttttttgtgacagagtcttgctctgtcgcccaggctgaagtgcagtagcacaatctcaactcactgcaacctccacctcccaggttcaagcaatcctcctgcctcagcctcccaagtagctgggattacaggtgcacaccaccatgcccggctaatttttgtatttttagtagagacggggtttcaccatgatggccaggctggtctcaaattcctgacctcaagtcatctgcccacctcagcctcctaaagtgctgggattacaggcgtgagccaccgcattcagccagatttctcctaactggatattcaggtttctagtcaggggctcccagaaccccagctaggccactacccaggtgttagccgctctgctccctcagctctgtgagaataattgcaaaaagcaggtgatatgagaatgggctgcatggctgaaaggtgatctgggtgcaagtgctctatccccagggtgggacatcatgccggagtcctaccaggtgtacaggaaacactaatcctgtgggaaggagctgggccctggaacaaaactctctgggtctaatcccagcatcagccctgggtgtcagctgtcatgagcgtgaaatgatcatcctggcccacagcaggagctcagtgaaccaaagccccttccagaagcacattggccagttgagcccgtgagccatccctgcaaggggccagcaggcgcagcacaaccagtttttgtttgtttgtttgttgtgttgtgttgtgtttttgagaaggagtctcgctctgccaccctggctggagtgcagtggcgtgatctcagctcactgcaacctccgcctcccaggttcaaacaattatcctgcctcagcctcctgagtagctgggattacaggcatgcgccaccatgcctagataatttttttaaatatttttagtagagacagcgtttcgtcatgttggccaggctggtcgcagactcctgacctcaggggacccaccctcctcggcctcccaaagtgctgggattacagcacagccagtttttgacccctgcccccaggccttccaaaggctgagggagggtgagtggggatcagcacgtgtccttgctctctccacgccttcattgctgctgagtcaatggtcttgtctgttcatcccttccctatctgggacttcaggagctgccctgcagtggtggcttccttctccagtaccacacaggaatagggaagtaatgactcttctcatgacagagactgtcaacaggcctggggcccccagggcttgggaagtccctggcaaagctggggcagagggctccggggtcctcaccccccgcccccatcgcctgtatgagtctgcagtgatttcagcttcagtgaccatgaagtctgccatgagggggcctctgccacgtggtccattctggatgtgggaccttaccccttatcagccccatccagctgtttaatcgcattattaaggaagctgttgttgctgtggaaactgtgtgggtgatggtgggggagggggctgtgggctcagctctcacctcccagcagtgctcttcagagcgggaatgagaggagagccttgagtagggatcgtcatcctgccctgcagggattcagggagtgttacagggtccagggaataaccttcactggccctgtcctcaccttcattttacacataactgagttggagacccttctgggtgccaagaactgtggccttggtaccagggagagaacactgtgttcctgggcatgaagctgcagaggctgcggctggagttggcaccctccatttatctattcatttgtttattcattcttttgttcaatagatggttattgagtaccttctctgtgccaggccctgctctaagcaacaggaaataccatcaactgcagaatacagagctaaagaatctgtcttcgtggagcatatactctagtgggaagaggcagtaaaacaagaatcataaaggccaggtgcagtggctcatgcctgtaatcccagcactttgggaggccgaagcaggaggatcacttgagcccagaagttcgagaccagtctgggccacatagtgggaccccatctctacaaaaaaattaaaaaattagctgggcgtggtggcacatgcctgtagtcccagctactcaggaggctgaggcaggaggatcgcttgagcccaagaggtcaagattacagtggggaaaaaaaaaaaaaaagaacagttgaatgtggcactgtcatgccgttcaacctgtaatttgaaggtagaatggacagggtttgctgagagaccggatgtgggatgtgagagaaagagaagaatcaggggcaactccaaggactctggtctgggaagagagacaggaggaaggaactgccatccccgggccaggcaggctagaaaggcagggacggccaagagctcagttctggacgtgttttgtatgacgtgtcccatagttgatgtcctagctcagggtctggagtgaaccaaatagggagttaggggtgagggcctgtgtgggcgggtaccccctgcctcctagggagggccctgcccaggtgggacatgcttatctcaaggaaaggagcccaggctgaatgcccttgagggtcaaagcagccacccagttctcacagccccaaagtcccctggttgttgccacagagcaggtgtctgcgaaaccaaaacacgggcctgacagctggaggctccatcacccgcttccctgagtgttgtcccgttgccatcgaagtgctttgctgttcattctccctcaccttctccccgctgtggggaggtgaccagatgctgtcatcactcccattactcacaggtggagactgaggttcaagggcacgaaggggctcaccaacagttgcatggctcaaaagtggcagaagccatcctggattctccgcatcggggttgggttcttcctgtggccactccccacccgccttacagagccatgccaccggcctgcaagtgcacacagcgattcccaccatgtccccacgcctgggctcctgtcctcaacatgcacactcccttgtgagtcaatggccccgtgtggcatcacaaagcctgggtgcctgtcccggccacacactgctgggtgtccttgaacctgttgccaaagtgggtgtagtttctcttttgtacactgggcctaacagtgcccctcctatatacccctggaagttgttctgagacaacatccagataacaactaggtaagtgcagtaataaaatgcgggagaaacattaggggcctttattttcctcacttaactggctgccagggaaaagcaaggaaaggtcagaggctggggtgccccagagaggccccatgtagatgaggctctggctgggcccagagaaatgggatgtacactccggcccagagacctgaagatctgggttcagggcagctttgggacaggctatctggatggcaactaactggagtacctgatcaggcctagaggtgtgtcctgtgacccagtgtccaggcctgggccagcatgtcagagactcagcaagagtatgtgggtccttggctcacattgtttgagcaactactgaatactgaataggactactgaatactgaatactgaataggacaagatgtacatggtacaacttctgcccacctgggccttcaatgaaatgcccccaggcagcatgtccctgactgcatgcttcacagagcagggataggcctgcccaacgtgccactgtatctgcagaacccagcccactgcctgactcaccaaggccctcaccaaacattgtcaaggccaagagtgacgctccagggaaggggatctctctaggaggaagggtgctcaagatgaagaaggtgggttttcagccaggcctgtcacccctccctggagtggttaggttaggattttgacaagtggtaaaaagagggactaggttgagcaagggggtaggagcaagaatctcagagcagatttaggatgaagtgagttggctgtgggggaagggagcaatgggaaaggaggtgggaggagatgccatggggggggtcttgaggaccaggttgggtgctaggatgtggcttcatgagcagcaggagtcactgcaggtttgtgggcatgaggcaagaggcacaaagctgtattttgggaagagccatctcgcaggtgggcaggggcactggagggcagagggctgccccagatgggattaagaagggaaggcaggccaggcacagtggctcacgcctgaaatcctggcactttgggaggctgaggcgggcggatcacaaggtcaggagttcgagaccagcctgaccaacacggtgaaaccccgtctctactaaaaatacaaaaattagctgggcgtggtggcgggcatctgtaatcccagctactcaggaggctgaggcaggagaatcatttgaacccgggaggtggaggttgcagtgagccaaggtcacaccactgcactccagcctgggtgacagagccagactccgtctcaaaaaaaaaaaaaaaaaaaaaaggaagaagggaaggcaggctggggaggttggggaaaggaagcagggagtgcagatcactccccttccatgagttgttttcttaagatgctagaacttggccaggcatggtggctcacccctgtaatcccagcactttgggaggctgaggctggcagatcacttgaggtcaggagttccagaccagcctggccaacatggtgaaaccccatctctactaataatacaaaatttagctgggtgtggtggtgtgcacctgtggtcctagctacttgggaggctgagacaggagaatcacttgaaccctggaggcacaggttgcagagagctgagatcgtgccactgcactccagccgaggtgacagagtgagactccgtctcaaaaccaaaacaaaacaaaaaccaaggccgggtgcagtggctcatgcctgtaatcccagcactttgggaggccgaggtgggcagatcacaaggtcaggagatcgagaccatcctcgctaacacggtaaaaccccgtctctactaaaaatacaaaaaattagacgggcatggtggcgggcgcctgtagtctcagccaatcaggaggctgaggcaggagaatggcgtgaacccgggaggcggagcttgcagtgagccgagatcacgccactgcactccagcctgggcgacagagcgagactccgtctcaaaaacaagcaaacaaaaaaacagaaaacaaaaattagcctggcgtagtggcatgtgcctgtaattccagctacccaggaggctgaggtgggagaatcgcttgaaccctggaggcagaggttgcagtgagccaaggtcgcaccactgcactccagcctgggtgacagagcgagacttggccttaaaaaaaaaaaaaaaagaaagaaattaaccagccgtggtggtgcacgcccgtaatcccagctactcagaaggctgaggcacgagaatcacttgaacacgggaggcagaggttgcagtaagccaagattgtgccactgccctccagcctgggcgacagagcaagattccatcaaaaaaaaaaaaaaaaaaaaaaaaaaaagatgggagaactcagaactcaagcatatagattattcaacagttcacatagccagatagttcaaggccagctgtgggctttgaatgccatagtaaaatgtttgaactttgccttctaggcagtagggagctactgaaagtttaaagggatggtatactattattctttcattcatttattcaataaacgtgtatgtgtgtgtgtgtattttttttttaagagtccaggtcttgctctgttgctcaggctagagtggagtggcataatcatggctcactgcagcaacaaactcccgggctcaagagatcctcccgccttagcctccatgtaactgggactacaggtgcctgtcaccagaccaggctaatgttttacatttttgtagagacagcgtcttgctatgttgcccaggctggtctcaaactcctggcctcaagtgatgctcctgccttggcctctcaaagcactgggcaatgtccctggtcttcaataaatatttgatttatttaagcaaatcttttttctgagcacctactatgtgctaggcaccattctaagtacttaggatacatagataaataaaataaaggttcttcccttcaaagagcttacatgtcagcaagtaaaggaaaagatgagagaaaatataataaatcagtaaattatatatcatgtcaaaaggtgataggtgttatagagaaaagaaaaagcggagaagggtgggagaattgggaatacaggggtgggacacaggtggcagtattaaacaggatggtcagggtaggcttcattgagaaagaaagacttcaggatgtctgggggaggagtgttccaggaagagagaagagcaagtgcaaaggccctgagacaggagcagcaagtgcatttagaaacagcaaggaggccagtggctggagtgaagcaggaaaggcggggagagggtcatgggttgggggaagggacattgtgcaggtctatgcaggctattgtagggtgtatggagtgaagatgtcaagtcagcagttagatatggagctggagatttggggagcaatgagctggagagatagacttgaaagtcattggcatatagatggtacatcatatcatcatatgagactgcatgggattgccaagaggttgagtgcagataggaaggaggcagagaagaggaaaggactgagctccaggaccctcttgcaccaggcaggggaatcagcaaagagactgtgatggcatggccagaaaggaaggggaaaaccatgcaggatctgggaccccagggaatctgaagggaagagaccagaagtctatggcaattgctcatgaagagatgagggtctggccaaggggccaggtgggaggaaccaggtaagagatattatcatcccaatgttacccttaaagaaaccaaggcccagagaggggagaggttaagaacctgggtcaagatcacacagcttaagtgtgacttcttctttttattttttatttttttgagacggagtctccctctgtcaccaggctggagtgcagtggcacaatctcagctcactgcaacctccgcctcccgggttcaaacagttcacctgcctcagcctcccgagtagctgggattacaggtgcctgccaccacgcccagctaatttttgtatttttagtagagacgggatttcaccatgttggtcaggctggtctcgaactcctgacctcgtgatcttcccacctcagcctcccaaagagctgggattacaggtgtaagccattgtgcccggccaagtgtgagttcttttaagctgtgtgaccttggccaaggtgcttaacctttccctgccaagtctcaaacacctctttgtccagctactatgcttccatcaagaatcaataggacctatgtccctacaggtgtcagggtagctggcagaatggtgatgcccttggcagaggcaggcaaggccaaaggaagggctggttctggcagggagtgaaggatcttactttgagaggtattgaatatgaggtggctgcagacagatggtgacgccatctgagaggcagcaggaagtaggcgctgaggctcaggaggtgatttgagctgttgatctggatttgggactcctcaggacaatctgtgaacaatgatgagagagagcaccaaggaccaaggtctgaacttgggagctagggcccatgtccacagggtgaactggaaggaagataaggagacagcaaggaatgcttgccaagaaaccaggagaccaggaaagagtagtttccaagagatgggggaagcccacactgttgcagggaggtcctgcataaagtctgaaacgggtctatttaattcgcccttggaggctgggcatggtgtctcacacctgtaatcccagcactttgggaggccaaggcgggtggatgacctgaggtcaagagtttgagaaccagcctggtcaacatggcaaaaccccgtctgtactaaaaatacaaaaattggccgggcgtggtggtggaagcctgtaatcccagctactcgggaggctgaggcaggagaatcacctgaatcccagaggcggaggttgctgtgagctgagatcacaccactgcacaccagcctgggagacagagcaagactctgcccaaaagaaaaaaaaaaattgtagttggaaggacttctggttctatagggtggattgaacacaagactttatctccagtccttcctgattttccatcaaagtgacagtaaggaataaagaatgtaaacctacaaggacaaagagaagaggagacaacagcagacaagatattaacacctttttggaaagtgagaaacaggttgaggagtgatcactgacacagcagagaacaactgaaaccaaaggccatttggagtctgtaaaagctcggggattggagggctgaaggaggcaaggggaagagcagggctgaaagcagcggctgctaggagaatgcataaggagagatgaaacacccaagatacttatccatctcctctcaaagccaggcaaattccagccacctcacagaagaccagcagtttattctgtggaattaagtaaaagtctgcatactgaaggatagaaccctcagccctcactcctaaattggtcccagagaaaagacctccagattcttccagttgttgggggagtcttccctaaaggaccaggttcctacttgatcactctgcagtgaagcccaacagccaataagcttggtcctcggtactctgtcttcagtagctgtttcttggtccttggtccttggtactctcactcatcattgttcacagattgccctgaggagtcccagatccagtcccaaatccacctgcccccaacacacagagcagccaactctttagtgtcttactccaaaatattgagacagccaagccgcaagaatcaccacaggtcgggtgcagtgactcacgcctgtaatcccagcactttgggaggccgaggcaggcggatcacttgaagtcaggagttcgagaccagcctggccaacatggcaaaacccctctactaaaaatacaaaaattagctgggcattgtgacacgtgcctgtaatcccagctactcgggaggctgaggcaggagaatttcttgaacctcagaggcagaggttgcagtgagctgagatcgtactaccacactccagcctgggcgacagagggagactccatctcaaaaaaaaaaaaaaaaagtcaccacacatttgaggaaaaattctgttaaaataaaaactttagacaaattaaatttagcagagtttatctgagcaaagaacaattcatgaatcagccagcatcctgaaccagtagaggttcacagagttttaccacccagcagtatgggcaggcagtattaatggacagagaaaggaattgatgtatagaaacagcttgattggcgacagatcagtatttgccttatttgggcatggtgcaatgaggtgtttgccttatgtggacatgttctgatgatctggcagcttgtgattggctgaaaattctgctatatttggctgagacttggctgcttattgtaagaatatactctcaagttacgttgcagtttgtttacatattgaattatgctacagtccactatgtatggagtcagctttatacctgggtgacagagtgagactttgtcaaaaaaagaaggagaggagaggagagagaggagagagatgaggggtggggaggggaagggaggaaaggagaaaggaaggaaggaaagaaggaagggagggagggaagggaaggagggagggaagaagggaaagaaagaaggaaggaaggaaggaagaaagagagagagagaaaggaaggaaggaaggaaataggcaacacataaaataaatttttttaataggatcacaggtcactgtgaacaatagccgttcattaaatgacttcggaggcatatacaaaaagttacatagttgtagaaaaagcttagctgttttaatagcgagttctcagttttcttaagtgatcaaaaacctaacaaagacagcatgaagcacaggaaattatctgggtagaacacagaatctttgttttctaggccaactacctaaagagaaagaaaaacattttacaatttcctattatgatcagaccaataatctaagaacaccatgttgttttaatggagagaaccaaattctagttttgcatcagtgtaattttgatattaatgctagctcttatcgcccaggctggagtgcaatggtgcaatctctgcttactgcaacctccgcctcccgggttcaagtgattctcctgcctcagcctctcaagtagctgggattacaggcgcctgccaccacacccggcttattttttgtatttttagtagagatggggtttcaccatgttggccaggctgggctcgaactcctgacctcaagtgatccacccgcctctgcctcccaaagtcctgggattacaggcgtgagccactgcacccggtcgctaacttttattcttaaaaaacttgtaaataattacctcctaatcttaaccagcttgatcacccataaaatttctttcacaagattcatcttccacaaacctcctacaactcttatatccattcactttttgtcctatactttcctcttctcattttcgaaaaatcagtcatttcactttaggacaaaatttattctctttttccgttatcaaaacaaaacatcctcacgtcttatagcttttccttagcttcctttgtatatttctttttcatatattcctttttcttaccttccttgtatattttcatatagattttcccccttattgtttctagtaattgtagctacatatattaattagaattcttaaccccggccaggtacagtggctcatgcctgtaatcccagcactttggagtccgaggtaggcagatcacttgagggcagaagttcaagaccggcctggctgacatgctgaaaccctgtctctattaaaaatacaaaaattggctgggcgtggtggcgggcacctgtaatcccagctactggggaggctcaggcaggagaattacctgaacccaggaggtggaggttgcagtgagtcaagattgagccactgcactccagcctgggtgacagcgcgagactccatctcagaaaaaaaaaaaaaaaaaaagaattcttaacccttagtgaccttaatttccatggacattagaaagtaagcatttgtgaattgtgtgtcacaccagctgtagattggtaaatctatgaaccataatgtctagaagcatgagctttctcatagtacaatttgtcagtgtggcacagaacatgtttctcaatggtccaaaatgtctttaagtctctctgtaaaaataaactgtaaaggaggcaaaatttcatttgtatccctttaggttttttgtttgtttgttttgtgaggcctgaaaactaaattgttgtttgtacagatttccctcctcctcaactttctattcttgatgctaagagtgttaaaaccttctggtggctgagcgtggtggctcacgcctgtaatcctagcactttgggaggctgaggcaggtggaacacttgacctcaggatttcgagaccagcctgggcaacatggtgaaaccccatctctacaaaaaatacaaaaattagctggatgtggtagcttgtgtctgtagtcccagatactttggcggggctgaggcgggaggattgcttgagcccaggaggcagaggttgcagtgagccgagatcttgccacttgcactccagagtaggcgatagagaccctatttcaaaaaagtaataataaaaccttctggtataggaaggacatcttttacatgggaattttatcttacattcatttaactcacttattttcaacacttatgcttggattgcctataaagatgagataataaacaactagtcatcattttgtttttcttgctgacaaattttataatataaagacaacataagcttgttttaccagtaaacctagataggaaatcatgcatctttatgatatttaatccccaaaactatgaaaacatgtctgtttcagtcaaaccaacaatattcttatttgccaaagattacccaagtcagatgagctgcaaaagtatttgaggtagttcttaattttctgagagaatacttcatttatacaagcacttatttttcttaaagccaacaaaatagagctctttcataatttaattttggagcattaaaaggagataagaaactatgatacctgtatcatacatacagacttatataaacataaacagcaacagatcttacagctttcatttaaatatcttagccatgttccaggtacagtaatataaaactcctgaatttattaaagactatctggatccaaattgttcttctggccaatggaacaagatttcttgcccagatgactaaagcttttgaataagattcgtgaaggagcttttaagatttttttgtttgatttctgtaaggaacctattataaagaggcaattttttattcatttaatcttttagatgcctctgtgtatcaattaaagaatgcatcccattgcttttgtggcatttttgaacctttcttttctaatgcaccttgcaagtgaacagttttatctaggtcaaaactttcccactgtggccactgtaactcttaagttgtcctcagcaaagttaacccatttttccaaaaatacacatgttcctcataattgttgttcatgaagttagccaccgtcccagaaagtggcgtctcagactctggagtcccagactccttagatttggaggaactcactttcaaaaggcacctgcctgaggcttttaactggatccatttcagttaattatcagatctgatttgctcctggacccagtcctacttgacccagtctaagaattgttcaaataaacttggagaacacaaaacacaaattcctgaagcttggaatctgagatagaactcacccatgacctccagttgctacaagagaacaattggcacagtgtgccctgtcaggtacccttacttggtcactaaatgctcctgagggtcactggagttctacttccgatcccacttctgacaccaatctgttaaaagaaaagctttaggccgggcacggtggctcacgcctgttatcccagcactttgggaggccgaggtgggtggatcacctgaggtcaggagttcaagaccagcctggcctacatggtgaaaccccatctctactaaaaatacaaaaattagtcaggcatggtggtgggcgcctgtagtccaagctactcaggaggctaaggcaggagaattgcttgaagctgggaggtggtggttgcagtgaaccgagatcacgccattacactccagcgtgggggccaagagcgagactgtctcaaaaaaaaaaaaaaaaaaagaaaaagaaaaagaaaaaggaaaagctttagacaaatttagcagagcttatttgaaaaaataagcaattcatgaattcagcagcatgctaaactagtaaagactcggctgggcgtggtggctcacacctgtaatcccagcactttgggaggctgaggcaggcagatcacctgaggtcaggagttcaagaccaccctggctaatatgatgaaaccccatttctactaaaaatacaaaaaaattagctgggcgtggaggcacacacctgtaatcccagctactcaggaggctgaggcaggagaatggcttgaacctgggaggcagaggttgcagtgagccaagatcacaccattgcactccagcctgggcaacaagagtgaaacgccatctcaaaagaaaaaaaaaaaaaacctaaaccagtaaaggctcaaagaactccacctaaccatgtggtcaagtagtacttacagagagaaaaaaagtgacacatagaaatagcctatttagaactcggcatttgctttatctggacaggtctaagcactttgcagtctgcgattggctgaaagctcagttgcaatgattggctgagactcagctacttgttacaagaaactctcatgttaggtttgtttacatattaagttgggtttcagttcactatgtaaggaggcagcttaaggccaaatttaatctaatttaacacctccagcttgaaagacaaaaccaaaccaaatcaaccaagaaacagaaaaaagaaaattcaaagatgtatgagcatgcataactttgataaaaataaaaataataattatttgaattggcaattagaaaatagttatatcctcaggtaacagatgtctctaggtggatgagattgtgggtggtttttcttgttgttgatattttctgtgcatctctaaaaaacatctaatgctttgcaaagaacataagaaacagattagtacattagtggccttggaggaaacaatctcagtaaaacatgtgtttattaatgaatgtattcccccatccctttccaaaaaagttcataggtgtagttatagtcaaaggtaagaggcagtcttgtcagagccagtaaagtaaccaaccatcctggtttgcccaagaccaagcagcttcccaagacactagactttcagtgctaaaaccagagaagtcccatccatactaggagagttgatcactctagtctgtgtaatttgcaaagactctccatatcctttggttcctgtgagtctcaaatccacccagtgaggtacaggtgggccggtggatggtcacctccatttcagaagagaggcagctaaggctcagggaatctccctatccctgacccgggaaaggccttaagagaaagtggtcttttaaactgtgtgtatatatcactttgataaaattaaaaattagttttaaagaagagagagggccaggcgcagtggctcacgcctgtaatcccagcactttcggaggccgaggcgggcaggtcgtaaggtcaagagatcgagaccatcctggctaacacaggtgaaactccatctctattaaaaatacaaaaaaaaaaaaattagccgggcgtagtggtgggcacctgtagtcccagctactccagaggctgaggcaggagaatggcgtgaacctgggaggcggagttttcagtgagccgagattgcgccactgcactccagcctgggcgacagagtgagactccatctcaaaaaaaaaaaaaaaaaaaagagtgagggccaggcgcagccgtcacgcctgtaatcccagcactttcggaggccgatgcgggcagatcacgaggtcaagagatcgagaccatcctggccaacatggtgaaaccccgtctctactaaaaatacaaaaattagccaggcgtggtggtgggcgcctgtagtcccagctactcaggaggctgaggcaggagaatcgcttgaacccgggaggcagaggttgcagtgagccaagatggcaacactgcactccagcctggcaacagagtgagactctgtctcaaaaaaaaaaaaaaaaacaaaaacaaaaaaaaaagagtgggaatccagaatgatagaaagaaaatgagcctgggagggatgaactgcagaggaccataaggtaacatgggagcagttttgcaggtgtatacaactgtcaaaactcactgattgtacactttaattgggtgcagtttttgttgcccttaaattatgcctcaattagagagaaagagagagaatataaggaaatgggggcagccatggcgtccttggagaattcacacttgggacgacaactgctcatttgtgtactctctcctcctcacctgtcttccactccacccctgtctctgatggaacatctctccagctaagccatcttcctcaaggcagcccaattctctgtggggctgccacagcactaaactgttctctgtgtccccaggactccaacctgtctgtgcacacagaaaacccggacctcactccctgcttccagaactccctgctggcctgggtgccctgcatctacctgtgggtcgccctgccctgctacttgctctacctgcggcaccattgtcgtggctacatcatcctctcccacctgtccaagctcaagatggtcagtggctcagggatctcctaccgatggggctgggccctggggattctgcttttattttttaatttaattaaattaattaattaattaatttagagacagagtctcactctgtcgcccaggctggagtgcagtggcatgatcttggctcactgcaacctctgccttctgggttcaagcgattctcctgcctcagcctcctgagtagctgggattacaggcatgcgccaccacacccagctaatttttgtatttttagtagagatggggttttgccattttggcaggctggtctccaactcctgacctcaggtgatcagcctcccaaagtgctgggattagaggcatgagccactgtgcccagccagcattctggttttaatgaggccctctcccacctcctcggctggactgggttccccagtctcacctgacctgcttggggtcatgggaatctgacaactgagaatatatacagccagctgacatattccccacttgggaaagtttaagtaagttcagcaacactctccccacctccagcaagcttctggtcagctccattcccagacctcagtgccagtcccaggcaggtctagtggattctggtggcttcaggtacaaagaccccttcccagtgaggactgtccttgcctctggggatgcggattccaacctgtgctctcttcgcaggtcctgggtgtcctgctgtggtgcgtctcctgggcggaccttttttactccttccatggcctggtccatggccgggcccctgcccctgttttctttgtcacccccttggtggtgggggtcaccatggtcagtgtggggccctgggaaagtggatgggggaggtctccattgggttgtggactgtgatagggaaactgtgggctctgaggagagggctggacatattgggaatgggaagaagaagggggtggccccagaaacttctggccatgtgggatggggagaaatggaggcaggtccagatgtgtgtgttctgcccgggcctccctgccctccctgcacagctgctggccaccctgctgatacagtatgagcggctgcagggcgtacagtcttcgggggtcctcattatcttctggttcctgtgtgtggtctgcgccatcgtcccattccgctccaagatccttttagccaaggcagaggtaaggttgggggagaggggaacctgccaggtttagccctgataggagggtgacctcagggttcaaagtcactgctgggtcccaggtccctccctcgaggcttcaagtacaaacacaattgtgttgttctccacttgctacatttctacctggaagcaggctgaggagggggcaccagtgtaacacaggaatgagccaagatgccaccactgttggaccatcatgtgagggtagggggctgttccacagcacccacccaccaagtgcaatatctgacgtgggtgtcagtcagtgcctgtgtaatgaacacatgtatgcagacaagtgtgaagagttctggcttacctagaggtcccattagcatgttcccttcctttcttcccacctccctcagttcctggccttcctcttgatcttcagtggctgtgatgttgggctggtgggatggaacactgcaggccaacctagtgcctcccatttctccatctcagcgggaagcaggcaaggagagtagcaaagaacataggctgtgaacaacccacttactccccatgtgggctcgggcgggtcgctgaaacctttggagcctcatttccttaattgcagaaagggcgtcatgagctgtcctgcctgtaggctgatgtcccagttagacaaggtcatgtaggtaaggtgatggcaccacacctggcacaggtgccacacctggtcctcgctgaaccagagctcccttgtgatccttcctcatctctcagagtcctctgagtggggacctggaggcccccaggtgctgcctcctgccccagaggagactgatgccccaagggactccgcagggcaggggctgcaggcccaggcttttccagtgcttctgacgcccctccactctcccacccagggtgagatctcagaccccttccgcttcaccaccttctacatccactttgccctggtactctctgccctcatcttggcctgcttcagggagaaacctccatttttctccgcaaagaatgtcgaccctgtgagtttcccatggagggtgcgggggctccacagctgagtcctcagcccaactctgaccagcagcccccaacccctccagttcctttcaaagtgggagagaggtcatccccacaatctgtaaactggggcttggagcaggaacaagggtcccctccatttccctactctgctttgagagggtggtgggcactcctgattcccccgtcctattctctcgccttctagaacccctaccctgagaccagcgctggctttctctcccgcctgtttttctggtggttcacaaagtgagttggctcttccaccagccaggccagagggaggggagggatggaaggtgagatggagaaaggggagcagggcagcagtttagggaccgggctggccacctatcccaccccccaccgcagtgggcacagggcagatgagggtagggaagtggtctgggagggggaccaaatgcagaggcctggcctggcccagtgccgcccccaggctacaggccagccctgcatctggcaggctgtggggacaggcccaggaggctggaagaagactgtcattagttctgagctcctctgtttgtgataaacttgcagcctgtcatctccttggctgcgcctcagagcggcttgagcaggataactgtgtctgtgacctgggtgacagctcattaaccccacagcactgaggaagcacccgaggctggggccaaattgcccaggcctcgtcctcacccagggccccaggcagcgtggattccatcaccagggcctggggtggggaggagatgggacacctggggaggaggaggagaagggggtagtggtaggaacttcggagggagagccagtgacctcaagcctattcactgaggaaatgaaggagacacctttcatggtcacagtgcccgagggagaccctcctttctggagaccctggggccctggagacactgacccttggctccaggctgctaaaccctgaccctctgcggggctgcctgccgggcttcacctccccccaggatggccatctatggctaccggcatcccctggaggagaaggacctctggtccctaaaggaagaggacagatcccagatggtggtgcagcagctgctggaggcatggaggaagcaggaaaagcagacggcacggtgaggccctccccttgccccaacacccagccccttcgcttaccccagatctcctgcagaggacgctggtagaccttggagggcggcattgctggggtggcaagcagagcaggaccaggtgatttcttggcagcctcgggaccattctatgggaagcttaggcctggatggcgctagttctcccagctctggtgggggcaggagaatggctggcactttggagcaactactccatcccaggtcccatcctaaggatataaataaactcacttaatttttcaacagccctaaagggtaggttcaagtgtccctgtgttacagatggggacactggggccgggtgtggtggctcacagctgtaatcctaacactttgagatgccaaggcaggaggattgcttgagtccaagagttcaagaccagcctgggcaatatagtgagaccttgtctctacaaaaaataaacaagatgagccgggcatggtggtgtgcacctgtagtcccagctacttgagaggctgaggtgggaggatcatttgagcccaagaggtcaaggctatagtgagctgagattgtgccactgtactccagtctgggcaatagagtgagaccttttctcaacaacaacaaaaacagatggagacaccgaagcacagaaatttaacagagggcctcccagggtccccaagttggtggtggcagagctggaatccacatggagccggctggccccagaggttctcctcatatcactgcaccaccctgcctgactgagagggctgattccagggccaggagccagcacacccctgccaattctgcctcctcctgtctggaggcggcggctgaatgagatgatcttcccctgaggggtcttcccactgtcagcctcttatcaaggaccacaaacctgtctctggccaactgcctcaccaagagagctgacgctgagcatcatctttctccacccaattctgaccccaggattgaaccctccctcctcccatccacaatccaggcctaggagttcaatgtttgctcagcccggagcttccggttgtcaccagctgttggaggagcctggggctgggcatggttagcagtatcctggctttcatggcttggagcctccacgaagacctatgggcccccagtctgcctgctgcaccccctctcagtccctccatgccactccaccccctccctgttcagctgcccggtggctgtaccaacagccatccttgatcttatctaccttccctcttggcgtcctccctggagccagcactggggaggcggggagagggccagactggggggatagctgggttttagagtccttgtggtagcagtctggccaccccttcagatgccctctggcagctgaggacagagtcgcttgtgcaattcttatgctgtctgttcccctcccagctctgagagccaagaaaacagctccttcctcctcctcactcctagccagcccagcctagcccttggcttcctggagcccctgtccccattcctaacccactgctccttcctccctggaccagacacaaggcttcagcagcacctgggaaaaatgcctccggcgaggacgaggtgctgctgggtgcccggcccaggccccggaagccctccttcctgaaggccctgctggccaccttcggctccagcttcctcatcagtgcctgcttcaagcttatccaggacctgctctccttcatcaatccacagctgctcaggtctctccacactccggctcactatagccctgccctgggcagcagggctggctggctagcccagaggaaggaacaacgtacagtgaaaagaaccccagaccaggaaccagggaggctagctccactttctgtgtgacctttggcaagtggcattgcctgacttgtttcctcactcacattcaacttagaattgctgtgcatatactatgtgccgggcaccgtggtgtgtacgttaacaagcattgggtctttaaatcttcccaacaatcctatgcggaattgccccattcccatgtcacagatgagaaagcaggaactcagagaggtgaagtgacttggccaagggcacacagcaaagaaggaatcaggtctgagtccaggactctgagctccgactgaggtgctctgtccccaccatcaggctctaacatctgtctcaggaatggcttggactagaacgagctctcaaatgagagggtgggaaggagagctgcctagtagctaagtccccacctccttgcccctccgtgcatgcattaatttgttcagcaaacatttattgaacctccagggtaccagaatggtgctcgatactagggatacagagttcaataagacagggtcttgatgtcttatgggagaaaccagcgtgtaaatcaattagaattcagtgggggcagaagtgttctcgggtgtctggaaaaccccgggaggggcaaagaagccagcctgggatgcagcaggaagcacccactggcttgggaggtcaacgaatttggagagacaagtaggtgaagaaacaggggaaagttcagcctcagcttagtcacaaagccctgaaacagcatgactcaggtgtttctgagtggcagaggaaatggcaacgagagggaggggcaggaaaacagagagagggagagctaaggatatccttgaaagatctgagccagggaggggcatctggcttcaaggatctcctgccaggagtgtgggggatgtagggcagggtggctggatggaagtgggccaacccggtcagatggagtccaggccaggaatgagacaagtattcaggagcaatttgggagatgggcgtgtgcgccagagagacagaggagtgccaggcaacctgggtgctggcctgggtaactggaggacgatggatcttttgctgagctgatgggctcggtgggaggaggaggctgggtggggggcaaggtggtggatggagtctggtcatgtggggccagtggtgctggtgggtcctccaaggggagattcccagctagctggaagtcaaactctcgagcccaagagtttgagaccagcctgagcaacatagcaagaccctgtctctacaaaaaagttaagatattagccaggcctggtggcatacgcctagagtcctagctactcaagaggctgaggtgggaagactgcctgagcctgagaggttgaggctgccgtgagctgtgatggcaccaccgcactccagtctaggtgacagagagagaccctgtctcaaaaaaaaaaaaaaaaaaaaagagagagagagacaccagtcactgggctggggccactggggcccaccctactccaatatgacctcaccaaatgaggccacgttcacaggtaccaggtgttgggagctgaacatatctttctgggagacacaacttaagctatcacagaaggggaggcctggctatgattatggctggagggctccatgtagtcgagaggagagtgtcccaacaatgaagagactcggtcatgtcaataggtgaaggtgtagagcttccagcagaggtggccagggtgaagctcagcggcaaagggggcaacagcgcagcaagttcctgaggaggcagaggaaggccagggctcgggggcaggggcagcctccgacagcctgagcaccagaaaaaggaggacaagccactggagggcagtttgtgagtggcaaggagtttgtgggtggcagggagttctcaatgggtggctaagcaagaaggcaggtagctgctgagaggggtggggggctgggatgggcctgaagggaagagaagagaggtgaagaaggccccaagagcgggggcggattagggacctagagaaggttgctaggcagtgctgggggccactgagtttggaaaggtggatttgagcggcaagagtctttgtggtcatgtggcggaatctagagcccccagcagcctaggagaaggagcagggaagtccagtcaatggaaacgtggcatttcttcccgccatatgtcaggaggtaagaaggcaggcaggtgaggctggtggtgagagcgtcatcgatagggcgtgcagcagggtccatggtggatagagaacgaggtgaaggcagagtggagccaggaggtcgtggtcttgaggcagtactgggttgaccctccctggcccaagaggttggagggggtggaggtttcagaggccaggggtgcagtggagactgcgggtaaaagcaaagggcagcagaggagggagcagccatgggggcagcactgcccacctcactcctctctcctccccacagcatcctgatcaggtttatctccaaccccatggccccctcctggtggggcttcctggtggctgggctgatgttcctgtgctccatgatgcagtcgctgatcttacaacactattaccactacatctttgtgactggggtgaagtttcgtactgggatcatgggtgtcatctacaggaaggtcagctggagcagggcccaggggaaaggctggccctgggcagcttgcaagaggctcgcagccaagtccacccactactgtctacctgcaggctctggttatcaccaactcagtcaaacgtgcgtccactgtgggggaaattgtcaacctcatgtcagtggatgcccagcgcttcatggaccttgcccccttcctcaatctgctgtggtcagcacccctgcagatcatcctggcgatctacttcctctggcaggtgactctccaaccctgacctctgcctccttcctctgacatgctgcagaagtggcaagagaggattattctggaactgggagcatggcacatgcttgtagtcccagctgctcaggcggctgaggcaagaggatcacttgagcccaagagttctggctgcagtgcgccacgattgtgcctgcgaatagccaccacactccagcctgggcaacatagcaagaccttgtctctaaaaagaaacaaagaaaacagaaaaaaagaaggagggttattctgggttagcagaggggatatagaattgacacaagagctggctgggcacggtggctcacgcctgtaatcccagcattttgggagaccaaggcgggtggatcacgaggtcaggagttcgagaccagcccggccaggatggtgaaaccccatctctactaaaaatacaaaaattagccagacgtggtggcgggtgcctgtagtcacagctactcaggaggctgaggcaggagaatcgcttgaacccaggaggcagaggttgcagtgagccgagatcataccactgcactctagcctgggtgacagagcaagactctgtctcaaaaaaaaaaaaaaaaaaaaaaaaagaattgacacaagagcttccctaggcattggtggggatggagggataggacttcgaggatgctgatgtctgcaaaggaatcttcccaacatctgttgctatccttcctgcagaagccagggaggaaagaaagtcttggagggaggtgggtgtgactctggctgtcatcgtctatatttgccttcctgtgtgtctggacacccttctatatctgctgtctgtccctgtcgtcgttatctaatggctggctgcttctacaaatgttgtggtcattctgactttctatctgtttggccaaccaccatcttttgcttcctgcccatctacacatttcaagttaacaggcctctgtttgcctgttgggttctctctgtagactttggtaatctgtccctatgtgtcatctatccaccggtgcctcctcagaacctaggtccctctgtcctggctggagtcgctttcatggtcttgctgattccactcaacggagctgtggccgtgaagatgcgcgccttccaggtaggtgctgtcagaggtgcatcctcctgcctgcagcacccggccggctgcctgggggaaggtgtccactaaccttggggcctcccaactaccttgcttcctgagtatggatggctactagccatttgcagaaaccatagctcactcttccctcacagctctcagagggttttactgacattctcattttgtagcagaagaccaacgcttagagaaataatggcagtccagaatcaggcagggctgggactcaaacctgactatcctggtctaacaaggagttttcccgctgcactgtgctaagcatgaatagccagtcactcagtctactatttgcaaacatttcttgaagtgttttttttctttttttttttttttgagacagggtctcgttctgtcacccatgctggaatgcagtggcatgatctcggctcactgcaacctctgcctcccgggttcaagcgatcttcctgcctcagcctccctagtagctgggactacaggcacatgccaccacacccggcttatttttgtatttttttttttagtagagatggggtttcaccatgttggccaggctggtctcaaactcctgacctcaggtgatccgttcatcttagcctcccaaagtgctgggattacaggtgtgagccatcacacctggcctattgaagtctactagcttcccactgcccataggaaaaatgacaaaccccctaagaagactcagcaggcttctgcttaccttgcaagtcctcaccccctgcggactggccaagtttcagccagtctggtcttctttcttttctccacagcaccaagctcagggtacctctaggggccaccacatatactattccctctgcctggaatgcttgtcatccccctcttgcctgcctaactcctttccttcccttacctctcggcattgaagtcacttcctcggctgggcacggtggctcatgcctgtaatcccagagctttgggaggccgaggcaggtggatcacctgaggttgggagatcgagaccagccagaccaacatggagaaaccccgtctctactaaaaatacaaaattagccgggcatggtggcacatgcctgtaatcccagctactctggagtctgaggcaggagaatcccttgaatccaggaggcagaggttgcggtgagccaagatcgcgccattgcactcccacctgggcaacaagagcgaaactccgtctcaaaaaaaaaagtcacttcctccagaagtccaccctgactgcccagtctcagtctaagttagtttccctgccatcacctcattactttcttacaggatcctgtgatttcccatcagaacacacataatgattaataattaagcatttattcagatcattgtttgcttattgtatgcctcccccatcagatcgtcagctgtatcatggcaggggccttgtctgaattcatcgtgacaaattctacacgtagcccatggcctggcacatagtaggcactccataaataggggttgaatgaatacattaatctggtgtgccacaccttgggctaaggtcttggagaacaaagagaaataaatagtccatcccctcaggaagctcacagtctgattagagaaacatatatgtaaaggaatggttatggaacaaaaggaaagtgcaatgtgctttagaaacccagggaaggggaccaggtgtggtggctcacacctgtaatcccagcacttggggaggccaaggtgggaggatcacatgaggccaggagtttgaaatcagcctgggcaacagagtgagacctcgtccctacaaaaaaatttaaaaattagctgggcatggttgttcatgcctgtagttccagctagtcaggaggctgagacaggaggatcaaaggagcccaggagtttgaggctgcagtgagctatgattgtaccactgcagtccagcctgggcaacacagtgaggcaccatctctaaaataaataatactagcaataataataagaagaagaaaaagaagtagtaggagaagaaacccagggcaggggacagaggatgctgcctggggaggccggtgcagtggcactgagggtggagatggatcttgtcaggcagaggacacagggaggcaggggctgtgcattccaggccaaggcacagcacaggcccagcaaggagttgtgagaaggaatggtgggcagcgtggaatggctgcaatggatgagaatggatggaaggtaggaccctgtgagcaggaggtcaggggagggagcaggtgtgccactgacactctttctgcctgcacaggtaaagcaaatgaaattgaaggactcgcgcatcaagctgatgagtgagatcctgaacggcatcaaggtgctgaagctgtacgcctgggagcccagcttcctgaagcaggtggagggcatcaggcagggtgagctccagctgctgcgcacggcggcctacctccacaccacaaccaccttcacctggatgtgcagccccttcctggtgaggcttggcacagggctgggtccctgcctccagggctctgggtgcccaggcatggccagggctcattggactctaccctgacaccacctccacgctgctcaggtgaccctgatcaccctctgggtgtacgtgtacgtggacccaaacaatgtgctggacgccgagaaggcctttgtgtctgtgtccttgtttaatatcttaagacttcccctcaacatgctgccccagttaatcagcaacctgactcaggtaaccctgggtagggctgggggctctactggagttggaacaggttgttggggtcagggaagggtcacttagggcaagggataatcagggggagttattggattcagggaaggttgctagcattatgaagagctattcaaggttgaatgaggtcattaaggtcaggggtcatttggagtcacaggtggtcaggtcgggtgtctggaaacctgagttctgtagatagcctcctcttaccaacctggactttctctttgggcagtgggagccatggaagactcagtcgtgggagggaccccagtgctagtgtctgggccctcagggggtcctgcctagcccaggatgctggggatggggcgagggtaggggttgggggttgggaaagtacagtctctagggctgactcacatcctcccgtaggccagtgtgtctctgaaacggatccagcaattcctgagccaagaggaacttgacccccagagtgtggaaagaaagaccatctccccaggtctagagagcccctacctgggctgcctgccccagtccttgctccagaaaaacctctgtttcaagcttttcctttgttctctcctgaccccttttcttcttcctctgttcacatctgcttcgactctgacctcctccctcttccgggttctctgctctcctccgccctcctccacagggctccccacatccctttcttcctcccttttcccaaggatcccctccccatggcccaggctcctcccctgtcctcctttcccctgccccccagcctccctgcaggctaccccatcccttgagctccctccctgaccctgcccaccttggtcctctcaggctatgccatcaccatacacagtggcaccttcacctgggcccaggacctgccccccactctgcacaggtaccagcttctcccactcccttcccagctgcccacggtgggctggaagttcagatcaatagcagcaccctgcaaagcctttgaccaagaatgcaggaagagcttcagcctgccaggggggtgtctggaagggcggagggcttggttctgcaggtggagggttggagaccaaaaccctgatccctgcctctaactggactcctggggtccttgcccccagcctagacatccaggtcccgaaaggggcactggtggccgtggtggggcctgtgggctgtgggaagtcctccctggtgtctgccctgctgggagagatggagaagctagaaggcaaagtgcacatgaaggtgagagaggcaggggctcctgggcagggtgtggggctcagccaggccttgggcaagccccgaggtaaatttctcctgtggccagggctccgtggcctatgtgccccagcaggcatggatccagaactgcactcttcaggaaaacgtgcttttcggcaaagccctgaaccccaagcgctaccagcagactctggaggcctgtgccttgctagctgacctggagatgctgcctggtggggatcagacagagattggagagaaggtacagagtcctcttccatccctaagaggctagggcatagagctgcccacctcaacccagcccaggtccatatattcatcccttcattcacacattggtgtaacgttatgcccaactctgtgccaggcactggggaaacagatctattagcagatctgtttagtgaacaagtaggaactattgaatattctaggagccaggctgaaggcctgtgcagggtacagggagggcacagcagggagcctacataaggaagagcatcactttttttttttctttctttctgagataaggcctcactctgttgcccaggatggagtgccatggtgacatcatgggacgctgcagcttggaactcctgggctcaagtgatcctctcgcctcagcctcctgagtatctgggaccacaggcacatgccaccatacccagctaaatttttaattttttttagagacagcgtcttgccatgtcgcccaggctggctcaggagatcctcccaccctggcctcccagagtactgggattacaggcatgagctgctgcacctggctgagcatcactttttttttttagacagagccttgctctgtcacccaggctggagtgcagtggcgcagatcatggctcactgcaacctccacctcccgggttcaagcaattctcgtgtctcagccacccgagtagctgggattacgggtgcgcaccaccacacttggctaatttttgtgtttttagtacagacggggttttgccatgttggcccatctggtcttgaactcctggcttcaagtgatccccccgcctcagcctctcaaagtgctgggattacaggcatgagcaccgtgcctagccttaagcatcacttttgacctcagttttaacaactgaggaggaggagctcatcatgtatctgttcattcatttaccatatatttattaagcacccactctattctgggaaatagtatacagtagtgaatactaaaatgccgggctaatatctctaccttcatatagctcacattctagtggcaggaagagataataagtaagataaataagtacaatatataatatgttagataaatgctcagtggaaaaaataaagcggggaaggaatacaggaatgcctgcagagttgaatggttaaggtagcttgggaaatcctcactgagaatcagagaactcaacaaagagaccgagtgagccttgtctggagccagaaagctctgtctggggccatggaaccctgtatggggtcttggagttctctggcatgactaggagttgggaaatggagggaaaagatagagagaggcagaaccctgattaccttggttaagattttggcctttactctaaaaaacatggaacactggggaaaatttggggctttgctttttaacaatttttaactgtggtaaaaaccacacataacataaaatatatcatcttgcccggcatggtggctcccagcactctgggaggctgaggcaggtgtatcatttgaggtaaggagttcaaggccagccttgctaacatgataaaaccccatctctactagaaatacaaacaaattagccgagtgtgatggcgtgtgcctgtagtcccagctactcaggaggctgaggcaggagcattgcgtaagcccaggaggcggaggttgcaatgaactgagattgattgtatcactgcattccagcctgggcgacagagcaagactctgtcttaaaaaaaaaaaaaagaaaaaaaaacttaatcatttcttagtgtacagttcagcaatgttaagtacatttacattgctgtgcaaccgatctccagaaccttttcatcttgcaaaactaaaattgtgcctattaagcaactcctcattccccactgcccctaggccccagtaaccaccattctattttctgttcctaggaatttgactacttagtatcttagtccattttctattgcttataagagaatgcctgaaactaggtaatttataaagaaaagaaatgtattttgtacagttacggaggctgaagagtccacggtccaggggctgcatctggagagggcctccttgttggcggggagtctgcagagtcccaaggccatacagggcatcccatggcaaggggaccgagcatgctagctcaggtctctcttccttccttccttttttttttttttttttttttttttttttgagacaaggcttcactctgttgcccagactgtagattggagtacagcggcgtgatcttggctcactgcaacctccgcctcccaggttcaaacgattctccttcctcagcctcccgaatagctgggattacaggcgcacgcaactacagcccgactaatttttgtatttttagtagagatgggtttcaccatattggccatgctggtcttgaactcctgacttcaaatgatccacccacctcgacctcccaaattgctgggattacaggcatgagccaccacgcgcgacctcaggtttctctttctttcttataaagccaccggtcccactcccccagtaacccattcacgcatcaacctattaatccataaatggatcaaccattcatgagggctctgttttcatgacctaatcacctggtaaatgccacccctcaatcctgccacactggggggtaagtttcaacatgcactttggaaggaacaaatatttcaaccatatcacctaggtacctcacgtaagtggaatcatccagcatttgtcttttcgtgacgggcttatttcacttagcataatgtcctcaaggcatatccatgttgtagcatgtgtcagaatttccctccttgtaaggctgaatgatatttcattataggtatatacacatttgtgtgcccatttatccgtagatgggttgggcaggacaccaagctgggcagggtggtgaccaatggagcagaatggcctcacctgccccaggaggacttaccctttacctctgtccctcacagcattgcagggacagactaggccccatgtgaaatatagattcagaagactgctgttctggtcaggcacagtggctcacacctgtaatcccagcactttactttgggaggctgacgtgggccaattgcttgagctcaggagttggagaccaggctgggcaacatatggagattctgtctctataaaaaataaaacattttagtcagtagccaggcatggtggtcctgcaatcaatcctagctactcgggaggctgaggcatgagaattgctcaaacgcgagaggcagaggttgcagtgagccaagatcgcaccactgcactccagcctgggtgagtgagaccccatctcaggaaaaaaaaaaaaaaatctgccatcccaaataacagtggacaggccgttgtctccctgtgcctgtctgaccccatttttcccaccccccgcctccctccagggcattaacctgtctgggggccagcggcagcgggtcagtctggctcgagctgtttacagtgatgccgatattttcttgctggatgacccactgtccgcggtggactctcatgtggccaagcacatctttgaccacgtcatcgggccagaaggcgtgctggcaggcaaggtgaggcctgccagaggctaagggggctaaggtgagatctgaggcccgaagagagagctggtgagaggctgaggggtttggatgagacttggaggtgtggggggcgcaagaagtgggcatgtgggttgggcatcaggagaaacctgtggggacaactcccccacctgcgaggttctgagcaggctgtggcgagcacagggtgagtcacccatgtgcctgtccaagctccctggcacatgggcacacttcacactcactctgtggctccgtgcctgtgccaggggtgtgctggagggtggtaggggtgagagcctgctgccttctccccagacgcgagtgctggtgacgcacggcattagcttcctgccccagacagacttcatcattgtgctagctgatggacaggtgtctgagatgggcccgtacccagccctgctgcagcgcaacggctcctttgccaactttctctgcaactatgcccccgatgaggaccaagggcacctggaggacagctggaccggtatctgccatcctgggccctctgattcccatgccttcccagcattccccctgtctggggtctctgagtgtgtctagactggcctagtgttgtgccaggcaggttctgggaaacttgggccatctgtgtgacagtcaccagaggtaaagtaaactggacatagtcgggtcccactgcctcctccatcctactctaccctaactgtgggaactcagatcctccgccccggtctcagagcctgttttctttctttctttctttctttctttctttctttctttctttctttctttctttctttctttctttctttctttctttctctctctctctctctctctctctctctctctctctctctctctctctctctctctctttctttctttctttctttctttctttctttctttcttttttttcttttgaggcagagtctggctctgtcgccgggctggagtgcagtggtacaatctcagctcactgcaacctctgcctcccaggttcaagtgattctcctgcctcaggctcccgagtagctgggactacaggcatgcgccaccacgcctggctaatttttgtatttttagtacagacatggtttcaccatgttggccaggatggtctcgatctcttgacctcgtgatctgcctgcctcggcctcccaaagtgctgggattacaggtgtgagccaccttgcccgatctcagagcctgttttccatctgttgaaagcataggagggcccaggcccagcttgtgtggcaaggctgcttcatggataaatagtttggcaagtatgcaagtgcttagcaaagccgcttatttatcaaccaaaatttattggacaatcactatatacaggcactgttccagacactaagctatagcagtgagcaaacaaaaaaattatagtcctcatggagcttgttgacgtctctgggctcacaacatgcccctggctccttgttgcccagacccagctccccagcccccaattctggattggctcacagaccttttcctgggctttcttgcctatggctatacatacagccaacgtgccttgagcatttaccaagtgctgtgcccctcgctcacacactggacacattttcttttaagcctacagtcatgcagattttttttttttttttttggggacagtttctcactctgttgcccaggctggagtgcaacggtgcgatcttggctcactgcaacctttgcctcctgggttcaagcgattctcctgcctcagcctcccgagtagccaggattataggtgcccgccaccacgcccggctaatttttgtatttttagtagagacggggtttcaccatgttggccaggctggtctcgatctcctgacctcgtgagctgcctgcctcagcctcccaaagtgctgggattacaggcgtgagccaccatgcccgaccaaggacgtgagttttaagctcagccagtctaactccagagcccaagttcctaacccttgtatttgagtccgtttctccataatttgtgaagagagtttttcttgttgcttaacccaagtctttcttgttgccctttcaatccccctcattttattttcatgcttgtccattgaacccctttcattagagtggggaatgggagataccaggggcttgcagggagaactagctgaaccctatctccttcctcccaccctactgcagcgttggaaggtgcagaggataaggaggcactgctgattgaagacacactcagcaaccacacggatctgacagacaatgatccagtcacctatgtggtccagaagcagtttatgaggtgagttcctgagagctcccagccctcccggaggctgtatcaggcctccccaggccctgccagatggggtgcaggtttctccctgacactcccagcctctgtcctggggggtgcttgaggccccctccctgggcctgaccagctgcctccacagacagctgagtgccctgtcctcagatggggagggacagggtcggcctgtaccccggaggcacctgggtccatcagagaaggtgcaggtgacagaggcgaaggcagatggggcactgacccaggaggagaaagcagccattggcactgtgagtcggtggggcaagaggggctggaggggatggacaggcaggccccagcagccccagggtttatggagtcccctgtccctgactgccatggctgctccctacaggtggagctcagtgtgttctgggattatgccaaggccgtggggctctgtaccacgctggccatctgtctcctgtatgtgggtcaaagtgcggctgccattggagccaatgtgtggctcagtgcctggacaaatgatgccatggcagacagtagacagaacaacacttccctgaggctgggcgtctatgctgctttaggaattctgcaaggtgagcttgtgggggtgtccagaaggggctccaatatcccttcttctctgggctgccaggccccccaaaccgtgcccttgcatccaagcctccctaacccactctggtcaacccgtgtctctgattctgcccctttgtgcccgctcactagtccaggtgagccagcgccctctgccttctccaacagggttcttggtgatgctggcagccatggccatggcagcgggtggcatccaggctgcccgtgtgttgcaccaggcactgctgcacaacaagatacgctcgccacagtccttctttgacaccacaccatcaggccgcatcctgaactgcttctccaaggacatctatgtcgttgatgaggttctggcccctgtcatcctcatgctgctcaattccttcttcaacgccatctccactcttgtggtcatcatggccagcacgccgctcttcactgtggtcatcctgcccctggctgtgctctacaccttagtgcaggtgtggggtgggcgtgattccagtgtgggcgtggtgttattggggcggggcaacacatgggcgggggcagcaggggtgggacacttcaggccaccaacattacagagttttgttaggggcagtcgttgcttaacatttatgttaggggagccattacttaacctctttgaaactcatttgcctcacctgtaaaatagaatgactcatagaccttcctcatggagttggtgagagaataaaatgaaatagttatacattgtagctggcactgggactttcctgttggctttttttttttggggggggggggacggaatctcgagtctcgctctgtcgctcaggctggagtgcagctgcacgatctcagctcactgtaacctccgcctcccaggttcaagcaattctgtttcagcctcccaggtagctgggattacaggcatgcgccaccacgcccagctaatttttgtagttttagtagagatggggtttcactatgttggccaggctgctcttgaactcctgacctcaagtgatccgcccacctcggcctcccaaagtgctgggattacaggtgggaaccaccatacccggccttcctgttggctgttttttgataaaacattgtcaacagtttgggacacattatcctttccttccttttatacatatctaaacatacgtgtatgcatgcgtttaacatagatgagttgataaccttcagatacagctaactgtaaaaggcctttgcagacactgaactcctgttctgtaatgaattagtcagttcccggggatagatgctcaacacctgggtatagcgaccatgatctaggctgtgctctgtgctgggctaggggagaatcagatagacatcctgtatagcctggatatctgaggccacagaggagaggatggaaactggaggcagagccgtgttgttgtggggttgaagcagagatgatcagagggagggagtgaatgacacatcaaggccccaagtcttgggtccttggaggtgggggaaggcagcgatgtctcgtggtgggagtgaggctggctgggaggactcatctgaaaatggatgagttcagagacaggcaggactgagttgggggttccatggccctgaccccaaactccttctccctccatcagcgcttctatgcagccacatcacggcaactgaagcggctggaatcagtcagccgctcacctatctactcccacttttcggagacagtgactggtgccagtgtcatccgggcctacaaccgcagccgggattttgagatcatcagtgatactaaggtggatgccaaccagagaagctgctacccctacatcatctccaaccggtcagaagccgcctccctcgctccctgctcctccaggaattcccagcaggctctctggtgttcagggtccttgtccctcctttcccctaagcagaaaactggccctgccctgcccctgccccatttcctcctcatctgatcccccataggtggctgagcatcggagtggagttcgtggggaactgcgtggtgctctttgctgcactatttgccgtcatcgggaggagcagcctgaacccggggctggtgggcctttctgtgtcctactccttgcaggtatgaagggcctggaccccagggcagggccaccactgggacagaaaccacacaggtgttccaggcatctcccgagtgcccctccctgctcagtatgggcaccagccacagggtctgttctcaaggactgtgagaaaaaaaaaaaaagaaaaaaatcattgagttgacaagtttataaccacacaccatggctggatgttcctactttccttccccaagaagcccatgttctcacattcagaaagaattctgttgaataatctctgtcctcaaaccccacatctctctcctgctcagccgtcgaccttgcctgacacctcacagttcaactggagagacccccatcagcaggagattgtgctgcaggctgagcaggtctttgtggctggagaaacaaaatgttttaaaagcccagaagagggactgggtgcagtggctcacacctaatcccagcactttgggaggcggaggtgggcggatcacctgaggccaggagctccagaacagcctggccaacatggtgaaaccctatctctacttaaatacaaaaattagccagccgtggtggcgggcatctgtaatcccagctactcaggaggctgaggcaggagaatagcttgaacctgggaggcagaggttgcagtgagccaagatcacgccactgcactccagcctgggtgacagagcgagactccatctcaagagagaaaaaaaaaaagtccagaggagttttcttgctttggggtgttgtagaaatgatcttggagcttagccccaaaggacaaacagaatttctcttgtctctgggcaagttgtaggctcatgtgacaggtcaggacagtgtagggctggcataccgctcgctcacgttcacatgcttgcagagaacgtacacagacgaggtgactgaagcctggtctgcaggtcaggcaggtcatcctgatgccagcttgtactgtcaaagagtcacctaactgcaaacggaatttttgtaaagcagatcacattgttaatacctcaggtggctcaaaccttgaacgcgttggcaaacaaaaaacaatccagaaaggtcaattttcacaaaggtcagtgtgcacatgaatctacttgttaaaatgtacattttgattcagtagacctaggatggggctcaggactctgcactttgatcaagactccttggtacgcaaagtgtggcccatgggccagttgcatcaccatcctctgggagcttgttagaaatgaagaatctcaggttccaagtcccacctcagactacagaatccggcgttgcattttaacaagattctctgggaagtcttatacatattaaagttggagaaacagaaaccaaggcgaggtggtccttggttaagtctgcactgtcactgcccaagggagtcattcgtgattacagccccagctggcatgcctgtgggcttgatccaggcccacctgggtcatccatgggctaggatcccatggatgggcacatgatccaggagtctgaactcctcccaaagccattacggtggggaggggagatcgccatacgtataacccagtccctttggccaggtgacatttgctctgaactggatgatacgaatgatgtcagatttggaatctaacatcgtggctgtggagagggtcaaggagtactccaagacagagacagaggtgggtactggcatgagcccgggacagggggaatctgaagtagctggggaagaaagcttggtggctctctctccctcaacatcagggcctgccacgtatggggctcttcattcatttacccattcactccttactgagcatcaaccaatgctctatgctaggaggtgtagagagatcagagttgagcaagacggtgtttgcccttaggtgattctgatttggtgggaggggtaagacctattgcagggctttgcagtggatgaccagatctctggcgtggtgcacctggagagggcagatgagggagatccttcagctggggtgaccaggggagacgagcttagatgagaaggatggacaggctttgatagactaagtaagatggtggggtgggcagtgggaaggtgagcattccagccaaagagaccagcctgggcaaaggagtggaggtggggcagcatgccctttgttggggaaaaggagttgttccctactgggggttccagacttttctccaccgccccctctcatggtcacaccttagccctcttcatgcccagaagctgcagcatcagtgtcaagcatcccatctttggcccacgctcctatcctgctcgctctcatgctccaagtcccccactgtcacagcagtctgccttcactgggactcccaatcccatgacccccctttgtgtctctgtccatcagcttctctgccttcacctccctccccggccagcctagagtctatgctccaccaacacaaacgctctcacctgccttgcccttctctttcttctctctcagttgtactcacctccaaaacccaccccagctgagcccaccaatctgccttcttcatgcctgcactgagcacttaaaaccttgcaggaggcggggcacagtgactcatgcctgtaatcccagcactttgggaggccaaggtgggtggatctcttgaggtcgggagttcaaaaccagcctggccaacatggtgaaaccccatctctactaaaaatacaaaaaaatagctgggcgtggtggtgcacacctgtattcccagctacttgggagtccaaggcaggagaatcgcttgaacccaggcggtggaggttgcagtgagccgagattgcgccactgcaccccagcctggataacagagtgagactctgtctaaaaaaaaaaaaagcttgcaggagaaaaatcactgagttgacaagtttataaccacacaccacggctgcatgttcctgctttgcttccccaagaagcccatgttctcacgttcagaaagaattctgttgaataatctctgtcctcaaaccccacatctccctcctgctcagccatcgaccttgcctgacacctccataaaaagtaggttctaagacgtgaactccctcaaccttcctgcctctcagtctttaaacccgcctgtgtctccttcaccgttgtctccttttcacttttagcaggaatcatccctttctgtttcaaagcccagcccctccatttcttctcatggccgcttgaggacctggcttcctcagtcccgccctccatctcctgtcattcttgctccctctgttggacgcttcccatccacatgcaaaaatattccatcacatcttccattccagacacacacgcaaaccctcccccctgcactccactgccccatttctctgctctcctctgtcatgaagcatggtttaaagtatggtctctacaagctgcatccgcttcctcatcagccttgatgtcatctgcctcctgcagtcctctttctggccctcgctccacggagacagctcaccagtgaccttcctggttccaaatccaggggacgcttttctgttctcgtctaattcaacctcttagcaacgtcccaataaaatgacctctcccttcttcttggagtcctcgtggattccgtggcctgcattgcacccgccagtccacctgcctgaccccagcctggcttccccaggcatcaccctctggcccctcacccctcactgtctgggagcttccagttcccctgcttcatgtctagcagcccagttcctgcatggatacccatgctcctgtctctgtatcctataaatgtctgccctcaaccccacggcccgttctctgacgcctccttgagagaccaatctgtgcctgctgctctgctttttcacctctggccgcgtggtttctcctgcctcgaagcagggctggctccacaggaatagtcacagcgtccccactcccggaagaactgcgcgtttagagtaatgctctgccgtcagtgccttgacattctccatcattcttcaacaagaagcctcaggttttcattttgcactgggcctcccaaattatgtagccaatcctatctcaaagccaccatcatcttatgccctgccagtctattctgcttgtagctgccaagagatttaaaaaaaaaaaaaaaaaaaatcaaatcacgtcattcctctgtgtacagccctctaatggctttgcatcttaatcagagttaaaaaaaaaaaaagtccttaaaatggcctgcaaggccctacatgatggagccaccattacctcagcctcttacctcttgcctttgccagtgtgctccagaacacacctagagccatttatgcctgctgttccctctgcctggcatgccctccctccagatatccacttggcttgttccctcacctccttcgggtctttactaaagtctgcctcctccaggaagccttccctgaccaccctgtataaagcagcaacactaagcacttcttggccccagcactcatcacttcttgcgttgtatagatttgcttatctgttgattatatgcctccctctactagaacataaatctcacgagggtgaggactgtttcaatggggtaccattgtgtccccactgcctggcactgggctgccacccagtaacaatgaatgggtaaaggtaatgagagggggagttagggcaggcagggagggcacttcaaggaatataaggtgtggcacagtggctcacacctgtattcccaggactttgggaatcctcctaggcaggaggatccctggaggctaggagttcgagaccagcctggtcaacacagcgagacacagtctcttcagagtttttctttaaaaaattagccaggtgtggtgacacaggcctgtagtcctagctaatcaggaggctgaggcaggaggatggcttgagcccaggaattcaaggttgcattgagctatgattgcaccactgcactccagcctgagtgacagaacaagaacttgtcacagaacaaaacaagttagccaggcatggtggcatgtgcctgttgtagtcctagctactagggaggctgagggaggagaatcgctggaacccaggagttcaaggctgcaatgagccatgattgagaccctgtctctcaaaaattaaaaaaaaaaaaaaaaaggaacatgggcaagcagggagactgggaggggaaggacaggggagtgttggagtaggtctgtggggaataaagtcagagggataaaggagtcattgaacacaaggctgagccacaggggtgccaaggaccctcccagggaccatagttggggaggattgaggggccttgggggagagagaccgaaaggtgaaagagggcttcactgggcagctgatgtgaccccatctgcccctcctgccaggcgccctgggtggtggaaggcagccgccctcccgaaggttggcccccacgtggggaggtggagttccggaattattctgtgcgctaccggccgggcctagacctggtgctgagagacctgagtctgcatgtgcacggtggcgagaaggtacgcgtggggtaggcgggcctgcgtgtgtgttcatgcctgcagacatggccacagcccttgtggggagcttgggtcttttgagagcacaagtgctccagccacatgtttgttcggcctccaggagagtcctggagatgcgcctttgacctctcagcttccccctcagagccccttcccttctccgcccaggtggggatcgtgggccgcactggggctggcaagtcttccatgaccctttgcctgttccgcatcctggaggcggcaaagggtgaaatccgcattgatggcctcaatgtggcagacatcggcctccatgacctgcgctctcagctgaccatcatcccgcaggtaggagcctggcatgggctggccacactcaccaacggccctggaggcaggccccaccttgttctgtagctttaggatggagactgggaccccagtctcagaggcttgggcaggtggggagggacagacagcaggaagcagagccatcagtgagccacccgtcatggatctggaaagctcagacttaccctgcccagtcaggccctgtcctttgacctcctgggccagcacatggggaaggacccctccaagaaccccttcccccgagacattctgccctggtctttttgcgcagctctaattacatttcactttttctgtctcctccggggtattttttgtttctgccgagtggacactttggagtcagattagtggctctggttcctgcttcaacagaggtcttcgtgattggcaaagctgaggtttatcactcccctacaggcaattttctatctctttggccattgtgtcctctggggagctggaaacagagtgggaatgctgccaccttaatccctctcttcttccctggacctggggcctatggctcctcatagggcctaagctgcctccctctgaggccacgttgtatccccaggaccccatcctgttctcggggaccctgcgcatgaacctggaccccttcggcagctactcagaggaggacatttggtgggctttggagctgtcccacctgcacacgtttgtgagctcccagccggcaggcctggacttccagtgctcagagggcggggagaatctcaggtaaacactgggagtgcagaggtcaggaactgcaaccctccctgggaaaccctggcgggtgctgggaaacctgacaccaatgacacagagatgaggccagcccggatgtgcacagggctgtcctttcgtattgagcatattccgtgtgccaggcatggtgtactgccccgccgactcctcacacaagccccagcggtggtccatgatcccacttcaccggtcagggaactgaggctcagagatggtaaagggcttgacctaagttgcacagctgggagaaggcaggtctgggatttgaaccagctctgggagattccaaaaccctttgaggaagccctctcccctccagagctttcttacagccccagattttatgtcctcagccactgggctatgcactggaggggccagtagtcacctcttactgagtctaaaggttggagatacctatacctgtgctagctgtgtgatttggggctagttgcttaacctctctgtgcctacttttctttcactctaaaaggcagataataacagtccaaacctctttgcattatgctgcccaataaaaaacaaagcaagtcatgcatatgaagctaatgtttttttcttatagccacactttttaaaaaggaaaaacaagcaaaataaactgtaatactataacttatttagcccaatatatctaaaatattatttcaacacatcattgatataagtattagaaatattttgcgtttcttcctacaagtttgaaatccagtgtatatttcacatttacagaatgtctcaatttggactagtcacatttcaagtgctaatagccacatggggccagtggctaccacctggacagagcagtgttagggtcagtgtgatgacaggaaaagcgcttcgcttggatgctcctgtaaaatgtcagcttttcccctcctcccttccctccatcttctcctcctcctcctcctcttccctattttcatttttatattcagtccatactcatgcaccctccccagacctcaaaaactaaaacaaggccaggcacagtggctcacgcctgtaatcccagcactttaggaggccaaggcaggtggatcacttgagggcaggagttcaagaccagcctggccaacatggtgaaaccctgtctctgctaaacacaaaaattagctaggcgtgatggcgggcgcctgtaatcccagctattcgagaagccaaggcaggagaatcgcttgaaccctggaggcggaggttgcagtgagccaagatctcaccactgcactctagcctgggtgaccgagcgagacttcgtctcaagaaaaaaaactttacatttgcccagcacttaacaatattcaaagcactctggcctccactttctcctttaatctttaccatggtcctgtgggccagaaacgagcctccacggtttgaaatgatttcctcgcagcagttcagctggtaaggggcagagcggggactctggctctgtcccaaacctttccttgctgtatcacagccacctccctcacctggacaacattccccaaggcccctcattatcccaagggtgggactcccttgccacccacgcagcccttaagactaaatatgcatcttaagtggctctcacttacataaccacgtgggggtggctggcggacaaacatggtctctccagaccctgtgccccatgactgtctcttgcttgatccattcttctcacctgcttgctctcaacacttcccccagagcatgccccaccccgacacatgccgtgatcagagacagaaatcagctcccctcctccctcactgagcttgtagccactttaagtataacctgtgtcctgtgccagttccaccataaatcagccctgagttctatccggcggcttattctgctgccaaaaccttcattagttgcgggaatgggccagggagagagcccggactttactccggctgtggtgactcacgcctttgggaagggctgaggtatttgtccttggatgtggggatgctgtggcctctggttgggaacacagcctcgttttgtctgctggctctggcttccagagcaggaggctgaaggcgtgtgtcctgctcctcctttacctcctcagtgaccagacacaaagagtccccgggtgttcctctgccctgccattttcttgtcccagaagcagagccctggcctgtattccctatggggtgggaggtgactgcctgaattgtgtgatattaggctcagcaagatggcatcgtgtggcctatttgcaaatatccaagaagagccatgcaagtatgttcttactaaggtgtaaatggctgatagagtgaagcagagaaacatcacggcactagctgaaaagcaaggatggggaagaaagcaccgagagaggaggccaagggtgccaagagcagaccagggatttcacaatgccttttagcactggctcattccccaaggcccctcattatcccaatggtgtccagacctctgctccgttctggagggctgggctgtggcagaaatgggagaagtcagacagaaaaccagtcctgggccactgaggagtgaaacaggtctgggaatgaggcccagaggcaggtgggaggcccccagctggaaatgcctgccttctccactcccagcgtgggccagaggcagctcgtgtgcctggcccgagccctgctccgcaagagccgcatcctggttttagacgaggccacagctgccatcgacctggagactgacaacctcatccaggctaccatccgcacccagtttgatacctgcactgtcctgaccatcgcacaccggcttaacactatcatggactacaccaggtgggacacggaaacctgagcaatggggaacctggtggggccacctggggcatcaggaatgggcagggcagattagggttatctgaacaaggcaatgttcctgggattgctagggcatggcaggcagagcagagtttcccaagatctggataaggggcagaccagagtggggtggcctgggctcaggggtggggtatacaatgacattttcatttttcttcttcttcttcttttttttttttgagacagagttttgctctgttgcctaggctggagtgcagtggctcactgcagcctcagcctctcgaagtactgggattacaggcgtgcaccaccacatccggctaatttttgtatttttagtagagacggtttcaccatgttggccaggctggtctcgaactcctgacctcaagtgatccacctgtctcggcctcccaaagtgctgggattacaggcgtgagccactgcgcccagcttcaacaatgacattttctaacacatggggaagggcacactgggctccacaggcactgtctttgtgcacaggccacttgcatcctgcctcctccatgaggcaatgtaaggggaactggaggcttcatgctgagtcccatcacttcctaagaaacctgctggcagagtgcctgcatgtccctcaccttattggtgtctcacagccactctggtcacagatgaagaagcaactcaagtggcagctggaccgtgacagcaccatgaggagctgagccttgtggggagagcactgtgtctggagtcccaggctgctgtgtgaccctgggcaatttgcaaaacctttctgagcctgtttcaaatgaaaatgatgcttcgtgggattgtcgtagtcaatgagggctgggcacagtggctcacacctgtaatctcagcactttgggaggccaaggagggcggatgacttgaggtgaggagttcaagaccagcctggccaacatggagaaaccctgtctctactaaaaacaaaacaaaacaaaacaaaaacaaaaatttgccggatgtggtggtgcatgcctgtaatctcagctactcgggaggctgacagagaattgcttgaactcaggaagcaaagattgcagtgagccaagattacgccaggacactccagtctgagtgacagagtgagacgttgtctcaaaaaaaaaaaaaaatggtggccaacgcggtggctcacacctgtaatcccaggactttgggaggccgaggcaggcagatcatttgaggtcagaagttagagaccagcctggccaacatggtgaaaccctgtctctactaaaaatacaaaaattagcctctcatgtggcaggcacctgtagtcccagctgctcaggaggctgaggcaggagaatcacttgaacccaggaggcagagtttgcgccactgcactctagcctgggtgcagagcgagactctgcctcaaaaaaaagaaaaaagtcaatgaaagatatttaaactgcaggtgatcctgggaaatgacagtgtcctccccagccccttgctctaattcttgcgctaggccctccaaggatgaggggaggggccatgccctcagaagcttgtggcttccttggagaggcagaccactccctcattgtgccagatgtcaaagtgtggtgctggaggtcgaggagagagggctgggtgactcagaagcctcacgggagtgaactggccctggcctggcaggctgtgctccctagaaactagaggggaggaggaggcaggaggctcagacaagtcttctttgaaggagtatagtgggaataccccaacaggccttcactcactcaagaaacacttgcaggacgatggagtgggaagggtgccatggacagggcaatgggtcagaccttgctctcttggaagtgcccccatgcagccagcagtgtcttgggagccaagctgagaatgcctgatgctaccctctgtctgttccatccctctcctaccctcaccccccactcccatttaggaccccactgggagaagggagggtgggcaggaagtgctgagccctgggtttggaggagggacagggctgggctgagaggacctgttcccaggcctaaccaaaactgtttcattcaccagcagccctagggtgaggggcttggatggaccttggaggttgggagttcattcattctagtggaacaggcagaaattaatcaaataatcatgtgtaaatagggcccataggaaggacgcaaaggcctgtgtgtgcaggccagaaaaaggctatccacacagggtggccaggacactttctcctgtaaggaagggatgcaccagccaggcctgaaagaatgagtaagagttggaggatggaggtggggcaataaggtagggagcgagctgaaaattgcaggcaaaggatataacacatgccccaaggcaggagggtacaggaggctggagtgcgtgggagggaggcagtagaaccaagatgggggtggagaacaggccgcactctgctgcactttgaggaccatgggagagcattcagtccttacccaagagcaatcaaaagccgctgaagaccttgattttggagtcagggttgggatcggcgggaggggagggggggcggtggccaggcagtgatgtcacagacacagtccttcccaggacacatctgggagcccagtaggctgagaaccagaatgcagtcagccccctcccatggaggagcacttctccaggctggggagagccccttcccctcctgccgtaccctggtggagccagcccactggccttgtaccaggtgcactcggtgagtggttggtgggagattctaaccctgggctcaggcctagctgtttgtgtgtgagctggagacccaccgagcagcagcagcagcagcagcagccgcagcagccgccaccagatttgcagcccaagccccagattccagtgtcagcctcgctgcagctggtttcctgccgtgtgcttttgtgagccgacacaaagcagatggatgtgcacagagcccagcgcacaggcccatggctccctgcgcacagcctgctgaagtcctgtgaccccggcaaggggaagggctcattagggaaggttttcagagccctgactagcagagatgaataggaccttgtgtttgatcccagaaactgcttcacttgccagaactaacagaatggctaaaataaccagccttgcaagtgtgcacatgtggtgcggtggctgtgttgggtgggttggcatgtcactgtgggcctgagcaagtacccagaagagcaggattagacgatgtgaccaggtcagggctgatggaaacctgaccacttctctcttttttgactagggtcctggtcctggacaaaggagtagtagctgaatttgattctccagccaacctcattgcagctagaggcatcttctacgggatggccagagatgctggacttgcctaaaatatattcctgagatttcctcctggcctttcctggttttcatcaggaaggaaatgacaccaaatatgtccgcagaatggacttgatagcaaacactgggggcaccttaagattttgcacctgtaaagtgccttacagggtaactgtgctgaatgctttagatgaggaaatgatccccaagtggtgaatgacacgcctaaggtcacagctagtttgagccagttagactagtccccggtctcccgattcccaactgagtgttatttgcacactgcactgttttcaaataacgattttatgaaatgacctctgtcctccctctgatttttcatattttctaaagtttcgtttctgttttttaataaaaagctttttcctcctggaacagaagacagctgctgggtcaggccacccctaggaactcagtcctgtactctggggtgctgcctgaatccattaaaaatgggagtactgatgaaataaaactacatggtcaacagtatatacacagtagtctttttgcacttgttcacaaggtttggggattaggatctttggaggaggccaagaggaagactttctacacatgtacatggttgtagttacctgaacttcagacccaagagctcttggctgcaaatattgccttcacagccaaaattccctgggtaattgccagtagctcctgctctgctgtgcagatattgtaaaacggtgagaaaggccctgaaatctgacctggggcctcttgggaaagctgctgtgaacacctccacgttaatgtcatccctcagccctctatgcctgtttctctagggactgagaagtgcatgatgcttttacttccttgctcatttcgaagtctgttccagacagttcctataaccagtgaggcctccaagtcattcattttcctcagtctagccaaagctgaatgtgtgagcacaaagaagccgagaggccacctcctgcccagagagaagccacccacactcccaggttggcagacaagatgtgaggggtgaattaaatttgttttcttgagcaagccaa

SEQ ID NO: 1119 - DNA, 98006 bp, Homo sapiens
cttgcgcggtgtggcggccgatgccgctataaaggcttgttttgctgcagggctcatgctcgggagcgtggttgagcggctggcgcggttgtcctggagcaggggcgcaggtaggtgatggctgctgccgcacccctgccctccagctcggttgtcacggggatcacccctttgcatttcctcggggcgtggcgggatgtggccagggctgcgagcagttcgggggacactggagacttggggaacggcgtatggcctccccctggtctcctgccgccgcctcctaggcctgtgagcccggggtctggtgacggggtcgtgtgctggaagacaggcaggtaggatcgggatgagcgggcagggacgcgggctacgtccctggccgcggccgccagggggcgctgcgcccgcgggccgtgggtgtgggtcgcgctcgcctgggcaggccggagcgggctgtgggaacgccctagggcccgggcatcccaggcgaagcgggtctgagagaaacgcccacctgggaggctgtgcagcgggtggctcggggcaccctgctcaacccgcagcggagccgccagcgaccttcgaagtaagtcatccccttcgtttttgcaagcgggtaaatggaggtacgtgacataagcacgcgcagcaaagccgtggctgtgccgggaacgcagcccagatctctccacggtcatccagtgctcttttcgcttctgccacacagagccgcgggtggctttgtgtttatcacacaggggccatttggtttctgcacagacggagaggctggaggcaggtgggcacaggaacgacggggaaagtttcaggaggtcttggaggaggagatggctaggttttactgtggtccgcagcgtgtatgaaaggtgaggctgcttggagacgcaacaagtggattacagtgggtgtggtaaatacgtatccctttagcgtggtgtcttcctcgtgcagcttgagggcctggaggtgatggaaacctactcatgagtgttgggatgactgcagcttgcacacaccagtctggtaatcccgtgcaactctcctcctgccatgcagttgaatcagtatcattgtgcagggagagtgtctacacttttatcagtggaaagagaatcttggtaaaaaagggcagctgactaagtggcctcaaccctattgggcacttctttggggttctcccacgttgattattctgcttctacccttgtacatgtctggacaacaggtttgttttttacaaacaaaaatcccttctctttcttcctctcttgatagctgaggcaagtgagcatttaaaaaagatattccaacaactttaaaggaggacacgagaagatagggaaatataaatagtatcagtaaaatggctggcctggggatccatccttgcttgcttgcttgcttcagactggggctttgtttctttccaaacctgtcaggattcccagctcttcgccggcctccacgtggggtgccctcttttatgttccagatacacagacgatggtgtccttatgttcaaggccacagacagtaactttgtgcctactttgggcctgcctgctctcctgattgtgcctctttttccaggaaagtagagatgagtgtgttagagataatggaacactgttccccacacccttcatacatagaataacttagtcccttaggatagtttagcagtgtctaccacagcagtcactgtaggcacaaaacagtcattatttgtgtcataacagggaagtcgttttgtccctgcctctctctgctcctgtgctccactgattctacttcatcctttgaaataaaagtggttgaaagaatctttggttatcatgggtgcttagataattaagattatgttcgtgttcttcttgatgtggcatttcatattgtggatgagttccagtgacctcctctgtttcaaactgctcaccgccccaacccccaccttttaaaaaggtagtactaatcttttcctcttccagataatcagctaagctagggaacccttgaaggggaaggttagaatttcgtgattcccgtaagaaggttactctgatctacagctacagctcaacactggggacactggcagatgccaggtctgtttatagtttagccttaatgaggtctcaatgacgtgattgctgcactctggcttggtgagccgctgttctttatggtgtagtttgtcattggacaaggtgactttttttttttttttaaagataagtaacagctatatcaacttagggtacttgaaccagaattctgaaaggcaagaaatcaagctttctttggactggaaacctgtctttgcataggagatttagtcctttttattcagaggattagtaagtgttctctttttatctgacactttaaaaattgcattataatggttagaattttgtgctgcagaagtagtagttttaagtcacagcgatagccagggatttatggaatccagaaggcgacacggctacacgtctttaatttccgttggaggctagtatgaaaggtgttttctcagcttgtctctgggaggctgtgacccttcttagaggggggaaacattttggagaagtatgtatgtgttttttgtttttaagtgacctgagttgatacagcatattgattagacttagccaggcaagcagtggtttagaatagagtttcaggtaaaaactaggtaagacttagtaatacagggtggagaatttgtttttgttattgttttttactaacagctttgttgccataggatttatatgacatgaaattcactcttttaaagtataaattcagtgtgttttttttcaatgtattcactgcattgtgcaaccattaccactatctagttttagaacattttcagtacccagggaatttgtgtttgaagttaagttataacattgttttaactggataacttcatggagctttaaaataacaccagctaacccattagttaattataaaaaggcagagatggaatatatcattggtagaataagtgtttggtaagtttttatttagtaaaatttagtagaagaaatgatgtccactttaaaattgtggagtttttaatacttgggacaaactgaaattgtttctagaaagtctttaaaaaaaaaaccaacctttctattgtatacactggatttgagcttagttgaagagaatgggtgtctctttactagtgtgtttactgtttctaattttttttcccttagagttgggagaaggtaatttttcttgattctcttatactgaatctttttctttaaaaaaatgaaatcaaaatctttgaactttttttgaaaattaatttttgtagctataacagtagaaagctttagtacttttgccttttttttttttttcctatttttaaggcacttgagcttatggttaagtactgtttaggaaataatctatttcttgatgaatttttaatttcaggaattctgatgtgaaactaacagtctgtgagccctggaacctccactcagagaagatgaaggatatcgacataggaaaagagtatatcatccccagtcctgggtatagaagtgtgagggagagaaccagcacttctgggacgcacagagaccgtgaagattccaagttcaggagaactcgaccggtcagtttcctttcctaagagtctcttacctgcttgttgtactaaaacacatcttttttcgtataatgggtaatttagaaacttattttttggccgggcgcggtggctcacgcctataaacccagcactttgggaggctgaggcgggtggatcatctgaggtcaggagttcgagaccagcctgaccaacatggtgaaaacctgtctctactaaaagtacaaaaattagccaggcgtggtggcgggcgcctataatcccagatacttgcgaggctgaggcacgagaatcgcttgaacccaagaggcggaggttgcagtgagctgggatcatgccactgcactccagcctgggcgatagagcgagactcagtctcaaaaaaaaatgtgtttttctttattggctttaggttactgttaagaatttatggttattgataagtctctggtccatagtaagcactcaataagtggaagagaggctggctgtcaccctctcacccggtctgttctgagcattctcctctttttcacttttattctatgttggtgccttctgaaaaggctatacttaacagaagacaacttattgagggggagggggtcatggggtcaatgacagggaatataaagccaattaagcttcattcatgtacctaaacaaaattggtgttttcttctactttctgtcatgtgtgtttaaaatgtgaacctggccaggcacagtggctcatgcttgtaatcccagcactttgggaggttgaggtgggtgggtcacttgaggtcaggagtttgagaccagcctggccaacacggtgaaaccctgtctctgctaaaaatacaaaaattagtgaggtgtggtggtgggcacctgtactcccagctactcaggagggaggcaggagaattgcttgaatccaggaggcagaggttgcagtgagccaagatcacgccactgcactccagcctgggcaacagagtgagactccgtctccaaaaaaataaaaaataaaataaaatgtgaatcctttggagagactcagatttcagaacaattctagatagttgtgggattatcagtatgtttttcaagcgaattcataagttaagcagtctttagataataatctaatttcctccaagggaaataatgaagatgcgtttttacctcgagaaaatattctttttcctgaggaaaaaaagcattataccttttcttacaaaagtacctaataaggcagaatggactaggtttaggaagttgaggtttttgttggtgtatttgttatgtgaaaatttgagaaagataatggactttgcagctgacactggcctttccttagcctgatactacctttccctctttggttgtgttaaagccattgctttattaatgaacattttcttgctaatgagtcttttctgtaccctactgtgtattatagaatgcttttccattcaggtttaacttcagagaaacaggcttaatgtaatcagtgtcaaatgcttctcgtggtgccagttttataacttcctcatgtccttttgtctagaccttatgttgattaaacatctatccattacatctgagtgctagacacatttagtgtaacagttaagtctggaaaaagtcagaaggtaacattggggcagggccttaaagggtgattaggtggggaggctttttaggcggtacaagtacagacccaaaggtatggaaagagcgtgtgacatattgggactttggataagctacttacgtcatttgtatataaaatggggttgacagtagtacctgactcatgggatcactgaggagtaaatgagataatacatataaaatatttaaaatggtacctggcacatggccagtgctcaataaatgttagctcttagaactagttgttcagggcataggatgtgtaaagagattataggtcgggtgaaattctgcatgccatgctaagaaatatttcactgtgggcattagggaactattggaagttaatgagattaaaaaaaaaaacctttttattttgagctaactgtagatttacatgcaattataaaaaataatatagagatcctatatattcttcatccagtttcccccagtggtaacatcttgcataactatagtccagtatcacaacaggataatgattgacattgatacaatccattgactttaggatttcaccagttttatatgcactcatttgtgtgtgtgtgtgtgtgtgtgtgtgtgtgtgttgtgttctatgcattttttaaaggtgtaaatttgtgtgaccgcttccacagtcaggatgcaaaggttccatcacaaggatctctcgttacccttttatagccacagtcatgtcccctcaaccccagtctctggcaactgctaatcttttctccatttctgtaattttgtcattttaagaatgctatatacattgaatcatatagtatataacctttcgagattgcttttttcactcagctgaactcccttgatagccatctaattttgttgtgtgcatcaatagttctttcctttgtattgctgagtagcattccgtgttatagatgtaccatagcttctttaaccattcatttgttaaaggacatatgggtcatttccagttaatggcaattatacataaaggtgctctgaaccttcagttacaggattttgtgtgaacataagcttttatttctctggattaatgcccaggactgcgcttgctgggtcatatggtaagtgcatatttagtttgtaagaaactgcagtactctttcccagagtgtctgtgccattttacattcccaccagcaatgatccagtttttccacattgttgccagtactcaatgttataatgtttattttagccattcctatagatgtgcctggtatctgattgtggttttaatttgcagttccctaatggctacgatgtttgagagtagatttttatcttagattagtcttgaagcaatgcagaaaaaaacctgtacaggagaaagagaccaaatataaagagcattcaggaagcggctctgcctatccatgtcagagaggccagggttctgttgtaaagcacagaagtgaggatggaggaaaggcgtttctagaagatagggaggcattggggtgtctgggattgatggtaaggatttaaacctattcgtggacataagaaaaggagattggggagatattaagaatgagtttgggccgggcacggtggctcacgcccgtaatcctagcactttgggaggccgaggctggtggattgcctgagctcaggagtttgagaccagcctgggcaacacagtgaaaccccatctacttgggaggttgaggcaggagaatcgcttgaacctgagaggcggaagttgcagtgaaccaagatcgcgccattgcactccagcctgggcaacagagtgagactccatctccaaaaaaaaaaaaaaaagaagaagaatgattttgattttgaagatgttgaatttgaagtgcatatgggtaaaattatcagtaggtagagcatagacaagaagtagtgtaggaaaaaacatttagagcctttagtgtgtccacataggtgaagctgtgagagtgagcaggcttacccaaggatggcttgcagagcaggagaaggtggaggctgtggagctggtgtgtggtcctgtgaaatttctggggatagggtccccagcttgtgagagtagagttgacatcagggtttgcagtggcagcagcgagcttttcctctacgaagtggagaagaacagcaggtaggcaccgctgggctttgagtaccctaaaggatatggagtcagccaccactgtagcaggttttcaacatgccactgaagccttatctcagagaaatatgaaggctaataccacttttataaaatttcaggaatccacatgaattttatgaattttatttttattattctttcatgtttcctaaactttttttttttttttttttttttgagacgaagtctccttctgtcacccaggctggagtgcagtggtgcaatctcagctcactgcaacctccacctcccgggctcaagcaattctcctgcctcagcctcctaaacagcaggtgcctacctgctgttctctgttaccacattggccaggctggtcttgaactcctgagctcaagtgatccgcctgccttggcctcccaaagtactgggattacaggcgtcagccaccacatctggccatgaacttttattttttattaaattttttttgtttgtttttttgtagaggcactctcactgttggccaggctgttgttgaactcccagcttcaagcaagcctcccgcctcagcctcccaaagtgctgggattacaggcatgtggcaccacaccctgcccctaaactttgaaatttgagtactgttttcctgatttttactgtatccttgtaatctctgaacttttttaaaagatttcttttattctactctctttctgttacttagtctagacctagcaaaacaacaacaataagcccataggtttattcaagctatttttgtatatacattaaaatgaatgcatcgctactaagtatttttgtaagttcagacaccatctagaatctgcttgaccgttacctgtcaaaaaacaaaatttctcagatgtatttatctttaacttgtcttcatgttacaagtttgctgacagaagcaaccagcaagatgacaagaaattttgtggtctgagaaaattgtataaatggtataaaatggataatgtaagtagttgggaagcagaattcctgtataagcatatagtttttctttttttaaagtaagcagttaattgggcagagattgcaatttcatgtcacatcatcattaccatcatttttatatttgttagagaggaaatctgggacaggatctcccaggatgccaggtatgcctactatctgtcaaaaatttaaaacaaacaacaaaaaagcctctaagtaacaaaagataaggatacatctatggctcttatgtggaaagcaaggtttcattcagcactattagcctttaacacgtggaattaaccgagaagcaggagacctgtgctgctggtgcctcacgcctgtagtcccagcactgtgggaggccgagggaggaggctcgcttgagcctgggagtgcaagaccaacctgggcatcatggtgagacctgtctctacaaaaaaataaaaataaaaataaattagctgggcacaggggtttgtgcctgtagtcccagctacttgggaggctgaggtgggaggatcacttgagcccaggaggtccaggctacagtaagctgtgattgtgccactgcactccaccctgcgtgacagagcgagaccctgtctcaccaaaaaaaaataaagaaagaaagaaaagaaatggtgtcaaacagaagtcagaagcaaagcaccaaagaataagttctgactttgagcaggccagtgcttttcttcttcaaggtgtaagtgaagatgcagattacatggtttgcccatttctcagtattgtgaccaaatcattcttttggaatatgacttggaaaaattgctctattagtcacatcttcaaatatttataatttctcacgtatgcttagaaataattagggttgaaataaagcattcgcacatctacccactttcttcgggactgtaatgttaatgcttgtggccacacacaatttgaggcttagcaggcatcctttaatcctgaagtgttaataaagtggtggtttctgttgctgttagttctttgagcctgagtactaactttggctggcattaggctggcgttacttcagctaacatgaagttttatacctaggctgctcctaaacactgttcctttgcctgaggcatgattattcaggcatggttcctttttttaatcctatttatatatgcacatgtagatcatatgactccacgagccctgatttttttttaagatgcagtcagtgtttattcatttttttaaatttagcaaatatttgaacactcttcaagatgcatgcacagcactgaaccgagtggtctggtgcagataaagataaattggtgctgggcctgcttgtccaccaatagaagcttaaactcacaacacgtactctacatagatgactgtaatttagatgctgtgggaattagtaaaaggagaaagtgcttctctctcagggaactctttaggaggaggtatcatttggctggaaacttgaggaatggatagaatttggagaaatgaagaacttgccaggcaaaagaaagagttgtgggatagggatacctagtccttgttggtattgagcatcaaatgtgtgaagtcttagctatagtgcaatacctcagtgaatttcacattatgtgtggggtttttttgttttttgttttttgtttttgaggtagagtctcactctgtagcccaggctagagggcagtggtgcgatcttggctcactgcaacctccgcctcccaagttcaagcgattctcctctctcagtctcccaagtagctgggattacaggcacatgcaaccacacccagctaattgtttgtatttttagtagagatggggtttcaccatgttagccaggctggtcttgaactcctgacctcaggtgatccctccgcctcagcctctcaaagtgctgggattacaggtgtgagccactgcgcctgggcatgtgtgttcttgaataataagccaaggagtttggattttaattgctttaaattaatatttaagcaaaagcaagacaaagcttgtcagatgcttttatgagctttattttattgtggtggtggtttgttttcttagtgctctcaggcaaaggtaagggtgccttgtttttcattagcatgtctaatctgggaaagaaggaagaatggaaaaataagcagaagtgggccgggcgtggtggctcacgcctgtaatctcagcactttgggaggccgaggcgggcagatcacaaggtcaggagattgagaccatcctggctaacatggtgaaaccctgcctctactaaaaatacaaaaaattagctgggcatggtggcatgcacctgtagtcccagctactcgggagactgaggcaggagaatcgcttgaacccgggagccagagtttgcagtgagccgagatcgcaccactgcactccagcctggggaacagcaagactctgtctcaaaaaaaaaaaaaaaaaaaaaaaagcagaagtaaactaaagttcatgtaccattattactggcacatgaactttagttattttttccccttctctcaaaagtgtgtcattggtgggattttcttcctaccaaattagaatatcctgtgtctaggaaaggtaacaaagcaagtattcataaaatccagggctcttacttagtatttccttagttctgtggtaggctgaccctttaatcttggttggagttttcataattaatgctttgaaatattttggtgagctcaagttgtatcttagggatcaaagatgtgggtctaatctcttaccagaaatgattcgaagatgtattgttaggaaagaaatatgggctcattatagaaaatgtacaaagtgtgtaaagttgtagaaaaaaagtaaccacccttaattcctctacccagagacagccattgttttcataaaatagttttgtctagtacattgtacttttagagtttgctcctgaaagcttttctttacagactaaggacgtgtgaatttgtctatgcccttgtgttttccaagtcaagagtattacctgtgagtcggcttgctgttaggaaggagagcaggaggaaggagattagcattttgcagctctgcattatttttctcttgattgatactcggtgactcagcagattttctggacagggttaagataagtaagaatacctgcctttttttttttttttttttcttctctccctgtaggcatccataaagctttatgaggcacagtagtctcttaggcgctgctgggtgtgacaccgtatctggtctggtgccaggtgttggtctccaatagcagcccagagatctccggctgaggtaacaacagtgtgcgattggtgtggagcccaggtggctctcatgcttggtaactgcattgacagctcgctggggctcttgaggttgggctgctgccgggatcatcagctctcttatgccgtttgctgcaagactgccgcggctttcctaggaagtgctgcttaagggaaataaatatagcctgttggcatgagttaaaggaactttctgtcaaaggggaagaaaagtgttggaattagcttcctgttttttttttttttaagtacctaaatctttatttggttaagataacttggaagttacaaatggttaatgaaaactttttcaatgaaatattgtttccacagttaggtgggtttccgttaatgctttcttttttttagttattattatactttaagttctagggtacatgtacacaacgtgcaggtttgttacatatgtatacgtgtgccatggtggtgggctgcacccattaactcgtcatttacattaggtatatctcctaatgctatccctcccccctccctgttcatgctttttttaatgtcttaccgtttttccctctcttttagtcaaaaataaaaaggtcaacgcaaagaaacagggactccagaaggctttgcaatggttaaacctgtcattattaaactcacagactaatgtgaagttaatttggtgcactgaagtccactaatgagcagaattaaatttatccttttcctccctgccccccttttaaggagttagcctatttagataattagatgttatatatgttttaactatttaagattattttatgaattagctgttcaaagaatcaattgttactagatatcagatgagaacttccacttaccaaagcctgctcatggaggtagaaagcaagactgacatgtgtactttaaaagatggatggaacctcaaaggccgtcttgcccagtccccatttagcctcacctctctgtaggtgaggcccaggagagacacttactaggcagactatgctggggctgggtgagcttcccaaggatgttctttctggaattcggtggctcagaatacagcacttggctcctctttgaagcatgatggctctgttgcctgtctctggcccagtgtgctgggctgctgaaaagagcatggaaccacccaggagacgccacgacactgacagctgtacctgacctgagggttcaggatatgttttcaaaagcaaatctcgctaaaaaggatttgtatgttattatgaaatctatatttatgtggtggaaatagacacactcaggcttttagagataaactacacagaatgggttacaataaatgcttataattgtttggcttttttaagaatcctgttaacttgacaaccttctgtttacttttctttggtattatgcaggtatgatattgagcagtcacttagttttcttaaatgttgtgtctcacagtagaaaaatagccaaaccactcagcccctgacctttgtgtttgcttctcacggtgatcagcagttctggtctgctctgcagtatggtggtcacatgatggaacccagaaagccttgtactaagcatttaacacacattgtgttaggcactggaggaagtttcatttacaaattatattttggcctttttttttttttttttttttgagacggagtctctgtcacccaggctggagtgcagtggcatggtcttggctcactgcaacctctgccttctaggttcaagcaattctcctgccctcagtctcccaagtacctgggattacaggtgtgcaccaccatgcctggctaatttttgcatttttagtagagacaggatttcaccatgttggccaggctggtctcgagtcctgacctcaagtgatccacctgcctgggcctcccaaagtgctgggattataggtgtgagccactgtacctggcctttttttttttttttagctaaagcctgaaaatcttgttgaagggattttgtcaaatgcaaaagaccaatattcacaactctctaaatcagtggttttcaggccaggctgaatgttaaaatcacttgaagaatgttcaacaaataccagtgttggggtcctattccagaccaattaaatcagtctctgggatagaacccagacattggtattgttttaaaactcctctggtgattctagtaggtaggcagtgctgggaatctctagatctcatggaataaagtctgttctctcccctcactcaatggctccaagtgtttcctgtaaatcccgttttacccctgtgattcattttcagtttaatcctttgaaaccttaccatgctattaacaaagttaatcttagacccaacataacaggaactttgaataagttccttggaatttagcttatgaaacaactgaaagccctcaaattcctggtgattatggagtaatgctagattatcaactgcagacaaatacctgttttactgtggtggtggagatatgtttgtgaattgtattgctagctgatcatcggcttgagagtaacatagcacagctacagataagtgagctgatgctcaagttaattcttttctcagtgtagtatagctgttgagtgataggactgagtttagcagcttccctgacttggaataatagctctttcttttgtattctgcttcttccccatataggttgggttctagaattttgctgatcctcttgactgaaatggctactatttggaagttcttaagggaagagcttaagatggtcagggttgtgataacaacccactggggagtaaggatgtggtgggaattgcagaggaaacgtgcttggtaggtttctttaacttgttggagattaggaagggcgggaaggcctgaagtcagccggtcttgggaggacatcagtttttgatctttttaaatttaaaagtgaattttaattcacttttaaatttaatttctaatattctgagtcccttaagaagtatatctagtggcacaacagttccccttaaaagtttgtctttctagatgtttgtcataaaggctgcgtgggcctgggacatctgtagaaatggttttcttggccagaaggatgtatttgaagaggcgcccattgtcttgtttgtcttaaggtcttgtgaatgaggagaggagaggaagacagtgttgtgagatctgaggcctgttgattccgattgtgccccagataccgctttatttgaggggtgtgccagacaggagcaggcagcctttaacccccttggaaaccgaggtacctctctgttgccagttgacacctgcagtctctgccttcaggaacaacttggttgaatcctcagcccgaggcttattaggcaggctaccctgctgttgtccggcctccaggaagggattggattgttcagacggggaacgatttctggcccctggtatctgtcccagaggcctccgtgcaggggaaaagcccttggttgccctgtcagcaggcatttgctctggcagcctgttaaaatgagatgggacagctggagaagtggtggccatggggtgtgataggtgcgctgattatctgaggcctgaggatggcgttagcgcccgcagaagcgtcttttgcaagagcagatctgtctgcttatgaatcgaatgttacctgtttttcataccagaggtgtctatgaatgtgtgtttccctgatctttgtttgaaccttgacagaatctgaattgctttttgttattgttgtttttgtttttctcttttttttttttttgagacggagtctggctctgttgcccaggctggcgtgcagtggtgcgatcttggctcactgcaccctctgcctccttggttcaagcaattctcctgcctcagcctcctgagtagctgggatgacaggcatgcatcaccatacccggcttatttttgtatttttagtagagaccgggatttcaccatgttggccaggctggtctcgaactcccaaccttaggtgatcctcccaccttggcctcccaaaatgctgggattacaagcataagccaccccacccggcagaatctgaacttcattgtccctctttagcttccctgtgaccttactcctgccccattgccattaccttggtaggaaaaatgctgagtatcctagtcacatagtcatggggaagatataaatggcagtcatacttcctcgtttgatatttttctcagctcctggatctgccagtatttttccctttaagacaaagcagctgctgtgggtgcctttctgtgtggctgggtcgtctggccactgacagcctttcagtgtgctgtgctccttaagagaaatgggtcccctcatcttgtttcaggggaaactttaaaaagttacttgtaaaagggattgaaagcatcataacaaaaaacaaatggcctcataaaatacattcctctaggtcagcctatatcagtactaactgtgttagctcttcagctatctagggttaccttagtacgattgacattttgggccacataattctttgttgtgggggctatcctgtgcattgtaggatgttcagcagcatccctggactttacctgctagagctagtagcacccctcaaacatttccagatattgccacatgtcctctgggcaagcaaaacaccctcacttgtgaactcctgggctgcaccgtgcgacacagtactattgtggctattaagcatttgacctgtggccagtctgaactgagatgtgctgtaagcataaaatacctgatttcagagacttagtacgaaaaaagaaatacctcgtttgtaaaatacctaataatttttcacattgattatatgttaaaaaagataatactttgcattgggttaaatgaaatatattatttaaattaatttaccttttactttttatttttagagtcagagtctcactctgtcacccagactgtagtgcggtggcatgaccatggctcactgcagcgtcaaacacctgggctcctgtgatcctcctgcctcagcctcctgagtagctaggactacaatctcgtgccaccatgcctggctaacttttaaattttttatagtgatggggttttggagggttacacagactagtctcaaactcctggcctgaggccatcctcccacctcagcctcccaaagtgttgtgatgacaggcataagccactgtacactgcctactttttactttttaaatgtggctactagaaaaatttaaattacattatgtggcttacatttgcagcttgcattatatttctattggacagtgctgaactagagtgttgatctactgtaggttagccattgattttgtattaggcatttagatccctgtaagctgttgggtttaatgattttttcctttggaagattttcctttatgcagtaaaattatggagacacagagtatgtagtattacatattaccagtttgctctcctgaatccctgctggtagcatattaaaaatcagtttaatgttcagaccgtgtatgtttgtctatatttctctcctttccatattgcattttcttttccatattagattttatctcttttaaggcttatgtggttgtatcttaaatttaatttgtatttctcgattggtgacattgggtctgtgtgttctctcctgtatctagaacagtgcctggcacatagtaggccctcagtaaggactagttgaatgaatggatgaaaaaatactgtattttactttttcagtacaagtccactactcgaaatatattattatgttagctacttggttacttcttatttttatttatttatttatttatttagagacagggtctcactctgtcacccaggctggagtgcagtggcatgatcttggctcacttcagcccgatggtcctggctcaagcgatcctcccacctcagcttcctgagtagctggggctaacggtgtcccttttttgtatttttttgtacaggcggggtttcatcatgttgcccaggctggtctcaagctcctaggctcaagcgatctgcccgcttgagcctcccagagtgctgggattgtaggtgtgagccgccgcgcccagccacttggtcacttctttagctttatcttcccttctcttaatgctaatttccttacgcaaaaaagtttccttttcatgtttgaacctctcttccctttgatacatttctgcttgttgggtgtaaatggaggctgtcccccatcatagctggactaagtatgctatataatttatgtcatcatttttaatgtaatttttgggaggttaattccagatggattaatgtatgatatgaaacctggatatcaattaattcatctccaatctggttagttggtaggaaggtaggtagtaggtaggatgtgagtgactgtctctgtcacccaggctggggtgcagaggtgcaatcatggctcactgtaccctcgacttaccaggatcaagcgatcctcctgccttagcctctcaggtagctggaccacaggtgtgcaccaccatgcccggctagttttaaaaaatgctgtatatagatgggttctcactttgttgcccaggctggtcttgaactcctgggctcaagcgatcctcccactttggcctcccagtgctgagattacaggtgtgagccagtgcacctggcccaatctggtatttatttgtcccaacaatattcactgactcatgattccctaccttgttatattatttatgcttttgtatagtaagcccttatagcttgaatatattaagtcttttctcttggttcattgccatttttaatccattcaaccttagaatgttgataactcactttatggaatgttaactgtggtagaaaatatttatttttaccttcaaatagacatacttttttttttttcctggcatgcttggccatgtgagcttttttaggaagcctagagaggaagagaagttagacatccaagcatatagttagtttcaagtgggagacatctgtgcagttactggcaggttagtataaagatgctgttattttatgtttctttttttttttcttttttttttttgagacagagtctccctctgtcacacaggctgcggttcagtggcgcgatctcagctcactgcaacctgcacctcccaggttcaagcaattcttctgcctcaccctcccgagtagctgggactataggcatgtgccaccatgcccgcctaatttttgtatttttagtagagatgaggttgcaccatattggccaggctggtctcgaactcttgacctcaggtgatccacccgcctcagccttctaaaatgctgggattacaggcgtgagccactacgcctggccctgagtcattgtttatcttaatctggtattcaccctggggaagagagaagagccatttatgaggtacacctgggatcattttgtacagttatggtttatttgcttggttttgttttttgtttttttgttttttttgacaggcccatagcatagtgatcaagacccttagctcaaggctggattgaaatccctgctgtgacctaacatcggtgtgcctcagtttccttagctgtaaaacagggatactagtacctacctcaaagggttgttatgaggattaaattagttagtatctgtaaaccatttaaaacagtgtctggcacatagtacatgctatgttggtttgttataaatttgtataaattttcttaattacctttaagtgaaaagcttgcctttataaatgcatactagtcgtgagatttggctgtacacaaggaagattgctatagcttcctttatttcttgctaatgtcaagacaacctgaggtccacaaaatagaagtgaaagtactaaagttaatagcaattctcttttgcaataatactggagcacatatcctgtaataaagttaattggggcaaactgggtagaagtctaattgctaggagctacatttttttaatcctgtaaccccagggatagaatttatcctaaataatctagaaggagaaaaataaaactataattgtatattatactattaataataagcaaaagctgggtgtggagactcatacctgtaatcccagcactttccgaagccaagaatggaggattgattgcttgagcccaggagctcaagaccagccttggcaacatagtaagaacccgtctctacaaaaaataaaaaaattagccagacatggtggtagtgcatgcctgtagtcccagctactctggaggctgaggtgggagattgcttgagccagggaggtcaaagctgcagtgagctatgattgtgccactgcattccagcctgggtgacagagcaaaatcctgtctcagacaaaaataataataagcaaaacagctagagaatctaaacagaagtggaatgggtaagatcgcctcagtggtatatcatgtagcattaattgatgatatgtagaatgtaagggaaagaaggtattttgaaggtgttttcattgacgtttgaatactgggtgccaaactctctactatgccagaggccagggatataaacaagaggaagacagcttgccctctaggagctcttaccagaagcattgggctgtggtggtataggtacagggaagacataggaggaaggaagtaagttccccgaccttgaaagagtcagggaaaactaaaggaaagaagaaatcgttgagacagaccctaagatttattggctaagtaaattgggataatatagctaacatgtattgaatgtttattatatacccaatattttgctaagcacttttaattatcccattaattcctctcatccctatgtggtagatgcatgtatcattgtaaaaatgagtaaactgaaacttaaatctgtatctatcttctaaaattcatgtttgaaatcactgtatttactatggcttccagctgtgggaaaattctgcctgtggagatcttcatactttaaggccataagaaaaaatagttttgttggagtaagagaattattttctcttgtttttattttttatttatttatttttcatgttaacatttgaaagttcttgccaacagctgaatatctgttgcttattgttttgagagacctgtctctgaaggaggtaggtgcaaatatggagtaggacagtggttccttcaaaggagaagatcctgtatcatatcctgtatttccatcagatatttcattttcctgacttgggcaatgtgtaaagatatgacaacaagattgacaatttgggaaaacgtttaggaaagaataacagggacaggatgtgacttggaaagttcgttgcttagagtagcaaggtttgattctttttgatcaacaatatagacttttccatcctcttactgtgagaatttctactccatgctttgttacatgagaattctgagattagtgctatttcaaccacttttatgggggtttgttaggataaaattgcactgagtgcctgttctaaaaccaaaggcagcaggagagccctgagtctctgccatcagtagtgccactgcagtactcacgagaaacctggggaatgaagacttgcctggcagctttcatttgaatctttttaaaaagagcctttgattttgatgttttccaatataggaagtaacttactacctaggaggtggtgaaacatgacatagttatatatagtaaaaagaacaaaaaccatgcaatcagaggattttaaaaatattaagtccatttagttttctatgaataggttttagtgaaaactgtcactaggcattttagaaatgaagaaaatgaaatcagtgtgttatacacataggaactggcatttttttggttcccaccatctggaatagtcttacagatcggaggcactcggtaagttatttgtggaaagaatggatgaaagctgtgaagattctggtttcctattaatgctaatatgccatgctcatgtaaacatactgatggattgcttgccaagttttcctcttctgatgcttctcaaacatcaaagatgtttatagaacccttctggccggacacggtggcttacacctgtaatcccaacactttgggaggccgaggcaggcggatcatgaggtcaggagatcgagaccagcctggccaacacggtgaaaccccatctctactaaaaatacaaaaaattagccgggcgtggtggcgggtgcctgtaatcccagctactcgggaggctgaggcaggagaatggagtgaacccgggaggcggagcttgcagtgagcttaggtcgcaccactgcactccagcctgggcgacagagtgagactctgtcttaaaaaaaaacaacaacaagaaaaccccttctaactcttgaacttggttcacctggaaaagcaaaagaactagaatagctaaaacaattttgaaaaggaaggataaagttgaaggcatcacactatccaattttaagacttagtttgtagctacagtaatcaagtcagtagtatcaatgtaggggtagacaaatagatcaatgaaatagagtctagaaatagactcacacaggcatggccaacttttcgacataagtgcagcacacctcactggagaaatggtaatcttttcaacacatggtactggaacaaccggacatctgtaggcaaaaaagtgaacctttgccgaaaccttacactttatacaaaaattaactcaaaatgaaccatagatttaaatataaaatgtaaaactataaagcttttaagagagcacataggagaaaatcttcatgacctgggggttggaagaagagttcttaggcatgacactaaaagcacaattgtaaaagaaaaaaattggtaaattagacttcaaaattacaaacttttgctgcatgaatggccctaattaggaggatgaaacatggccataaaatgggagaaaatatttgcaaatcatatgacaaagaactttaatccagaatatataaggaacttgctaaactcaataataaaaaaaaaaattcacttagaaaataagctgtaatttcagcactttgggaggtcaaggtgggaggatcgcttgagcccaggagttcaagaccggcctgggcaacatagtgctgtctccacaaaataaaaataattagctgggtgtggtagcacgtgcccgtagtcccagctacttgggaggtgggaggatcacttgagcctgggagttcaaggctgcaatgagccgtgatcatgccattgcactcccagcctgggcaacagagcaagaccttgtcttaaaaaaaaaaaaaaaaaaacatagaaaatgggcaaaagacttgaacagatacttcagcaaaaagaatgtaggggtgacatataagtacacatagatgttaaacattattcgttcaccattagggtagtgcaaattaaaaccacaataagataccataccacacctattagaatggctaaaataaaatataatgccaatactggccaggtgcggtggctcacgcctgtaatcccagcactttgggagcccaaggcaggcggatcactaggttaggagttcgagaccagcctgaccaacatggtgaaaccccgtctctactaaaaatagaaaaattagccaggcgtggtggtgggcatctgtaatcccagcaactcaggaggctgaggcaggagaattgcttgaaccctggaggcggaggttgcagtgacccgagattgcaccactgcacaccagtctgggcgacagatcaagactccgtcttgggggtaaaaaaaaaaatgccaataccaagcactggtgaggatgtggggaaactagatttctcatccattgctagtgggaatgtaaaatggtactgtggtcaagtaatttcaatgacaactaatatttgaatcataaataatgtcaagctgctttatatacttcttgtgctatcaaaagttaaacaagaagtgagatctccacttgaagtcaggagtttgagactagcctgggcaaaatggcatctctactaaaaatacaaaaattagacgggttggtggtgggcatttgtaatcccagctacttgggaggctgaggcaagtgaattgctggaacccgggaagcggagattgcagtgagccaagattgcgccactgcactccatcctgggtgacagagcgagatgctgtctcaaaaaaaaaaaaaaaaaaaagtgagatctccattccagtacaaatttgtagtggatatatttttcaaactgaaattacagttctagtagtgatttttagacctcgatgatgtatgaggcaaatttccatatttcaagatccgtgtattttggaaatagtggcaatggttgtatagtattgtgaatataattaatgcctctgaattctatacacttaaaatggctaaaatggcaaattttatgttatatatattttgccacatagaaataatccatttaactgtggcatttagttgcttccacataactttccattgaaagtgattaatctgcagtggggtgcatgcatgtaatgatatgataaaggtaaatgtcaagagaggaatctaatagaattctataatgtcttccatgagataaaaggctcaattaaaaatgtgtattcctggatttagctcagtatttggaagttcctgtctttttttttttttttttttttgagacagggtcttgctctgtcacccaggctggagtgcagtggcacaatcttaactcattgcaatctctgcctccctggttcaagagatcctcctacctcagcctcctgagtatctgggactataggtgtgtgccaccacgccctgctaatttttgtatttttggtagagatggggattcaccatgttgaccaggctggtttcagactcctgacctaaggagtctgcctgcctttgcctcccaaagtgctgggcttacaggtgtgagccactgcgcccagcccggcagtaccttcacgaagacatttgcaaaagtggaattgtagactctcattgcaaatcagcattcatagatgaagatttgcaatcaattttgatgaaagggaaaactattttaaaccccagttaagtgaaatgttattcccccataaaagaatttcattcttctcatcagtagacctgcattacaaaaaattgtactcaattattataatctgaattgtgtcaacattttgtggagatttgttttctcttgtaataggagtacctacttaatatctttgattttgcctcttagcccacaaaactgaaaatatttacctctggccttttacagaaaatgtttgtcaacccctagcttaaagcattgatttttctctttttcttcttttatttttttattttttattttttttttgagacggagtctcgctctttcgctcaggccggagtgcagtggcgctatcttggctcactgcaagctccgcctcccaggttcacaccgttctcctgcttcagcctcccgagtagctgggactataggtgcctgccatggcgcccagctaattttttgtatttttttttagtagagacggggtttcaccgtgttagccaggatggtctcgatctcctgacctcgtgatccgcccaccttggcctcccaaagtgctaggattacaggcgtatatgctttgaaagcgatgaaaatctcaccttattctctgttttagctgcatcccagagatgttgatgtattgcagtttcatactgtttagcacagaatatgttctggtttccatttaatgccttctttttatttattaatttaaagagatagagtcttgttctgttgcccagtctggagtgtagtggtgagatcaaagttcactgcagcctcaaactcctgagctcaagcaatcctcccacctcagcctcctgagtagttgagattatataggtacaaattgtcatgcccgtttgatgttttctttcacttacattacttagaagtatattgcataatttctgaacattcagatattttaaaaatctttgttactgaactctaattaaatcctaaagtggtcagagtgcatgtatacatgatgtcagtcttgagatttgttgaggtttgctttatagcccaatgtatagtccattttggcaatgtatttgaagtgacatttttcagatcttttgtcatcttctgaagctttggatatccaaataaggctggtccctgtaacattctgtacctactctgtacagattcccagtttctactcacttaaagtaggtgtgcttgtatttttagtgtatctttctctctcaatccaggaggttttttccttccccttgtgattatatgcagctcataggtaagaaaaacctttgtaatgtacttaaatctcagcagtcctcagctcattatcaagtgccgtagtccctaaccactaaattaagtgttgaccttatacataaggacttcatttaagagcgagttcgttcttgttgttgactcctgtcatgttgtaccattattctcttgaaactggtctgacttgcctttgacaaaaggaaaggagtgtgctttgcagggctatgtgctttcctaataccagaagttatctaaagatacttaactgtgctgtgaactaaagctattgtgtttgatctgcccaggcatccagctgactcctgtatacaaaattctacccgttcagttctgttaatgtttaagttcccgctgttctttggtgggaaaggaggtgatgtataaaaatcaactgctttgtataaggcttggtgtgttaggtgctaaaccacttaactttttcttgatttggggatctattctccttgtttttttgtttgtttgtttgttttttgttttttttttccttcttttagagacagagtcttgctctgtcacccaggctggagtgcagtggtacgatcatagctcattgcagcctccaactcctgggctgaagtcatcctcctgcctccatctcccaagtagctggtactgcaggcacgcatcaccatgcctggctgattttttttttttactttttgtagagatggtgtgttgctgtgttgcccagggtggtcttgaactcctgagctcaaccgatccttccaaagtgtcaggattacaggcgcgagccaccatgcccagctgagatctgttttttactgtttcacaataattgctggaaatatttgtaataatgtgactttcactgctaagacagaaaaggaagataaggaaattgaggaaaatgaagcttctgcttctacaacaggaaagcataaacgtttgagttacttttagagtaaacgggggataagtgtgtctagattcttgacccaccctcttctgccacagtcagacttagaatgcacttttgcatgcacttttgttaatctaatgaacgaacatttatacactttctagttagtaaatacgtgtaactttatatttcagctcatgagatcctttgctgcgtgctgcagggaagtgtagagctcttcagctgtgcagccaggataagaactcacgttctgttctccctgctgctgctgtgacaggggaggcacgtgtacatccaggctctttctgtgtggcagggctgtttaattggggctgatggaaatttttgtcataggaaatgggcaatcagattttcagttagtagtgaaataattgactctcaatccatattgggaaacagaagataaaacatttggtaataaaaatgtaaattttagaacatagaacacaaagagtggtccataagctgggcgcggcagctcacacctataatcccaacactttgggaggctgaggtgggcggatcacgaggtcaagagatcaagaccatcctggccaacatggtgaaaccccgtgtctactaaaaatacaaaaattagctgggcatggtggtgcacgcctgtaacccccctactcggaggctgagacatgagaattgcttgaaccggggaggctgagattgcagtgatccaagatcatgccactgcactccggcctgggcaacagagcgagactccatctcaaaaataaaataaaataaaaacagggccgggcgcggtggctcatgcctgtaatcccagcactttgggaggccaaggcaggtggatcatgaggtcaggagttcgaaaccagcctgaccaacatggtgaaaccccacctctactaaaaatacaaaaattagccaggcatggtggcacatccctgtaatcccagctactcaggaggctgaggcaggagaattgcttgaacccgggaggtggaggttgcaatgagccgagattgcgccactgcactccagcctgggtgacagagggagactctatctcaaaaaaacccaaaaaaacaaagagcggaccctaatgtaacctatggacttcagttaataatgaatctgtattggctcatcaattgtaacaaaggtaccacactaatggaagatgttaataataggaaaaacagatgaggaggacgggagaggtacagaggtatatgggagcattctgtactatctgattagtttttctgtaaaacctaaagatgctaaaaaaaaaaaaaagaaaactgtttaaaatttttaaatatctagcttaatgttccccaatgggttcaaatcatacaaagttagtgtttaacctcctgacccttgcttggaatttctcagttaagatgagtccagtttgcagtttgagctgtttcatcagttccgtttgcctctcgcctgtgtattaactgtgctcttgcctttctccctatctgctggaacagttggaatgccaagatgccttggaaacagcagcccgagccgagggcctctctcttgatgcctccatgcattctcagctcagaatcctggatgaggagcatcccaagggaaagtaccatcatggcttgagtgctctgaagcccatccggactacttccaagtaagatgccgtgctgagtgatgacagtgaagcatcaaaggcctttttttttttttttttttttttttgagatggagtcttgctctgtcgccagtggcatgatctcggctcactgcaacctccgcctcctgggttcaagtgattctcctgcctctcagcctcctgagtagctgggactacaggcgtgcaccaccaccaagcccagctaatttttttgtatttttagtagagacggggttacaccatattggccaggatagtctcaatctcctgacctcatgatctgcccgcctcggcctcccaaagtgctgggattacaggtgtgagccaccgcgcccggcccatcaaagccgttttagaacattcaggctaagattagatcatctggggagactggtctttagctaagagctgtgttcactaaacagtgtccattaaacacgggctgccctctccgtgcgtgttgatagctttgtgatttcggttttctctccttagacaccagcacccagtggacaatgctgggcttttttcctgtatgactttttcgtggctttcttctctggcccgtgtggcccacaagaagggggagctctcaatggaagacgtgtggtctctgtccaagcacgagtcttctgacgtgaactgcagaaggtaggcgcctctggtccaccctcatctcccccatgccgggtgggcagggcctgagctaggagtgtgaagtccacagctctgtgtctttaaagagccgagctgtccagtggagggcgggcggcctggggatgactttctctttgctcttttgctttatctcctatttcacctttgatcctgttttaaccacgggctttctctctctctctcagccccgcttctcttcctgagtctgcagggagattatgttgctgccttgtgacagaatacatttttgtggtagctgattgtcatgattaaaatgtagtttacaactttacattttaccacaggaaccttcagaaagggttgggggcccctgaaaaagaaagttcttattcacaaattgcattcagggatcattttcctgggtggaaagaaaggcttttgctctcatcattttctgtatcctgggaggctccttatacagggtaaatgtgtagttccctaggaagggtattttttcccagaaggtgaagactatgtacataattttaaaggagagacttgtgtgagtggtggcaaaacctggagacaaaaagtggtggcaggcggggagctaggtgtgcctttcccccgaggagatgtgtaacgaggacgtgtgcccttgttaagactagagagactgtggcaagaagagctgaatgaagttgggccagacgctgcttccctgcgaagggttgtgtggatcttctgccgcaccaggctcatcctgtccatcgtgtgcctgatgatcacgcagctggctggcttcagtggaccagtaagttctaaccatcctttccgacagtctccaggggcccggccacggccagctctaacactcttattctgttgcagaggttgtgctcagctttgggctaggtagcagtcttagagatgccttcaggtctgttgaaaggggtcgatggattttggcaacagctggaaggatgaaagggcagtgttgccagagaagaaatggaactggcttgatttctgggtgggggtgaaatggaactgactccagttctgcacaggactgtgcttctcggttgtgtgttaacatgaactgacagtcggtgcaggcagatgtgtcttgcagtgctatgagtgggtgagagcacgttgtgtggcccgggctggtgagccagcaccgggaacataccaagtgcctggaggcagttatcacatgtttggcaggtctgtggcaaataagccctgagaaaactagaggactgtcgaggattttagagtctgacctggagtccgtttaagtttggcttatagtgtgactgtgtggcaagtgttggggtggcagccgtggttttccccagtctgtactgatgcagagtagacaagagagcctttgacgttcactctgtttcctgggcacctgtttcttacacctgctgtgctgccttacacttgagaccttgattaaatctattctctacacatttgccttgaggcatcggagcagtagtactgcttgtactgtgcgttttccatatgtgggtaagctggaggttcatggttttggtaagtatgtgcctaagatgcatggcaattaggtaaaactaatttgcagttttgtttttgtttttatttttttaacgtttgatgcctcttgttaaagttttgatctcttttctgaagcagagaacactacttttctggtattgggtttctatattattaataattgaccaactaacatactttatataaaagttttaagtaagaaggaccatgtaactgaaatgttgtgttatgtaatttaccaaaatggcaaacattttcatagagccagcttcccccaagaagagcttctgtcattgtttcactacagggctggtggctgctctgatctcatagaattcattcctctgggtagcaccatatgcaggctttgcgaataaagtgatcatgggctttcttgattccatttggccaatgcaagaacttcattggctcccctctaaaaaaaattccatggattgctgggatttttattttttattttttgaaaaaaatggtacctatccgtattcagcttggtggcttcacagtccctcccctgaacatccgtatattccttattctctcatttatggtgcagaacactggggtactaacctctaggaaactgttctagctgccagggaaagctaagagccctcctttaacaggaaagcagcagcatgctttttcttctctctgccgtttcagggaagagcaccttaaggccagtgttatttcatgggattctgccctagagctgagaaagtaatggactcatccataatctcttttatagatttgaaagtgtaaacaatacacacttccttttttggaactccaattctaatatgtttctttttcattggaaattgaaaaaccaggctggttttgagattagtactagcagtgagtaaacctcctgtctgtggacttaaatccttttgaggaacatttcgttttagatttttacaagttttctaatctggcacgactttcaaactagcttaatctgttcttacagaaacctgtgtaaggacagactgcccacatacgggctccccaaataaaatggcatttttatttcttgtccctgctcgggtttcaccgaaccttggtagccataatcagaacaaatgaaacacagtcaagttgttgtgttctgtttgtttttacctgccagccagctgatgctgacatttatacaccaagatgatccaaggttttggtgacgccggtggggactgccgctatatgtgcagggtgcccgggggtcatagtaatgttaatggagtaccagaatctctaacagtgtggtcctgtgtagccacattgctacacttacagagatgctttggggcctttttggattaagacagttctaaaagaccaggcctcacctatgatctgtgtataaagaattagcatcgcactgtagatctgcaagagaaggccgcctcctgcagtgctctctcttggtgaatgctaactctgctcgagggccttttggggaaaggacagtgtaaaacccttagagaggtaagtttcccacccttccaacctctctccacctgcagcttgcttggtgctgtcaggatctggatttggggggagtctctctgtagtggaaccagtgacagaagctgttctttagaattttcaggatggctgtattctgcggtcagaatgagagagtcaagctgggcagaatctctcgccaagagttcaggtaaggtaatgtttattcactgggaatgctttccacagccagacagctatgctaacagtctcaagttttcttccagtttgtttagatttaaatgatacatttgtaactttttaaaaactaaattttggttggatttttcatgaaaacctcttttttctttatcccctaaaaaatggtttgaaatgtcattgttatttaaaaacccgatgtgttggaacttctttaatctgctgtttcctctttttccccccctttgaaagtttcgcatagtgtaaacattcactatgtcttttaccttccctgctcctcccatctgggaggcgctgatgctattacccagtgctgaaaaatggcactctaaaggtatgggaaggaaggagcccaaggcaaccacctgctgtcctttcagccttcctttggagactgctccatcagtgccgaggtgtgtgggaacaggcttcactgcaccgccatcttactgagttgcttcacgtgaggaaaagggggctttggccctgtgactcagttccacattttggattgcatactggaaaagaagccaatcttcttgctagtaaaccagcaacccggctgtatacagtggtgacccaagcaatggatataaacctaaaaatctgagggaggggagaggtggaatacagtagttcttggaatctgaagtctcctatttgatcaggttatttcctgggacttggcaaaaatctgattggtggggatctcctaggacctagtggacatctggtattaatttaatctcaggaaaaacaagaaattaacccagagagagtctgggttttggaattcagcgtagctacctccagaccgtggtgtctggcctccatttttgtctgtcattcagctctgacttacagctgcagtcacctttgctataaggcacctgggtagaagggtggatgggcttcacatcaatttttttcttcctttagggtgggggattggtttggctttcttttgttgtggttttttgttttatttttgtcaagattgatttttagatgcaaggacttgaaaagacccagaaggatgccaccagtttttccttgaggcctaggattttttattctgtcccgagcagaggtaattcctcacaacttagtgcaccagtagcaccagccattttgagcagagtacctctttggggagcttttcgttttgttttgtttttaattctctttccttagcagcaaggtcttttttcctagagaatctactccgttgcagaatcattgcaacctcaggagccctcactgattgagtgctgtcagcctgatatactactttggactctggaaacagatatgggttctattctctatttctactgtgtgtcgttaaacaaccgtcggagaccagatgacctgttagatggctagtcctgtataactcgactctgtatgtttcaatgtatgttactgcaatgcttcacctgctgtacagtgtttgtgagatgctctttgaagatggtacttttatattttttcattttcaataaaagtacattccttcccacttcctggtatttaatactgttgctgaatgtgccttgtgtgagtgtgtgctccggcgttgcaggacctcagctggaggtggcactcggtggttcttgggggctggccgccttccctctgcaggtggtgttagacatatgctacctgaggtaacatgttttcatttttgggagggagtcgggagtggggcgggcccatgggagggtctctggatttttgatagcctgctttgtttgctctcttctgtactattaaactgctgatgtttattttcaggaatgttttgcaaatgcacttctcactcttccccagtacaactgtaggtacactgttcctttttatcaaataagcacgtttgaaacgatccaaaaaaaaggtcttaatttcatgtaaacaaatgtatccatgtgtggagatactggaataaggtcaaagctatacttttgaatgaccatgtgtttagagttaatttcagctcattgataggtttatgttacattagaaagagtaatggttttgatgatgtcctgtaaggaagaaagtttgcaattagacctagctcctgcagaatgccctgagtaagttactgcaggcagcttgtaataattgggtcttccaaagttttgctttgcttgcgcactggtccctgagtggagctgcctactctttctaacttaacataaaactatggcattgtgtgtgagtgccgtggagatgttgacagtggtgtgtgtctctccctgtaggccttcatggtgaaacacctcttggagtatacccaggcaacagagtctaacctgcagtacagcttgttgttagtgctgggcctcctcctgacggaaatcgtgcggtcttggtcgcttgcactgacttgggcattgaattaccgaaccggtgtccgcttgcggggggccatcctaaccatggcatttaagaagatccttaagttaaagaacattaaagagaaatccctgggtgaggtgagtgaggggtgtttgcttcacagcagagagcaacttcctagcttgaggttcattcctctagggccctgccttatcctttatcttcctcctgagacaaatgaaccgtgtccttgcagggtcccctcactactctttgtatcttatagctcatcaacatttgctccaacgatgggcagagaatgtttgaggcagcagccgttggcagcctgctggctggaggacccgttgttgccatcttaggcatgatttataatgtaattattctgggaccaacaggcttcctgggatcagctgtttttatcctcttttacccagcaatggtgagtaagcctcccagctgaatcctggcagcttctccttaggagatgagttacttccattgggttatagtaggcattgctgaggtctcacagctctgattggaaatttcctcaaagcaggttcaatctagagctcgatagtgcttgctctatagggacagaattttgacttgagaggaggtaaggtgtcacttgcatgaaagagagtctgaatgagaaggtcagctggtgaaccctgtcccacttgacataggagtgtttgagtcactgcgttggagttggtgctaagtgatagggccctcctgcctcccctttggaagcactcagtctctgtggtcactattgagaataaatactttcttgtcttcattgccttataaagagataagaattcagtaatgttttattacaattcaataggtcacttttattaaagacagtacgattacataacatttggcccatcctagcaagcaggattatatgctcattttattgagaatgaccttaagcagattaggtagttctcaagtttgaatgagctttaatttggcgtggcatcgcttttcctttcagatgtttgcatcacggctcacagcatatttcaggagaaaatgcgtggccgccacggatgaacgtgtccagaagatgaatgaagttcttacttacattaaatttatcaaaatgtatgcctgggtcaaagcattttctcagagtgttcaaagtgagtttaaagattttgtatgtgcatgtggtagaaggaccttggattctttgggtcttataattcacacactttgctttctgagcacattacgtactaggactagtgtctagtatcgtaggacataatatcatagaatctttgtgttcaaaagggatcttagaggtttgaacccataacctcatctcactgatgaggaaattgagacctgggaaaatgttgatttttcccagttaaaacacagctagttaggaataatccagtttcgaagccccctgtgtatattctcatcctgcccatgattttccagcctggtcatgaggctttcacagaagacaatatcaaattactactgagagcatcacctttgcccactctactctgtggtttcacgggaaatagtttgtggcccttgaggtaaactgggagtcaggatggctggatgctggtcctagctctgtcaaacgtgtaagtgcccacaaagctaggagaaatggcacagatggggcattcagaaagatctcaacacaaattgaaccagtgtgccttgaaacaggtgaaatttaagtagtagataattaaaaacaaacacatagatacttaatttaaataaaagagatgaggctgttggtggaccataacctcatcaggagctgagtccagtgctgtgaaacagtcaatgcattatagttggagtagaaatacagtgttcaggccaggcgccagtggctcacgcctgtaatcccagcagtttgggaggctgagttacgtggatcacctgagttcaggagttcaagaccagcctggccaatatagtgaaaccccgtctgtactaaaaatacaaaaataagctgggtgtggtggtgcatgcctgtaatcccagctattcgtgaggcagagacaggagaatcgcttgaacccaagaggcggaggttgcagtgagctgagatcacaccattacactccagcctgggtgtcgcagcgagactgtctcaaaaaaaaaaaaaaaaaacaaaacagtgttcagagcaaggcagctgttgttttcctttcattgagtaaccttcaggaacatgatgtccaattctggaatctacatttgatttatgagggctgttaagctaagaagcatccagaggagatgagcactcaagaggtgcccagcagtggacggggctgccttgttaagcagtgagtttgtttctactagagtggaacaaatggattctgaatggacatctgccagcaggttgatggcaggatggctgccactggtcccttctggctctctgattctgtagttttatgatcttttttctgaaatttccctcatccatcagcccctgactggttatctttacctgtatgtattaatttgaaaagagtgttcttactcattatagacatggccaaggtgtataatacatgttcaagtaaggagttcagtgtttttatgtgacttacaagctagctgtgaagatagttcccaatgccttaggcagtggtaatacctttaaggtcagtgtataccctcttagaagaattaagtatttgccaggtacagtggtacatgcctgtaatcccagcactttgggaggcctaggcgagtagatcacctaaggtcaggagttcaagagcagcctggccaaaatggcaaaaccccgtctctactaaaaatacaaaaattagctaggcgtggtggcacagcctgtaatcctagctactcaagaggccgaggcaggaggatcacttgaacccaggaggcagaggttgcagtgagctgagatcacaccactgcactccagcctcggcaacagagtgagactcccgtcttaaaaaaaaaaaaagtattggccgggcgaggtggctcatgcctttagtctccacgctttggaaggagagacaggatcactagagcccaggagttcaagaccagcctggacaacgtactgagacctcctctctacaaaaaataaaacataactgggcatggtagtgcacatctgtggtcccagctacttgggaggctaagatgggaggatcacttgagccatggaggttgaggctgcggtgagccgtgattgtgccactgcactccagcctgagcaacagagcgagacctcgtctgaaaaaaaagtatcttattgttctgcttcctgctccacggtcttcagtacactatggttgctttgctaatatgggggttgattttgcaaatatttaagaaaaatcattctgcctatagaaattgtatttcacctatcttcttccggttgtcattactgcatttttatatggaagcttctatcccactgccaacatacagcaggcactctgggaaatgttagttccctccccactgccccttttttttttttttttgagataaggcctggctttgtcacccagtctggaatacagcggtgcaatctcggtgcactgcaacttccacctcccaggttcaggcaattctccggcctcagcctcccaagtagctgggatcataggcgtgtactaccacacccggctaatttttgtatttttagcagggacggggttttgccgtgttggccaggctggtctcgaacacctgacctcaggtgattccccctgctttgggcctcccaaagtactgggattataggcatgagccaccgcacctggcctcttagtccctccctttttaattctccagtgccattgtgttgtctttcctattaattccttaggcaaaaagtcaacaacaaccaggtaagcaaacacaactgccaattatagatacaattaatgtgttcattccttctcaacctaagaaatttacaagaagaatcagaaaaaggtatcatagaagatgatgattgagttcatacatagtgactgctttctgttagattcattcctgtcacttgatccatttcaaacctcagccttttataccagctttagtggtagagttgatagtcataggtgttgaagggtggctggagacctacagagtcttgtttggaggtggaggaacaacatccctaggcttcttttaacttgctttgaaattggcttgctttttattcatagaaatccgcgaggaggagcgtcggatattggaaaaagctgggtacttccagagcatcactgtgggtgtggctcccattgtggtggtgattgccagcgtggtgaccttctctgttcatatgaccctgggcttcgatctgacagcagcacaggtcagggaaccctcagggatggggaacattttagaaataccacatttgctggaggctgaggcaggaaaatcacttgaacccaggtggtggaggttacagtgagccaagatcatgccattgcactccagcctgggggacagagcaagactccatctcaaaacaaaacaaacaaacaaacaaaaaaaaaataccacatatggagatgatgctgtggtcctctccttactggacctggaggttcccccaagaattagtaggtattttttcattcatgggattaagctgagaagcagaagagtggggagccagcccttatgcacaaatagtgtatgagttgtttttagtcaacataagtttgagtttaattctgaaattacagatcatcctgtggttcatatttactgacaattttaattgaaggtctcaaaaactctacttaaaaaaaaatgtggccaggcatggtggctcacgcctgtaatcccagcactttgggaggccgaggcgggcggatcacttgaggtcagaagtttgagaccagcctggccaacatggtgaaaccctgtctctactaaaaatacaaaaattagctgggcatagtggtgcatgcctgtaatcccagctactcgggaggctgaggcaggagaattgcttgaacctgggaggtggaagttgcagtgagccaagatcgtgtcactgcactccagcctgggcgacagagcgagactccgtctcaaaaaaaaaaaaatgtaattgacttgtaataacagctgaccgtgaagttgcagccttcctagcgcctgagaggaaattcatggtgtcaggttacttcagttgcatagcatcattaggcacagtttcttctcttctcctattttcaggctttcacagtggtgacagtcttcaattccatgacttttgctttgaaagtaacaccgttttcagtaaagtccctctcagaagcctcagtggctgttgacagatttaaggtaagtggctccttcccctgcccccgtgtcaggagccctccccacacaactaactgctggctctgttcaaggggccacccaggctggcctcactgggcttaagcttggctttggccttttggcaagttggtaagaaaaagggggcagtggaggagactgaattgagggatgagacttgtcaccttttttaattaatgtgaatttttaccttttgtgaacggccatgatctgggctcccaggattgcagagttcccctttagagctagccccttccacctgggcctgacatggatgtgtcgcaactcactgggccttgaagtggcttaaacctagaagaccagcactgtggggcatcttccccttgatctttgctactgtcactttgattgattgacatgctgaatcctttttgatactttctttttcctgccctgtggtgctactcacgatgcagggaaagcagttacatggaaatagtcataaaactaggtcatgttgagaagtgcagttaagtaagtctcagcttcttttcttgcaggtggttagttgatcataccttggctgtgttctttgttccttcagaatactacacatacatgatacaaaagggagtatatttgggagggtggagagaaatagatatttgatagtggttaatacttaacaaaaaaagggatgccatgtgggctggaattccttgatgttgccactgcatagattagctcctatgtccctgcttgtctttattggccagtgagaggaataagaaagcaattttggtgatgtgaaggcttgaagctcacatgtttgagggatgaatataatcatcttggaggttcaggagaaaacaaattggattttcttcttaagaaacatggaaactcagttcccgagatttgtttgtattctacttgtttacagttgaccgggtgacttttatttggtcaagaaagctagtcctggctgggtgtggtggctcacacctgtaatcccagctctttgggaggctgaggcaggtggctcacttgagcccaggagttcaagaccagcctgggcaacacagcaagaccccgtctctacaaaaaaataaaaaaatagccaggtgcagtggtgtgcgcccacagtcctagctacccggggggctgaggtgggaagattgcttgagcccaggaggtcgagcctgcagtgagttatgatcatggcactgcactccagcctgggcaacagaatgagactcttatctgtgtttttgtttttttttgttgttgtttgtttgtttcttacaaaaagagaagaaagaaaaaggaagggagggagggaagagagagaaggaaggaaggagagaagagagaaaggaagaaagctagtcttcgaatgtgcccctcccccaccccaacgtggccacttcttagaaaaccaagagctgagtcatatgaaaaaaaatggcctaatgggactcagagctttattttgctgaatccgcaataaccagtcgtggatgaaagcaaatgtttgaccataagttctccctgctgttcatttctatattcttgttagtgaatggatttggtagcactttggataaagtaagggcatgtagtgtaggttggtcctccccttgtttttcgagggctctcatctcctgcttattagtgaggacttggattagcaggtggctttcacatcataggtccctcctctctccaggaagcctcagaattaatagtagaagcagcaccacccacagctctatttgatgccccatgagactttagaccccttctatcttacttctcttggtggtctcagtctctttttttccttgttattctttttttaattagatgcttggcacaagataacaagtatttatggccagccttggtggctcacgcctgtaatcccaacactttgggaggctgaggtggttggatcacttgaggtcaggagttcaagaccagcctggccaacatggtaaaaccctgtctctactaaaaatccaaaaaattagccaggtgtggtggtgtgtgcctgtagtcccagctactcgggaggctgaggcaggagaatcgcttgaacctgggaggtaggggttgccatgagtcgagatcgcgccactgcactccagcctgggcaacacagcgagactctgtctcagaaaaaaaaagataacgagtgtttattacttaattcctcccgaactctaagccggttctttcttcttatcttcagatgtctattaattagaattacattgactttatgagggttggggggctgttttttaggtgtaaggcaactgtttattatgtttctgagtacgttaaaggaagtttgcctcaatcttgggggaccatctaaggcagccttttgaaaacaacagaactgttcctgggattgtatctccccaaaagcatctgccctctcatcatttttagaagatggaatatagaataacaaggatgagacttgcttctttgattcattttacagaccttgaaactcactgacgatgttgcagagccctgcttttcaccctgtgtcttgttttacatcattttctttctttcttttttaaattggagttggagatctgacagatttgcaagtatagtcttttctctatttcacctaccctgcaagtgcatatggcaggagaacttgttgcttcctgttgggtagtatgcataaagaataggaaaagagatataaaatttatttatgtaacctgtaatttattgatttgataacctgtagaaaggcagtgtgaagctgcactgattgtcaccagtggaatagggtggcttgctctagcaaatacagacacaggacacccagtgaaatactgcatggaatatacttatactgaaaaattattattgtttttctggaattaaatttaacgggggcccggcatggtggctcacgcctgtaatcctaagcactttgggaggctgagcaggtggatctcttgaggccaggagttcgagaccagcctggccaacattatgaaaccccgtctctactaaaaatacaaaaattagctgggtgtggtggtgggcacctgtaatcccagctactcaggagggctgacacaggagaatggcatgaacctgggaggcagaggttgcagtgagctgagattgcgccactgcattccagcctgggtgacagagtgagatcctgtctcaaaaaataaataaatacattaattaattaatttaactgggcatcttatatttatctggcaaccctgtgagtagtcccctcttctgttctcaacagattcattctgatttgattcttctagtgaatgaatagtgttttcatggtcagtgtcctgtgataaagttgaggcttatggtttataggtttatatggttataggtttatgttatatctaagattctgttgttctgacaggtgcaaattcaagtagatacaagttcaagtatggggaggcccttctctgcctcttagcacgtcagggcagagtgatctgaagccgaaactctcctggtagaagggagggtaaggctgcggggagtaggaaggaaacatggggctggagctgtgaaaaccagtaggtactggcatgtttcttaatagttcattgaggcctaaaagaccttcatcctttgaataactctttaagggagagaaatgatggaaattctgtcggcatgtggttttactctgtgaaggtgatcaaaatgtttggcatgttactcttagttcaatctctcaggaaggctttgaacaaatgaaagcagcagccatttcagcaagcgggggccacacctaaggttactcgagagtgaagattatctcagaagtttagaatcatgacacttcggggaagataggatcagggatgaatgggagacgggggcttaagggagagcttagaagtttagaatctaagagagaaagggtttgtttttggggagagggattatgtatgatatttaatagcacctgcaaactttaagatagctggggggttctcagtaactaaggagggtcctgaccctaaaagctatcttttctctaaagattttgtaatgtttaaaatttttttaaattaagataaatatattttaaatcatactgtgaatccaactggtatagcattctgtagagaagatcactggcttaagaggattgttagaaggtggctcacacctgtaatcccagcactttgggaggctgaggcgggtggatcacgaggtcaggagatctagacatcctggctaatatagtgaaaccctgtctctactaaaaatacaaaaaattagccaggcgtggtggcgggcacctgtagtcccagctactcgggaagctgaggcaggaaaatggcgtgaactcaggaggcggagcttgcaatgagccgagattgcaccactgcactccagcctgggcgacacagcgagactccatctcaccaaaaaaaaaaaaaaaaaaaagtggattcaaagtcttacgggaaaatcctgggctgtgatttattgtgatcagtgttttacatcttaatttcagaaacatttccctcttcaagagttcattcttcagctgggtgcggtggctcacgcctgtaatcccagcactttgggaggctgaggcaggcagatcacttgagcccaggagctcaagaccagcctggccaacatagtgaaaccccatctctacaaaaaaatacaaaaattagccgggcatggtggcacgtgcctgtaatttcagctacttgggaggctgaggcatcagaatctcttgaacctgggaggtggaggttgcagtgagtcgagatcgtgccactgcactcctatctgggcaacagagcgagactccatctcaaaaaaaaaattatttttcttttaacataactcaggggtctctgggaatgagtgggaggaaagtgtcttgttctcttcccaagggttgtttctcagggagatacccttcacttccatgcaagcctgttcctttggttgtttgaactctcaagttccaaggcaaggctttgaagacatgagagtttcttggcaagaagatgttctctgcggtagatgaaactttagatactcttttctgacggtagcaatgtaagcctgtgacagtctctactcctagatacatgcggcgctgtgagtgtgggaagtgggcaggctttggcattctgcaggaggggtctggaaggaaaacacgtagtgagcatctgtactggaggtcagcatgccctttgcttttcctacctgctttttactactccttagaacaaggggctacgtgccagtcagttaaatgtcattaggtccgctttaggctggctgagggggaaaggcagtttagcatgtaatttgtcatgtggaatattgggtcattgataaggcccctggacctcttgaggttgccccacactcccgtgaccccttgatgggcctgagattgggctgcactaatgagctaccttttgcccttcagcttccttccactgtatagcctgatgtgttttgctacgtgagtgtacgccctaggcttgtctccctggtcttgatccagtgtctcatctttgcacctctctcacaactcctatcagagtttgtttctaatggaagaggttcacatgataaagaacaaaccagccagtcctcacatcaagatagagatgaaaaatgccaccttggcatgggactcctcccactccagtatccagaactcgcccaagctgacccccaaaatgaaaaaagacaagagggcttccaggggcaagaaagagaaggtgaggcagctgcagcgcactgagcatcaggcggtgctggcagagcagaaaggccacctcctcctggacagtgacgagcggcccagtcccgaagaggaagaaggcaagcacatccacctgggccacctgcgcttacagaggacactgcacagcatcgatctggagatccaagaggtaagtggtccgccccctgcctccctgcccgcaccccaccaccccatgctgatctgccaccaataggcggctgctgttccttttcacaaagtgctttgtggctaggagtgattttgaactaaagagcaaattagaccagctctaactctaaaaaaaaaccaactaagcatttagcaacagaaatgaataacaactaatcttatgaggtgatcattttataagcaaggaaatgaaacattcaagaggattttccaggatttttccccaaagaggattctattttagttgtatgtgagctgtgacaattatttctgattgttacaagtctgtgagcgcccttgtgcactaggctgtgcatcatacctggcacatgataggtattctcagtgctactgtgacaacatttgtgttgtaatgatttattcttaatataagttaaggatcgttaacggtagatgatgtcacagcccaggtagcacaagattagtctcagagggcctcctatagggaatggtggaacagagatgccaggttcaaggcttttaaaatacagactatgtatttcggaaccagcaccatattcacaggtccgtgtcattagagggccccggatgtgtatatattcattcattcaacagccatttcatgagtatcaaactccatgccagatgctgtgatagggctgggcacagagccacaaaaacccaaacagacaaaaatcccgtccttcttggagtttacattctagcaggcacagacaggtcgtgagcaaatacaatatattgcatatcagatggtgataagggctatgacagaaggggacagaggctgggcatggtggctcatgcctgtaatcccagcactttgggaggccaaggtgggcagatcacttgagcccaggagttcaagaccagcctggccaatatgttgaacccctgtctctacaacaactaggaaaattagccagctgtacgcctatagttccagctacttgggaggctgaggcaggagaattgcttgagcccaggaggtgtaggttacagtgagctgagatcgcgctactgcactccagcctgggtggcacagtgtgagactcagagtgagtctcaaaaaaaaaaaaaaaggtgggtgaggagagagtgtgctggggcagggagcaggtgtggttacaacttgaataggctgcctgagggaatgccttatttaaaaagtagtatttgggcaaagatcaaaggagatgagggagagagctacctgggtatgggatgggtggggaagaacattccgggccaaaggaacagaaacacagaggccgcaagtggtgagtgtgtctgttattggagtggaatgagcatgggagagagtagtggatgccaagggcagaggtggtgcctgccagagcctctggtgagacttcagctttactccaagtgggaagaggagcctttggaggattcacagcagaatgacatgattggacttatgtatgaagaggatcattctggttgctgcaggggagacaaggaagcaaggagaacagtcaaggctctgttaccacagtaaccgggagaaagatgaggatgtcttagatcaaggttgctggtgggaggtagtaagaaatgtttgtccatgtaactggaagtagggaggaggtttgaatgcagtgtatatgaaaatcagcaactgaccagaggcatggtaagccaatccagaactagactgagaagaggacaaaaagcttccagcccttaaaagctatgagcaagaaggggacacagtctttagtgacaccacttgaaactatgagtgtcattgaagggcatgcaagtcaggtttttacttcagttaactttttttttttttttttttttgagacagagtctggctctgttgcccaggctagagtgcagtagcacgatctcggctcactgcaacctctgcctcccgggttcaagtgattctcctgcctcagcctcccgagtagctgggattataggcacgtgccactgtgcctggctaatttttgtatttttagtagagacggggtttcaccatgttggccaggctggtctcgaactcctcacctcaggtggtctgcctgcctggcctttcaaagtgtggggattataggcgtgagctgctgcatctggccttacttcagttaacgcctaacaggctttttatttagtaactattagcttgattattgaggcagctctaatacattgctatcagctctattagaaaatgattccacacgtgcagctaaaatgtattcttttgctttgtatgttgaccctcattttgcccttcagagcccacagacaatgggagacctttagccatttgaagagagatgccttaattctccctgggcctttgctttagggaagagaaggggaggtaatgtttgccaagtgtcttctgtgcaccaggcatttttctcatttttgatgtctcatttagtcatcatttaatcataagaatagcatttttctcatgtaaatctaactggcctgagcagaggttgaacctgtgacttgacctccttgttgccaccaggcagtaaaccattcagtactcgtggaccatgtcaaaaactatttgttcaactatcagacactgtacttagttttatgaggatactgcctttcctcaaggtgctcagagtccaaagaaggagacagacacagtattaggttaagtcacggggcctggatcacacagttagcaagtgctagtgaagttgggatttagataaagacccatctgcctccagaatccatgctccgtccacactaccactctcccttccttcctggggacacttgaactggcacggggttgtaaacaagtgacccttttgaagtcatctgtctgtcccttgaaaactttcaacaccactttgagaactctttatcttgcctaaggatactcagttaatcatagacttggtgttctacttttttgtgggattgatggtataaatattcctcagatttttggaaatgttttgcatgcaacagtgtccatggtttttattgaaaattaattatgtatacaccctggagaaaaatcataataaaatgatttttaagagtcctgccctctcttctggcaaacaacaaaaacaagtaaataaagaatatgggtggccaggcgtggtggctcatgcctgtaatcccagcactttgggaggccgaggtgggtggatcacttgaggccaggagtttgagacgagcgtgaccaacatggcgaaaccctgtctctactaaaaatataaaaattagctgggtgtagtggtgcatgcctgtaaccccaacaggagaattgcttgaacccggaagcggaagctgcagtgagccaagatcgcaccactgtactccagcctggttgacagagcaagactccatctcaaaataataataataataataaaatgatttttaaaagccctaccctgtcttctaaaaaatgacaaaaacaagtaaatgaagaacatgggttagcagcagaataggaaagaggctgggcctaagaatgacggtgggatactggaatgtgtgcggcatatttactttccccaaagggcttccattcctgttatctcaggtgtctccacagaaacccatgagataggcagctaatgagtgagaaaacaggtaagtggcctgctgagtcatcagggtgacagttctgtatgggtagactacagttaatgtgtttttcctcaagtccttagcgatgagtggttagtagtctctaaatgaccctcctctctgtgtgccttgtccagggtaaactggttggaatctgtggcagtgtgggaagtggaaaaacctctctcatttcagccattttaggccaggtaagatttttgttattgtccttttctgctgctttctctggtttgcaagagtctcaggaaaaacgaacaaatttcctggagagtcaggaaaggtggaaacaaatgaaccctcagcctgcattgtatgcccccaatcccccgcagttccccccagttctcccccttcacagccttctgcctggaaggaggcctggtgggcgcctgatggatgactgactgttgtcccagctggaaccatttggtctcatgccttctttcattcagcatgtatctattgagtgccacaggtatgcccgtgtattgaaaatgtcagagataagagatgagcagacaccctacactgcagcgctgccaacagagttaacctgtaaagaagcagggcggccagcactcccagcctctctgtcagacaggactgtcagggtttgatctagaagcaaagcccctctgttttctgcctaatccctgaaagagtcatgcccttggggagttcatggtccagtggggagcaaggccttgagaacacaacaagcacatctccaggcagggagtgaacagcgtgcagggcccagcacacggtggccagtgctgagagtgagggacaggatggggccggagtcatcccactgagacacactatcattgctgtgttttagaatcaaacaatccagaaaaaaaaaaaaaacaaggtgcccacatgcttttacattagaattaaattaacttgacttagatggttgagatgagcataaacttatgattatctctacaccctgatggataaggtccactgaattgaaatgaaacagagggggagcaggggtgcttttgtagcccccagattatggaatgctttcttgtcttgtttggcatcagctgtcacagttggtgagttgtggtcctccttgagggtggtggtgcctggggctgtctgagtcagatcatggcaggcatcacctccaccttctgctttatgacactctccagtggctgggcccagccattggtcttgtaaaaagcaccagacttcctaggtgatttatgatgaccaaccagatttggagggccagtgaggagagacagagatggggggagggggagaaggaaagaaaaggtcaattcgtaagtgctgctctgccatctagcaatgtgctcctttttccagggttgactaggcagtggttaggttgaaaaccaagtcaggctttgcttctggacaaatcctggcaaccctgtctctggcagggaaacgggttgggctggtcagccctgctttaactgtagtttacatctgttgatagcgctgcaatgtgcggtgtttgtgcagcagccagaagtgccggctttccacagtagaccccctggggacttctgaaccctttgaagtgcacatcagaatgctaccagtttgtggtgtacgtaggtacacctgtgtgtgtacacgctgtgtgagggtgtttgagaagaccagcttatatgaacaagtactgcacaggctggttagtgaaactttgcttcaaagctgtagcatccctaaaccaagacaaatgtctactatcagtcccaaacaaaagaaatcatggaagggggtaaaatggataagtcaattcatatcaaaccattgcaactgaacacaaacttcaaagcacatggttcatcactgcttgtgggcaggcaaggtccatcattggtaaatggacactgtgtatatattataaatactaggtgatgtctaacctggactttttttttcccttggtcctcatttcatagaagcaactggtctagccagcatcctaggtaattgccttggatgagttggcctgcccccatgttgaggcagggattagctggaaacccctacagcatcctctccaggagaattctgcaagaacctcttgcttgtgcttctcctaatttaaacagtttgcacacagcaaatgggctgcagagggaagtgtttgccttcaagttatgggttatgctgagctcccatcacacataagcaaggagaactttgattttctttgctgcttagctctctttggaattaaaggtggaatctggatttgggtccaaaaagcatcccgggaaattaccagagctagattccattgtggaaggtgggggttccgttggcatagggtgatggttttgagttatgatgccattggatggtgtctctctccctagatgacgcttctagagggcagcattgcaatcagtggaaccttcgcttatgtggcccagcaggcctggatcctcaatgctactctgagagacaacatcctgtttgggaaggaatatgatgaagaaaggcaaggaatgtttggcttctgtcatgctttccatcttggccgcgtgagatgcaaggcagccctagtcagcaggctctgctcccgccgtgtccctgacgctgtctctttgtgtcctccagatacaactctgtgctgaacagctgctgcctgaggcctgacctggccattcttcccagcagcgacctgacggaggtacaggccttccgcccctgaccaggcatttagcagagtggcagagctgggccagagctgctcctgggagtgcaactgaaatgcttgggagaagagcctcacagggagttaggctgtcattaggcctttgtgttaggaaagcatgtgtccattagggcagggatgttaacactgcttgttttaaggttgtaagtattttctgtgtcttggggattgtaaacaaaatcccattgttgactcagagttgatgttttttattctatccagatatttttaaaactacaagtaagcgtgtgcatgttgagcatcttccttgaacttgattttgccaacctccttaactcagatagtctgtagagagcccttttctattagaaagagcccttagaacaaatccacatttctttgggtctctgccctgcagcagtttccagaggcttgtctttggaactaatttgtgctcttcagtgttaaaacttgtctcccatgaattgccctgaaggtctctgggattggcacctttatttagctgatttcagttaaatccctcaaaccagatttggtgaatggtttaattactttagaggtccttaaatccatgtccccagatcagcagcatcagcatcagcatcatctgggaacttgttagaaacacaaattcttaggctgttctccagacctactgaatcagaaactctaggggtggggcgcaaaggtctgttttaacaaaccctgcaggtaattctgatgcaacttccagtttgaaaacctctgaattaattgaatatttgacaactgatttattcatttaatcatttagtaacatttattaggtgtttattatgtgccagtgacatgtgcagacactgtttggcactaagaatataaaggaataagacaataatctgcacgtaaagaagtgtacagttaagaggatgagatacccaaacaaataggcacaaaataatctgatgaaaagagccccatctctttggggtactagcgggaaagaggttgggggagatttcagaggagatgatgccagaactgagcagacaaagtagaggcaagcacatgacattgtcatgttcatagtatacacataatttcaaatggcttaggtcccaggatgtggaagggggattgtgcactggaggctgagaactgctggggaactgggtgacaaagggtctggtttgtatgccatgtttggatactcaaggtttatcctttgaggctcttgaagaattttaagcaagggtgggagatggtcagctttgtgttctggaaagatcttcctgccatgtggagaatggattggagggggagcatccgggtggactggcaagaccagatgtaggattgatcggtacccagatggcagtggtagaggaagaggcatctgggccaactcccccacttcgttgaaggatcagcatggcagttcatctgcggggaatcagcatggcagttcatctgcggggaattgacagaaggagctggtctgggtgggcaagaagagaagtgactgggtgacccctccacgctgttctggacttgcgctggaggcttcaccacacttctgggctcttgtagattggagagcgaggagccaacctgagcggtgggcagcgccagaggatcagccttgcccgggccttgtatagtgacaggagcatctacatcctggacgaccccctcagtgccttagatgcccatgtgggcaaccacatcttcaatagtgctatccggaaacatctcaagtccaagacagttctgtttgttacccaccagttacaggtatggttctttcttccctcggctgcctgcctgagtttgggaaatcagaaacagggaggtaggtttgctccaggtatccttgtgttataactagaaattcctggaatcaaggtttcattttcttagcaaattagccccctgtaccaataaagctcactgtaccagtgtaacagatggccatctaaatcagagatccttggagcatatcagcttctgcatatagatcagcaagtaaaagggctgagaggagcaggccaaaaatggagtttgggtataagatagtttggaaagcattgtgttaacatctctatgcaagtgggaactgttttgggaaaacaagcttttctccctctgccattccatcataagcaggcactttggagagcagctcaaggatgttgccatctggctcacatatgttgtcacgtttagggggcaaaccctccattctgccaaagaaagtcataattatgtatatttgtgagtgcagtgaaagggtgtaaatttaatgcagggctcatgtggctccatcagcagattcatgtgaaaaaccggagggactcggccaggcacagtggctcacgcctgtaatccctgcactttgggaggctgaggctggcggatcacctgaggtcaggagttcgagaccaactggtgaaaccccatctctactaaaaatacaaaaattatccaggcatggtggcacgtgcctgcaatcccagctactcaggaggccgaggcaggagaatcccttgaacccaggaggtggaggttaaagtgagctgcgattgcatcattgcactccggcctgggcaacaagagcaagactctgtcacaaaaaaaaaaaaaaaagaaaaaaactggaggaactgctccttatactatgtcacgaggcacaatacactgaagtggggttctcagtgttggcaccactgatgttttggaccagatagtccattgttgtgtggggctgctttgtgcacccctggcctctagccactagataccagtagagacagtcgctggcttacggttcaacttacagttttttgactttatgatggtttccacacaaccattctgtttttcactttcagcatagtattgaaaaaaattgcatgagatattaaacattttattataaaataggctttgtgttagatgattttgcccaactgtaggctaatgtaagggttctgagcatgtttaaggtaggctaggctaagctctgatattttcaatttacgttgggtttatcaggatgtaagcccattgtaaattgaggagcatctgtgtacctctcccccgagttgtgacaaccaaaaatgtctccagctgggcgcggtggctcaggcctgtaatcccagcactttgggaggccgagatgggcggattacctgtacggcaaaaccccgtctctactaaaaatacaaaaaaattagccagacatggtgctgcatgcctgtagtcccagctattcgggaggctgaggcaggagaatcgcttgaacccaggaggcggagattgcagtgaaccgagattgcgccaccacgctccagcgtgaacgacagagcaagactctgcctcaaaaaaaaaaatgtctccagatgctgccaaatgtcttctgggagcttaactcgtctcctgtagagaactactgaactaatgtatgggtttttgaatgtatttgcacaaacagcatattgtgttgtctctgcctttgccttcagtacctggttgactgtgatgaagtgatcttcatgaaagagggctgtattacggaaagaggcacccatgaggaactgatgaatttaaatggtgactatgctaccatttttaataacctgttgctgggagagacaccgccagttgaggtaagatctgatggtgtttgcgtgtgtccccttctgtctctgcaagggaaacacagccggagtgagtgatggagagacctcagctgaatccagtgtctgtgtcttattggcaggggccctgttttctggtgaacagactgctgtgccttagttcacacactgattctgctctaggagagcaggattgtggggctggtgagctgaggtcttctgtcactgagaacttactaatatgacaatggcagggagaaggatatgggctcagtgagggcagagaagatgtgtgctgctgttcattcacagcttagtttcctaagctccatccacctgattgaagcattatgaagctcttttttaaataaacaagtgaataaagtgccaaggtagggaaattaaatattgcatacatttgaaagcactcaggtcaggtgctgcggctcttgctggtaatcccagcatttttggaggctgaggtggacagattgcttgcgcccaggaattcgacaccagcttgggcaacatagagagaaaccccgtctttacaaaaaaatacaaaaattagccaggtgtggtggcaggcgcctgtaatcccagctacttgggagggtgaggcaggagaatcgcttgaacccaggaggcagaggttgcagtgagctaagattgcaccactgcactccaacctgggtgacagagcgtgattccatctcaagaaaaaaaaaagacataagagaaacttggaaaggagagcattaagtagtttctgttatctcaggtagaaccctgatggctgtttattgagtccctgtgtgccctgttataggcagttctcaggggtagggcctgtgcaggttgtaaccatgtgagagacatcatctctgtccttaagggactcacagtgttctagggaagaccgatgcttttatgctcttacaagcacttacaaatgtggcttacaagaccacatcacatgtatagtactaatggagttctaagggcgaatgggagggtgagctttccagggagtgtatgttgcctcatgaagaatggaagacttgaatctatctgaatggggacaactgtgactgcgattgggacaaggggaggggcattccaagtggaggaacgagtgtggaccaaagtagagaaatgggaaattgcagtgtggtgtaaggaatggtgtgaagtccagtgtggcttgagagtaggggctgtggacaccagtgagatgggagaggagcttgcaggattagggcagggccagaatatggaggtcctacagaaccaggtggaaaagcttatgtttatcctgtggtagcagtgggaaatgatcagatctatggatttggtttagtgatgtgggctcagagaggaggaatggaaatgaccccatgcctaatactttgtgcaacttggaatggacaagaacagaataaaggttactgtgtttggagtttagtgactggggagagcaaatgtcagtggactaaattttaaatcttaaaaatttaaggagatgaggaagtacaagaaatgagtataggtgacccttttaagaagttggatgtatcttttttcagtaatagcagtttaattgatgattccctaatatgtatcctgtggacattcatctggatggctaacatgactggagacttttttttttaaatattattagatcaattcaaaaaaggaaaccagtggttcacagaagaagtcacaagacaagggtcctaaaacaggatcagtaaagaaggaaaaagcagtaaagccagaggaaggtaatggccttttttgaaatttttagatttgtcatcaaagtttatcagaaataacttgtgtagtaagtaattcatgatgtttgatagcagtgtgtgtacaatataaatacttggtcttacatttctggaaaacaaagttcttatataatactgggagaccacgaggcaccttctgtttgcttaaacagaccagggcagtaagagtcaccttcagacccatgtcttctcctgtgcagggtggggtcaggtttaggtaattagaactgagtcatcctgagtaaggaaaaatcgaatggtgggtacaggtacacccttccatccagtgattcgcctctgctcatgaaaagtcccaaccaaatcagaggtgttctggctctaagaatatctgtgtcctcagaagcacccatgttagaacagtagactcgtcactttgtcttgacaatatagcaccaggactatgagtaagagtgacagagaggggtttttcctacttggcttttcctgtccagagcccttgatcctgtttcttaaaccctttatgttatcaacagtaacaaatcttgagagttaagggaagatatttgcaataatgtgggcattttcacctttgaattttaagttgcatgtcaatttaaatacacacaaacactgtgtgtgtgtgtgtgtgtgtgtgtgtgtgtactgtatagatgtagacatgtgtgttcttgttttaatctctttgttgcttcacctccttacctcacccttttgaatccagggactttcttgggtttgccattgctttggagacggagcctgttgctacttccttatccttaaaactgcaggaggtcaggcacaggtggcttatacctgtagtcccagtactttgggaggctgaggtgggaagattgctcgggcccaggagttcaggaccagcctgggcaacatggcacgccccgcttctctccaaaaaatataaaaattagccaaacgtggtggcacatacctgtagtcccagctacttgggaggccgaggtgagccactgcgctccagcctgggggaccgagtgagatcctgacaaaaaaaaaaagaggaaagaaactgcaggagatatttggtattgggagttgatcatcctgacttactgcctcttttatttctttttttaaaaggtatgggattttgaattcaggtatgagattttgaattcaagtgtggtttatgataccttattgacacaccccaaaaaacaaacagcacagaaggctgagacatttgttagttcttaccacgggcagtaaaaaatcagaatatcattagcaaacatatgttcttctgtacatagtcactaacctggctactcacaactcttaaagtgctcaaggcatgagggaggcttattctgagatttgtaaacattatttgtgtaaagagggaaaagccgggtactatgcttagtacctgggtgagaggatcattagtaacccagacctcagcgtcatgcaatatacacatggatctgcatgtaacagatgtaatatacacacggataagcatgtaacagatgtgatatacacacgaatctgcatgtaaccaatgtgatatacacacggatctgcatgtaaccgatgtgatatacacacggataagcatgtaccagatgtgatatacacacaaatctgcatgtaaccgatgtgatttacacacggatctgcatgtaaccgatgtgatgtacacacggatctgcatgtaaccgatgtgatgtacacacggatccgcatgtaaccgatgtgatgtacacacggatccgcatgtaaccgatgtgatatacacacggatccgcatgtaaccgatgtgatatacacacggatccgcatgtaacagatgtgatatacacacggatccgcatgtaacagatgtgatatacacacggatctgcgtgtaaccgatgtgatatacacacggatttacgtgtaaccgatgtgatatacacacggatccgcatgtaaccgatgtgatgtacacacggatccgcatgtaaccgatgtgatatacacacggatctgcatgtaaccggtgtgaggtacacacggatccgcatgtaaccgatgtgatttacacatggatctgcatgtaaccgatgtgatgtacacacggataagcatgtaaccgatgtgatgtacacacggatccgcatgtaactgatgtgatgtacacacagataagcatgtaaccgatgtgatttacacacggatccgcatgtaactgatgtcatatacacacggatccgcatgtaacagatgtgatatacacatggatctgcatgtaaccgatgtgatatacacacggataagcatgtaaccgatgtgatatacacacggacccgcatgtaaccgatgtgatgtacacacggacccgcatgtaaccgatgtgatttacacacggatccgcatgtaactgatgtcatatacacacggatccgcatgtaacagatgtgatatacacacggatctgcatgtaaccgatgtgatatacacacggataagcatgtaaccgatgtgatatacacacggacccacatgtaaccgatgtgatgtacacacggacccgcatgtaaccgatgtgatgtacacacggacccgcatgtaaccgatgtgatgtacacacggacccgcatgtaaccgatgtgatgtacacacggacccgcatgtaaccgatgtgatgtacacacggatccgcatgtaaccgatgtgatgtacacacggatccgcatgtaaccgatgtgatgtacacacggatccgcatgtaaccgatgtgatttacacacggatctgcatgtaacctatatgatatacacacggatctgcatgtaacctatatgatatacacacggatctgcatgtaaccgatgtgatttacacacggatctgcatgtaacagatgtgatatacacacggatccgcatgtaaccgatgtgatgtacacacggatccgcatgtaaccgatgtgatttacacacggatctgcatgtaacctatatgatatacacacggatctgcatgtaacctatatgatatacacacggatctgcatgtaaccgatgtgatttacacacggatctgcatgtaacagatgtgatatacacacggatctgcatgtaaccgatgtgatatacacactgatctgcatgtaaccgatgtgatatacacactgatctgcatgtaaccgatgtgatatacacacggatccgcatgtaacagatgtgatatacacacggatccgcatgtaaccgatgtgatttacacacggatctgcatgtaaccgatatgatatacacacggatctgcatgtaacctatgtgatttacacacggagctgcatgtaaccgatgtgatatacacacggatctgcatgtaaccgatgtgatttacacacggatctgcatgtaacagatgtgatatacacacggatctgcatgtaaccgatgtgatttacacacggatctgcatgtaaccgatgtgatttacacacggatctgcatgtaaccgatgtgatttacacacggatctgcatgtaaccgatgtgatttacacacggatctgcatgtaaccgatgtgatatacacacggagctgcatgtaacagatgtgatatacacacggatctgcatgtaaccgatgtgatatacacacggatctgcatgtaactgatgtgatatacacatggatgaacatgtaaccgatgtgatatacacatggagctgcatgtaaccgatgtgatatacacacggatctgcctgtaaccgatgtgataaacagacggagctgcatataactgatgtgatatacacatggatctgcatataacagatgtaatatacacacggatctgcatgtaaccgatgtgatatacacacggagctgcatgtaactgatgtgatatacacatggatctgcatgtaacagatgtaatatacacacagatctgcatgtaactgatgtgatttacacatggatctgcatgtaactgatgtgatttacacacggatctgcatgtaaccgatgtgatatatacacagatctgcatgtaaccgatgtgatatacacacggatctgcatgtaacagatctgcagatgtactccctgaatctaaaataaaagttcaaaaacaaaacagggaaaatcttcctgtatagctgtttctcttgcaaatgaaaaattaaattctgtgccctgcaactaactgaataaactctcctctaggccaagggtacccaatggaacctgaaaatctattcagaccatgaagggaagacaatgttggacgtgccttattatactcccctgcctttagagttcaggcacacaactgacgagcattaacatttatatagagatcctaagactgacagaacagtctctttgtagctgtaagatacctaattccaacctcactctattaaaataatagagcatcacaggacagatagcagggccctggaagaaatgcatattttgaaatgtctctgcaaagctgtctgttgaaggggaagttctgcattacgtagagaatctccttcctttactaggtctctccagagggtctgacacctttgataggagacattcacatctgttctctctgacgtctgctactgggaggcttcatctacatgacaagaaccttggcgtccacaccctgtcccccaccactcccccaccactcaagctaatttcaactcttcaggcagagcttaaccctttcaaccaattgccaatcagaaaatctttgaattcacctttgacctttaagctgcacctccctgccccatgttgccccacctttccggatcaaaccagtgattaccccacttatattgattgatgtctcatgtctccctaaaacataaaaccaagctgtaatccaactgccttgggcctgttctcaggacctcctgaggctgcgtcactggtcatgattcttaaccgtggcaaaattaactcctaaattgattgagacccgtctcaaggtactttctggtttacattctgtattctcatattagtgttaagaatctgagtgcgccagggagatcctcaggaatatatttgaaccttttctctcctccagcagccagccagttactatgtcctactgaatttacctcccgaaactccatcccaccatcacaaccccagttcaggcctttatcatctcttacctacagtgttacagctgcctcgttttgaacctgtcttccacacggtcagctgcgagatctagttaaaaacatgagaccagctaggtgcggtggctcatgcctgtaatcccagcactttgggaggctgaggcaggcagatcacctgaggtcaggagttcgagaccagcctggccaacatggtgaaacctcgtctctactaaaaatacaaaaattagccaggcgtggtggcgggcgcctataatcccagctacttgggaggctaaggcaggagaattgcttgaacccgggaaggcggaggttgcagtgagctgagatcacgccactgcactccagcctgggcgacagagtgagactctatctcaaaaaaaaacacacacacaaaacatgagaccaaccaactttcctgcatggagtctttcagtaaccttccattttcaaatattttccctgatagggcacatacagaaaaggctatttgtgtggaacacaggaggcatgaaagaggctgctcgctcccagaggcagctggtgtggcaatatcagccatcccaggtccttcctagcccaacagaagtcagacacacctgtcaccctttctgttgagaagttctttgtggggccaaaattcaaagcctttcttctgtgaccacagcctgcttagtcggcctcatctcctgccattctttaagtgcacatctgttccagctgtgccgaatcactgtggtggtgtgttttgctaccccgtgcctgtgcttgtgttgttttctctgcctgctctctcctttccccacccggtcatctgtggcttaccttttgagaagcaatacagaaagtcttacctgaaacatgcctgccaaccaccccacacctaagccaaataggtcaagtatgcctcccaggggttcccatgctgccctgcgtatagctctatcatcacattgagcacatttcactgtaattatgtgattattgatctgcctgtcctaccagtctgtggcaggctcctcagccaggtccctaggggtggggacctggtcttcatcctctttgctgctcctgggcttcatcctgggtctggtttgtggtaggtgctcagtaaatgttaaatagatgaatgaatgcttctgacaaagaggaaatctaatctagacccctgtgaagctgccggttgtccgattctgttgctctgcaggtgacttagttttatggaaatagttcttcccttctgagtccatgtttctttttttcttacctagggcagcttgtgcagctggaagagaaagggcagggttcagtgccctggtcagtatatggtgtctacatccaggctgctgggggccccttggcattcctggttattatggcccttttcatgctgaatgtaggcagcaccgccttcagcacctggtggttgagttactggatcaagcaaggaagcggggtaaggttactcataaatgggaaagttctgtgtctaagaatgtggccgtttctccctattccctggctattcttagggaaactgttctagttttcacttaaaagaagctgtaaagagagatttttccaggatgaaaagatgagtccctaatgtagcctcaccagaaggaaaaaaacgctgaccaacccacagggcagtagggcgtgcagtaggacacctgcaggctatctgttctcatccgttgtgtattagtccatttttgcactgctacagagaaatacccaagacggggtacttgacaaaggaaagagggttaattgactcacagttccacataactggggaggccccaggaaacttacaatcatggtggaaggcaaaggagaaggaggcaccttcttcacaaggtggcagaagagagacaagacagcgtgtgcgggaggacatgtcaaacacttttaaactgtcagatctcatgagaactcactgtcacgacaagaatagcatgggggaatccaccccacaatccggtcacctcccaccgggtcccttcctcaacacctgggaattacaattcaagatgagctttgggtggggacacaaagccaaaccatatgacattagaatagagagaaagagggctaggtgtggtggatcatgcctgtaatcccagcactttgagaggccaaggcaggtggatcacttggggctaggagttcaagaccagcatggccaacatggcaaaaccctgtctgtactaaaaatacaaaaattagctgggcatggtggtgcacacctgtaatcccacgtacttgggaggctgaggcatgagaatttcttgaactcaggaggcagagggtgcagtgagccatgattgcgccactgcactccagcctgggtgacagagtgagacactgtctcaaaaaaaaaaaaaaaaaaaagaggtggacaaagccatgaccaggtcccagggtgggtcattatcctgtaccctgccctgcccttgagctgagaatggcgctgagcaggggctcttggcagtcgttaggagtctggcctcatagaactttggcttcaaacagaacaccactgtgactcgagggaacgagacctcggtgagtgacagcatgaaggacaatcctcatatgcagtactatgccagcatctacgccctctccatggcagtcatgctgatcctgaaagccattcgaggagttgtctttgtcaaggtatgcattggtgggtggtctctgccctcctccctggtgacctgtggtcaggctttggtgtggcgtctctcagttcatgctgagtaggggagctcccttaaccaggatggccctggctgagatgactcatattccgttagcctccaccttttctcacttgccacctgtccctcctgacccctcacacctccccgctttgggagtggatgtgctgcggagcggttctctggaccagtaggaacagagccgtccctgggccctgaccactctgtgctctgctcctcagggcacgctgcgagcttcctcccggctgcatgacgagcttttccgaaggatccttcgaagccctatgaagttttttgacacgacccccacagggaggattctcaacaggttttccaaagacatggatgaaggtatttctcactgagcctttttttaatactctggagctcactgtgcttccagccttctagatgattctccaaatgtgcagatctgtctgtctgtagatcctgagagcacagtgactgctggtgttttcaccaggaacattgcaactgcattttctgtcttgtttgacctgaaaataaattcaatgaattgagttagcagaaaggctttgaacagaggcatctgagattctgaaacacacacagattttaaagcaatgcattggtttctggatgcctacaacctggcaggttttctggctgttgtatgggctgtgcctgcaccagaactgaaatactgtacccccacagttcagagtaacagtaaagcccctgacattgacagggggcttcctgtgtagcaagcagcatgctcagtgttttatgcatgttaccttaatccccgcagcaggcctgtcaggcgggtgttgtttcactccttgaataatgagaaagctgctatctggaaaggtcaaggaactggcccaagatctacagctattgagtgacaaagctgcaaattgaacccagatctttttgaccccaaagctaatgtttttaattgctgcactgtagctgccttcatggaaggggtttgtttcaggcattgataggccattgtaaacccatggccagaggtaacaagaaatcagaactatccctgatactcgaactgatacataacatgttcccatttctgctaaacacacacgcatgtgctcacacatgaatggaaaaaagaaaaaaagtaaataatagcaacatgtctgggatttgcatgaaaatactttaaccagaagaaaaaaggcggtggggtggggagacagccaaaaagagatgaaagttgataactgttgaagggtctgtgctcttcctttaatttttatgtatgtttaaaaattttgcaagacaaaaaatgtcttaaatgttaacagcagttcattggtattggtaagaatatagtttttgttttcttcttcacatatttattttccaaacattttaaaataagcataagttactttgtaaagggggaaaatgtttaaagcagtggggcaggaagggaaccaagaaaagggagtggagtaagaggattttcttgagacgaaaaaaaaaaatcagagcatccaggtttctaaatttttctttgatcagactgtttaaagacaacatcacaaacttcagatagagagtttgtggaacccctttttgtttttttcaattttcagttccatttttccaaaccatctgacacttgctcctttatttgtttccacagttgacgtgcggctgccgttccaggccgagatgttcatccagaacgttatcctggtgttcttctgtgtgggaatgatcgcaggagtcttcccgtggttccttgtggcagtggggccccttgtcatcctcttttcagtcctgcacattgtctccaggtaaataggaagcgttcatgtctgctggggccacggagaagcctcagttgctgggtaggtgctgtgacacggagctcattctctctccagggtcctgattcgggagctgaagcgtctggacaatatcacgcagtcacctttcctctcccacatcacgtccagcatacagggccttgccaccatccacgcctacaataaagggcaggagtttctgcacaggtttgtcctgatgggggctagaggcctcaaaggggagtcagcatcccagcgtttgatacttgtccgggaggctcttcaaggccagagatggggattataaacctcattaccaagggtattcatgatttaatggaataatctctgattaaaatccaattgcttggcgggactcctttctgagcaagtgagaaaacagaaatacagatttgggccgcatgcggcatcacgtgcctatagtcacagctactcaggaggctgaggctggaggatggcttgagcccaggtgttcaagtccagcctgggcaatatagtggaccccatctcaaaacaaaatacaaggaacaaaccccacagattaggagtctattggccttggccctgaaaagctatatttcatagagttttgctttttcttttaagtagtaaaaggtagtcatgacatttgagtagattttatttaagcatcgagtattgtttatttgtgaaacttatgtgcattgtcattgtggagctttgtattaataagagattggaactaaaatgttcttcaatataggacaggttgaataagctatggtatatccatagagtactatgtggcccttaaaaagaatgagggagctctataggtactgatagggaatgatctccagcatatattagtgaaacagcagagtacagatgtgtgtattaatatattgtatgctacctttgagtatgtgtttttatgtataacatttagaatatcaggctgggtacagtggctcccgcctgtaatgccagcactttgggaggctgaggtgggcggatcgcctgaggtcaggagttcgagaccagcctggccaacatggtggaaccttgtctctactaaaattacaaaaaaattaaccaggcgtggtggcaggcacctgtaatccagctactcaggaggctgaggcaggagaatcacttgaacccaggagacaaaggtttcagtgaggccagaccatgccattgcactccagcttgggcgacaagagcgagactccatctcaaaaaaaataaaaataaaaatttagaatatctctgaaaggattaaaaaaaaaacctgttagttgccactggaagggagaactgggtagctggaagatgggaatgagacagacttgacctttcatggtaaacctttggtaacttttaaattttctattctgtgtatatgttgcctattgcaaaagttgggtaattatttttagagagaaaatttagaatagaaagtttagaaaaaattattttcaaaatgttaaatgactcagaaaaataattcctaaactttaagcagaaaagaaagtgaaatgtactaaatacgtacatgtgtatatacctacacacagtaaatgtcagtgcattgaaaaaaactgctgggaggaaatgcagcggaatatcaactctggttttaacagggtgatgagattactggaattttacattttcctatttctattgcattttctaaattttctctaaagattacatattttattggaaagaggaaaagtgatttttcaaagcaaagcacatctgcgcagcaaaacttcctgctctggagttctagtcgtacatggtgcactgagccttcagaggggtctggtctgctctctgggacccctactgatggccgtgccatgctccttcagtagcagcagtaaacattgcctgagtcccttttgctgtggtttagcttgcttctcctggtgcttggctccatagctggggaacaagtgccattctgcatggtggcggcatgtgcacacacttatggtgttcccatattcactctgagtttctttttcctcgccttgaaccatttctgctgttggcgtttgtaacctttccttctttcagaaaatgccttctgacctaagatatttttctaaagtttaacacaagcctctttattcagtctcttttcccatgtttactctgtgctgagatagatgttttccataacatctttaataggatttttttttgtttttaaagagtaactaagattagaaaaacttaatgtcctcctatgcatgcggcctagaatacctccagaattcctagaataccctcctggagtttccagggcattctctcagttagaaacaggaagtatttaaatacgtgccctccatcatctgattcgctgaagctttgtccatgcgcggggttgtgtagtactttctttgcccattaagtgttgtctttctcacagataccaggagctgctggatgacaaccaagctcctttttttttgtttacgtgtgcgatgcggtggctggctgtgcggctggacctcatcagcatcgccctcatcaccaccacggggctgatgatcgttcttatgcacgggcagattcccccagcctatgcgggtctcgccatctcttatgctgtccaggtcagtctctgggataggagcgtcatctttgcttgtttgagcccttcctctgctgacgtaaaagagggatgattgtggggggctccaccctgagccattatttcacctctggacccctagaattgctcatggtctgatttgaccgtaacaatctggatttgactggggcaggtagggataggagagaggtaagtgtggaatccaggaataaaggaatcgaactctgttgcatgtgtgtgagaagtagatgctgttttcttcaaaaagaaatatgatcttgaaaatagtttcttaattgtgggtttctgtgttcaccaccatttcatctctggcctctttctagtcttctaagaaatgttatagactcaatatgcttcttacgtgcattttcttctcagggccctgattttcccaatactgttatatacataaaaccttctagcccctaggggtgattgagggtcttcaaatagctcagagaatagttgagaacttgagcactgactagatattttaagatgttgagtgattattattaccctctaaaataatggtattggaattatgtttttaaggagtctatattttagagaggtacaagctgaaatatttggatgagataagctctctgcgatttgcttccaaataatatggggggtgggggtaggaatggaagggaatacagatgaaacaatattgactgtaagttgatcatttttatggtagagttttggtacctgggagttcattatactactctttctactcttgtgtgtttgacatttttctttattgaaaagataaaaataaatagtcaaaggaaccccagagatatgtgtcttcacagataccccgagatgtccagccacattttgcaatttacttgacaactggttggggaagacaatgcattatatagactgtttttagactccgcagtctatggagcacaggggctccagactcactcatttcccagcattatgtatctgatttgactttcctggaaacattcttactagttgctcataggttgatatctccatttgttgtgactcccacaaacaggctcagatacaagtaggaagtccagaagtgaatcagttgcagatatgtgttattggaaatgtaaagatgaatagaaaggctttgggtacaaggaagtggttccagcagtgccatgatactgcccgcattcactgagcattgcagttgatggggtaacaggtatgccttaaaagccaagagaatgactaggtccctaagaccagctgctgcatgtgctcagttcttagtagtcctctagatgaaggaagttctccagcattggcctggcgtgtattgataatgaattatctctttgattgttgttttccattatcagttaacggggctgttccagtttacggtcagactggcatctgagacagaagctcgattcacctcggtggagaggatcaatcactacattaaggtcagactgctgtaggccttttaccgtgatctgactcctcttggagtcggtttaccctttgctgcctcagctgggtgtacaaggaggaggcttgtgttctctgcctatctaatcccacagaatctccagcaatctctcaaccgtgcttggaatgggaaagagattaccgtaagagtttctaagtatatttgtaaattatgtcgagctgagaacttcattggctaatttccagaatgttcagaaccttgtcagttcagcttaactgactaatggagcattttccttacactgtttaaaaccatgtattgttttaattcttactatgtccaattgttcttaatcagggatggccatcaggaccccctgctgagcttttggcaggacaaacgtggcctcatctctggattctgttgcagtggattggggtgggacccaggcttctatagtttgaaaagctccatagcgaattctaaactgctctcccaacttacaaacgagtaaatttaattgataccagagtatccagctcttcccacctttccccaggaaccccttccgtcttgccgtgggtggcaggcatcttgctgctgtcctaactggcactcttaaacaatttcctacagggatgtcttaatccatttcacactgctgtaaagaactacctgagattgggtaatttatgaagaaagaggtttaagtcactcacagttccgaaggcttaacaggacgcatggctgggaggcctcaggaaacttacaatcatagcgaaaggtgaaggggaaacaagcacatcttcccatggcagagcaggagagagagagaagggggaagtgccacacactttcaaacaaccagatctcctgagaactcactgtcacgggaacagcaagggggaagtccacccccctgattcagtcatctgccaccaggcctctcccctcacacatggggattattatacaattcgagatgagatttgggtgggaacacagagccaaaccacatcaaggggtgtccaatcatttggcttcccagggccacattggaagaagaattgtctcaggccacacataaaataatactaacgatagctgatgagcttaaaaaaaaagatggcaaaaaaaagtctcataatatgttaagaaagttgacgaatttgtgttgggccacattcaaagctgtcctgggctgcatgtggctcaagggccacagattggacaaatttgcttataaagaagcagcatcatgagtagttagattctcaaattgaactcaattcttaagagttatctattttattgaactgctgtgagactttacaagcatctgtgtcattgtttatatgtgaagagtatattctgagttcccaacacttgactttgaaacatagttttgaaaagttagctttttttctttttttccttttttaatttattttttatttttttattttttttgagagagggtcttattgtcacccaggcttgagtgcagtggcatgaatacggctcagtccagcctcgatctcccaggctcaagtgatcctcccacctcagccccgccaagtaactgggactacaggcatgcgccactaggcccagctcatttttgtattttttgtagagataggtttcgccatgttgtcccggctggtctcaaactcctgggctcaagcgatctgcctctgcctccacctcccaaaatgctgggattatagacaggagccatagtgtccggcctgaaaaattactctttcaattgggaactgagtgtacgtaaactggattctctaatagagatgtgcttcactgattgttttgacagtgagcctcattagtggtagaatatttcttaagcttacaaatgaataactttcttattctcagaaaggatggcaggtggctgcccagtgtatctagtaatagctcttctttcatgtttagaagttagcctctttgcacactgtcctggtgtgtagatgacccgtgtgtgtacatatgtgcagtgtttgagttaatgttatggttggcgagagccttgtgctggagaggttaggattacggtcagtggtggtacaaagtggaccctgctgaaaccggtcacatttcagaggcctgccctcccactgactgtcccaacacagagtccttccagcttggagttttagactttaggcttaaccccccagagtgctacagtctttggcccttacttccccccataaggctatatactccatggccaattgccagagagttttaaaagatcatgagatatgattgttgatgataaaaattacccaagcagttatatcacagcattttgagctggaatagattctcaagatcatctaatccagtccccacaatttgcagataagaaactaagatgcagaagaagtggtgatctgtccaggtcacacagtggcaaaattagaattagagtctgtgtctcctggattgaccaagacatgccagaatgccaggatccaatcagatgttcagtaaatattagttttcttcctttggatttaagccaatgattatcaaatggtagaatcctatctcaaagaatttcagtaaaaactgctgtggtggaggggtggaaggcctcatgtctgcccgtgttggttttcctttggcccccaaggcagctttgtggaatagttccttgagacaaaaggtagtctgaacaccacttccctccccaggctgctgctagtagccatgacacttagccattgtgctctgtctctgtcgagtttagtgatgataagcatttacttccaagggattctttcctagcaaggtgacagggtggcagctacctctgtgtggctactatggttgtcctggttttatttctctgtgacaaagcctgcagctccccaagaatctgtggtcagtctgaactggccacccttgtctccccagactctgtccttggaagcacctgccagaattaagaacaaggctccctcccctgactggccccaggagggagaggtgacctttgagaacgcagagatgaggtaccgagaaaacctccctctcgtcctaaagaaagtatccttcacgatcaaacctaaagagaagattggcattgtggggcggacaggatcaggtaaggatgtgcaaagccttctttgaatccattggaacgtagcagtttatgaaatatcactttcacccctttaaaccggatccttgtttgtttgatgagcaattagtgtctcagccccctactgaaaccaattttctaggtttattgttgaccccactttgatgacattgagtgcttttcacagtcataaatgtgcacattctcaatgcagaacactggggcacacagccaagtacgaaagaggagcagcacccacaactctgctacccagagagaagcactggtaacattttggtagctatcttgttaggcttcctctagtaatatgtaggtttacaaaaatgaggtcattgacacatgctgtttcatggccttcttttaaaactatcagtaggctgggcgcagtggctcatgcctgtaatcccagcactttgggagggcgaggcgggtggatcacctgaggagttcaacaccagccagaacaacatggtgaaaccccgtctctactaaaagtccaaaattagccaggtgtggtggcacatgcttgtaatcccagctacttgggaggctgaggcaggagaatggcgtgaacctgggaggcggaggttgcagtgagccaagatcacgccactacactccaacctgggtgacagagcgagactccgtctcaaaaaaaaaagaaaagaaatgcgtaactgtagatcctttagatttctagggtcaggacttgagtaatttacttctttttttttttgagacaaagtctcactctgttgccaggctggagtgcagtagcacgatctcagctcactgtaacctccacctcccaggttcaagcgattctcctgcctcagcctctcacgtagctgggactacaggggcgccagctaatttttttgtatttttagtagagacagggtttcaccatgttggccaggacggtctcgatttcctgacctcatgatccacccgcctcagcctctgaaagtgctgggattacaggtgtgagccatcgcacccggccccttttttctcactttcgttcctgaattgcattccaaagactgaacttgtcttcttttactgtcctttttatccttgtataagaggtatctttgattcagttttcattagttttctaggctccatgcttctttggcatcaaaactcttctagcttttttccttgccattaaaaaaaaaaaaaccttttgtcttttctggccaattgattttaaagaactttctaaggaagaaaaggaaaaagccatttcctgctttctgtttgagggaattacttcacgtcaaaacaagacattgctccaggtctttcatgctggaagggaatctttagccaagcagggtgactctccccaagcctttttactgttctctcccttgagcccatctgctgcattcgtccccaggggtacactgctcccctgaaagctgactgatgtcctttgttatgatttccctttaacacaggtgagataggccaaaacaagcaccacaacttcattaaacagtagttagtgacagaagagaaacaagaaaaagaacatagtggccaggtgcagtggctcacgcctgtaatcccagcactctgggaggcccaggctggtggatcacctgacgtcaggagttcaagaccagcctggccaacatggtgaaacctcatctctactaaaaatacagaaagttagctgggcgtggtggtggatgcctgtaattccagctactcgggaggctgaagcaggagaatctcttgaacccaggaggcggaggttgcagtgagctgagattgcgctattgccctccagcctgagcaacaagagcgaaactccatctcaaataataataataataataataataacctgatttacactccggttctaatagggcttcttccaagtttcacgggtaacttggaaactctcctgtggtcatgtcagtcaaggacaccatcttgaggacttcactgcctttcttaccagcacattccatcagtgcaaaggtagtcagattcagaggactctaaagtcttccagtccaggtggtccaaacctaggcaccttttgttaaactggaacaacttgacccattgtttcgggcaccattccttccttagcttagatcttaaagccctgcctcggcccagagggaatgtctcctcccctcctatctgggaaaggggccagtaactgagtcccccaaccctgaacagagtcattcattttttttttttttttttttttttttcctgagacagagtctcagtctgttgcccaggctagagtgcagtggtgcaatctcggctctggagtagctgggattacaggcacatgccaccatgcccagctaatttttttttttttttgtattttttagtagagacagggttttgccatgtttgccaggctggtctcaaactcctggcctcaagtaatccacccaccttggcctcccaaagtgctgggattacaggtgtgaaccgctgcgcccaccggcctggagtcactcatttctaggaggagaactatcctgctagacggaccaggtttcctaactcgtttctggtagaaggatgtgaggattgttgcattaggaagatgggtcctaatacagctttttccaagtttcctgggcgttacttcttccaagtcttatgggtgtttttcaggttcccattaggctgttagacagaggtatgcccagggggtagatcccgacagtggggtcgtggctgtagacactggggcaaggcaggctgtttgcgccctccatgagtgctgaagagacagcatcgtggtgatctcgatgaggccctcacaagaggtctttcatgacatggtggcacgagaaaggtaggagggtcaagaaccaggcgtacagccaaggaaaagtgattcaacagctaaaaccctgtagttctaaatctaaaccatggaaccaagttgcagaaaggtagacaggactatggcaaacttcttttctttttggctctgtagagagagcaccttttaaatgtttatatcctttgacacagtaatttcagttctaagattctttcccaaggaaattgtctgaggtggcagtaaagtttcagcactaagataataggacataacattattataagttttacataaactaaatgttgacccttagagggctggctgaacaagaatacatgcacatgatggaatgcaaccactaaaattttatcttgaaaatttttttaaaagatggttgactgagtgttatacaatgcttttgttttgttttgtttgaaacagagtctcgttctgtcgcccaggctggagtgcaatgatacgatcttggctcactgcaacctccgcctcccaggttcaagtgattctcctgccttagcttcccaagtacctgggattacaggcactcgccatcttgcccagctaatttttgtatttatagtagagacagggtttcaccatgttggccaggttggtctcgaactcctgacctcaggtgatctgcccgcctcagcctcccaaagtgctgggattacaggcatgagccaccgtgcccggccaatgcagtgttaagtgaaaaaagcaattacaatattgcatttctgatatgatctcaactctgaggaaagaccgaaaggaagtgtgcctaaaatgatagaagtgagattatgggagattgatgatgtcatctcgtattacttatgtaaacttttcaaatgaagatttggttaacctgttctgctgattactgtaataacactgatcccccaaacctgcttctctgccatagtttcctatcacagtagggccattgacagctactcattgagtcgaggcaaaacctccttcccgtatgtgtttatttatccctggaacttcttcaattccccagctgctgctgtggcaacaggaggccttgtcttagtctctctctcagccctaataagggggtagggagaaaaaagacatcttgtcctctggtttgcccctcaactgcttgctgtaagatctctgttctcctaactttgcctaagaagcattcagctctgtgcacctgttcctaaggtgaccaggaggcatttttccattttactctcatgaaaatggaatggtcagccaggcgcggtggctcacgcctgtaatcccagcattttgggaggccaaggtgggcggatcacgagatcaggagtttgagaccaacctggccaatatggtgaaaccccatctctactaaaaatacaaaaattatctgggcatggtgacgcgtgcctgtagttccagctacttgagaggctgaggcagaagaatcacttgaacccaggaggcagaggttgcagtgagccgagatcgcaccaccgcactccagcctgggcagcagagtgagactccgtctcaaaaaaaaaaatgaaaatggaatggtcccttcccttccttctcaggctgaagctgtgtaatttgaaggtgtctgcctggtatctcaggaaagttaattgcatttttctatcattttatacattatctcagttaatcagttgaaataacaactgaatagaaatggaaaaatagttggcattgccctgaggctaaaccagcattgtcctcacagactttgctaacagctcctctcttgcatgtcttctgactcatcagggaagtcctcgctggggatggccctcttccgtctggtggagttatctggaggctgcatcaagattgatggagtgagaatcagtgatattggccttgccgacctccgaagcaaactctctatcattcctcaagagccggtgctgttcagtggcactgtcaggtgaggacctgagcacctgcatgtctcgtgcgtcacttagaggccagatgagcatgtgggaccacatgatgctagcaccgccccctgggaccatgagctcaccatctctagtctggtgcttttcccactgcaccatgtgcttgctggtgcagaagggagaggcagcaccactcacaatgccacttggttgactgaagggtgcagggaggcctgcaacacagtgctgaagaggccagagaggtctgggcccagggctctgctccgtgacttcggacaagttatttaaccactcctgtgcctgtttcctcaaccataagatggggatgctttaaagacctgttgctgtgaaggttgaataagttcatgtaaattatataagcacagggcctggcaaatggtaagcattcagcaaatggtggctgctgtcatcagcctcattgacatcatcctcatctgccccccactccattctgtcatctctcctaggtgcgctgaaagttgcagtttttttgttctgtttgtttgagatggagtctcactctgtcacccaggctgaagtgcagtggcacgatcttgactcacggcaacctccgcctcctgggttcaagtgattctcctgccacagcctcccgaatagctgggattacaggcgccctcccccaggcccagctaatttttgtatttttagtagagatgaggtttcaccatgttggccaggctggccttgaacgcctgacctcaagtgatccacccgcctcggcctcccaaagtgctgggattacaggcgcgagccactgcacctggccaaaagttccagttccaatggtggctttcaggcattattactactcatgttatttcattttctactatcttcccctacctttgatactctggaattatgtcactttttgaaatctgccaggttgccagagataaaatccttcttcttggcctattaaaacagtccaaggagaaagcatcacattatctttcctaagcttacctgatcctacccttagccttaagcttcagcctcctgaaaacagtggatttccatcatttgtgtccctgtctattaaaaaatcattctggcctggcacggtggctcacgcctgtaatcccaacactttgggaggccaatgcgggcggatcacgaggtcaggagattgagatcatcctggctaacacggtgaaaccccgtctctactaaaaaatacaaaaaattagccgggcgtggtggtgggcgcctgtagtcccagctacttgggaggctgaggcaggagaatggtgtgaacccgggaggcagagcttgcagtgagctgagatcatgccactgcactgtagccagggtgacagagtgagactccatctcaaaaaaaaaaaaatcattctaaaagtaatttttagcagttttcagaaaaattggtaccaacctaatttcaaataatcataggcagtgttcagacttgttttaaaactatcccctccacctttggaaatggcattttgaactcaaggaactttggtagatatcttagtctgctcaggctgctgtatataccaacataccatagactgggtggcttaaacaacagaaatttatttctctcagttctggaggctgggaaggccggggatgggtgtctgctgagggccgtcttcctggtttgcagatggttgtcttgttctgtcctcatgtggcctttcctcggtgtgtgcctgtggtgcatgcctgtggtgtgtgcccgcggaaaggagagctcttgtgtctcctcttcttgaggccccaccctcatgatctcatctaaacctaatctcctccttacagccccacctccaaacaccatcacattggggtcagtgtttcaacagtttaattctaggggcacacaaacctgtagtccatagcagtaaatcagcagaattctcacctgtgtttgtgtagtgtcaacaccctagagtatgtttattttggtgtttctgtaattgaatctggacagcatgcactgtatctgtggttgataataaaccattctctttgggtattgaggtaataaggtcagacaagcaatatcagaagaaaattagaatttattggtcaggcgtggtggctcacgcctgtaatgccagcactttgggagggctaggtgggcggatcacctgaggtcaggagttcgagaccagcctggccaacatggcgaaaccctgtctctactaaattagccaggtgtggtggcccatgcttgtggtcccagctactccagagctccagaggctgaggcaagagaatcacttgaacctgggaggcggaggtggcagtgagctgagatcgtcccactgcactccagcctaggtgacagagcgagactctgtctcaaaagaaaattagaatttattgaagatgaaagcctaaaaataggccgagtgcggtggctcacacctgtaatcccagcactttgggaggctgaggcgggcggatcacgaggtcaggagtaccagaccagcctggccaatatgctgaaaccccgtctctactaaaaaatacaaaaattagccagtcttggtggcacacacctgtagtcccagctacacgggaggctgaggcaggagaattgctggaacctgggaggtggaggttacagtgtgccgagatcatgccactgcactccagcctggacgacagagcgagactccatctcaaaaaaagaagccattgcttggccaggcgtggtggctcatgcctgtaatcccagcactttgggaggccgaggagggcggatcacctgaggtcaggagtttgagaccagcctggctcttcccataaatctccctatttttagatgccacaggaacaccttgaaaaaaaaaattggccttacaatatttggctttggccataagaactagttttttaaatcatcatttggaagagaattaagaaataaagcacgttaaacttgagatttcttttgaaactgctgccaccaagaagcctcagttttaatttaacaattttatagcatttcatttgggtttgtgaaatgggggcttctagagttagtggttaacaactgaccatgaggccaggtgcggtggcttatgcctataatcccagcactttgggaggccgagacggaaggatcacttgagctcaggagttcgagaccaccctgggcaacatcgtgagacgtcgtctctgcttttttaaattatataaaatgttaaaagaaaaagaattgaccatgggcgcgtgcagctggtgtgggtagaacatcgtgcgcctgtagctttagtagaattggaaccatttgtctccagagaaagaaatgttgactgctttgtggctagctcagtagttggtacactgctgtcctgggtttgtagctactgagcttaggtgcagcttaggaagtcagctgtgcaaagtgagaaaatcatttcagttaaatttttgccagctctaattttggctttttagtctgtagtagacactgaggaagaattaaatgctggacttgtcttttatcccctaaggtttccttttatcctctcaggtttgttacggatcccagagaatgttcagctcttggtattcttttgtttttgagacagagtctcgctctgttgcccaggctggagtttcagctcactgcaacctctgcctcctgggttcaagtgatttgcgtgcctcagcctcctgagtcgctgggaccacaggcatgggccaccatgcccagctaatttttgtatttttagtagagacggggtttcaccatgttggccaggctggtctcgaactcctgacctcaggtgatctgcccacctcagcctcccaaagtgctgggattacaggtgtgagccaccgcgcccagccagtattcttttgctttagttagaagatagaaagcctatgatgagtttcccaaggcacaggcaggataaataagctgtttcctcagctgcctcctagagactctgaatctggaaaccgcgcctccaccaccattagccagtattgagggtgggtacctcttcttgagatacctgtaaacaattaaaacttgaaaggaattcttagaggaaaagcaaggtaaaaccaaaatcaaaccaacaaaactcagaaagtcacaagataaaaattgttgagttgttctgtgtacaaatataatctaatctaaatcataggccagataatttgggaccacaccccttccttagattagccagaatgtcattctagtacctgcatcctggccctcctttatctgcctgtgtgggcttgagctctccagcctgtgtttctgcagctccctattgttttgccctcatgattgcctccaagaagagaggccccttttcatccaggccttaaaacacttttgctggcctctgtctcatggccctagctttccccaccttctcccagagctccctgtgcttcctggacccaggaaacccagccctggcctctgtcctatcccccgcagctggagtgtttttcatcctgaggactgtctggagcctggctaggctgacagtgagctgtccccagctgtcactctggtatgtctcttgagtcttcgtcccctgtgagtgatgggtaccttgtctacccggagcacttctgcctggtgcccattcattagcaagaaacagtgttctcatttcttcttcttcaggtgccttctccttttgatctgctcattaaatttttttttttttttttttttttgagacagtctcgctttgtcacctgggttggagtgcagtgacatgatctctgctcactgcagcctccacctcccaggttcaagcagttctcctgcctcagcttccccagtagctgggattacaggcacctactaccacacctggctaatttctgtatttttagtagagatggggtttcacatagttggccaggctggtggtcttgaactcctgacctcaggtgatctgcccacctcggccttccaaagtgctgggattacagccatgagccaccattccccacctgtcataaccatcttaattgtatttaacaaatgctcaaaacttcataagacagacaccattgttatgcatattttattttaccaaatagtgaggtttcactatattgcccaggctagtcttaaactcctgagctcaagagattctcccacctctgcctcccaaagtgctgggattataggcatgagatgccgcccttggccattattcctgttttatatagatgatgaaactgaaatccagagagtgagagtaatttgcccaaagacacacagctaaaagtggcagagctaggatttgaacccaggctggccggctggctctactcattacactcactgcattgcctcctgaagcgtgtgtcacgaccccactgttaaccacgaccttgatattccatctctccaaaaaacagttagacgtgcctctttgtggatcttgacctttagttacatttcttttcccagcatcttcaaagtctcatctgccttcctcatctcaaaaacgaaaaaagaaagtcacacaatctatgccgttctctctagtatttttcatttgctctactttttcctcttaacttttttcacctaatctgactcttaacaactaaaagccaaaatcagtccgtatttctgcatacctcagaataagatttccttttgcttcctgatagaagaaggtatgtgagtcccaaaatctcctgctctgaaaaccaaggctactatgaagcacccagcacagatgacagggcagcatggtttactgcagtgttttctactataccgagggtgaattgctgtgttgtctcacactttgggagatattcttggcttcatttagcagtggtcaatgttgactattgctaaaaataaaatatgaagaaccaaagatgaaaatgtacctttggcaagatcaggactccaggggttctgattgttaaaaataattgccctcatgttcagacacttttctatccaatcacttaactgaatccttttgattaagtggatgcataactttgctttcatttctgtctgtgggtcagacccaggaccatctggcttctctaatgaggggagatatttttccattcctgattgagctccctgttgaggttggtctggtctgccttactgtgtaccacctacgagtgtatgcaaatattcattttctatctggaacccattgtttagtggtctgaggctccttcagctggtgtgatggacctgggtgaattgaatgttaagcctgggctgggcacagtggctcacgcctgtaatcccaacactttgggaagccaaggcggatggatcacctgagacctggagttcaagaccagcctggccaacatggcaaaaccctatctctaccaaaaaatacaaaagttagccaggtgtggtggcgcacacctgtagtcccagctacttgggaggctgaggcatgagaattgcttgaacctggcggggcagggcaggggttgcagtgagctgagatcatgccactgcactccagcctgggtgacagagcaagattctgtctcaaaaaaaaaaaaaaaaaaaagttaagcctgttgtcgtatttgcccatagaaaatctgatagggccggctactcagtgggcaggagaccgcgcttttgtgtacagcagttctcgcttctccatggtttcactttctgcagtttcagttacccatgatcaaccagggtccaaaaatattacatactatattttgcaagagacagaccacagtcaaataatgttcattacagcatattgttataattgcttgatttcattattgttaatctcttactgtgcctaatttataaattaaactttatcataggtatgtatatataggggaaaaaaacatagcatttatacggttcagtactatttgtggtttgaggcatccaccggggctccctggagcatatccttgtggatgaaagggggctccatgcctgctctttgatccagaggcatctgatggacttacttgctgtatgtgtttcctggggctgtcataaacagtttaagccacaaactggatggcttcaaacaacagaaatgtactatctcacagttccgggggctggaagtctaaaatcaaagtgtcatttgggccatgctgccactgaaccctatagggaaggacgcttccttgcctcttccagcttctggtagttgtggccatctttggcattccttggctttggatgcatccctctggcctctgcctccattgtcacatgatgccctcccagtgtttctctgccttcacgtggccatctctcataaggaccagtcatatgggattaagggcccacccttctctattactctggtatgacctcatcttaactaattacatctgcaaattaccctatttccaaataaggtcacattcttaggtacttaggtgtcttttggggagacacaggtcaacccattaaactgtaccatattaaacaacacttcctgggccaagggtagtgagaagcgagcatgttccaagcgggaaaaacgccgtgcaaagggcaagaggcgctggagagcaaggcgggtcagaatctcccaggagatcgagagatgcccagatagcaggaatgaggcggtgccggcctgctgtcctctcactagagttctgtgataatgacgtgattgtatttgcatgcctgtaattagtaaccccagatatggagacaggtgtgtggcatagagtaaaagtccatgtttctcccagagagtttcctgtttcccacatgccaggcataattttatgagcaaagcaaatatacttttcagattactagacctccaaatgttatgtgtagatcaagacaagccgtccaaaattactgtaacatcccagttttccaccaaatacctgttccaccaccaattctccaccctcatcctcagtggcaaagataattttctcctgtcctaaacatttctagtcctggccgggcacagtggctcatgcctgtaatcccagcattttgggaggcccaggtaggctcatcacttgagcttgagcactggaatttgagaccagcctgggcaacatggcaaaaccccatctctacaaaaaacacaaaaattacgtggcatgcgcctgtaaaaaaaaaaatttctagtctcgttcttttggtatcaactctgatttccttgaggtagatactgttggcacagtaagcaaaaatggtccccaaactggtcttctgtgccaggaaaattcctttttcttgacttgtcctttattctttctctccttcttcctcttcccttctactggatcagtttctttccctggtcaggccagctgtcctggagccccatactcaattacagggttgtgaaccaggtaaaccaagagaaagagggtgcatttctaagtttgtacgtatggagagatttattttttattttattttattttatttattgagatggagtctcactctgtcgcccaggctagagtgcagtggtgtgatctcagctcactgcaaccactgcctcctgggttcaagcaattctcctgcctcagctttctgagtagctgggattacaggtgcccaccaccacacctggctaatttttgtatttttagtagagacagggattcaccatgttggccaggctggtcctgaactcctgacctcaagtaatccacccgcctcggcctcccaaagtgctgggattacaaacatgagccattgcacccagccgaaagatgtattttaacaaatacacgcacaggaaaaaatctagaaggatatttgccgatatttgcatttataaattgttctataactagtattatttacatagtaaaaatagtaaaagaataaatcaagttttatggagctgaggaggtggcccagtgtgctgtcagagctcccatctgtctggttgtggaatgagccgtctgtgaccatcagggtttggagtcttctctccctatgcatgtgtgttaaacatcttccacagacagcctttgccaatgggtcgcttagggtgggaccactgagaaattcctgtgtttctccctagatcaaatttggaccccttcaaccagtacactgaagaccagatttgggatgccctggagaggacacacatgaaagaatgtgtaagtgaagagcttaggggaagccgtgctgagatggtgagggtggaagcacagcagtgcccttgccacaccccgtctgctctggccgtgcctccaggatgcctgtggacaaaggcttcgtggcagggctctccaagtctttcagatacctgggaaaagctgatccctctcaaccccaccgcccacactgcctacggtcatattggccttgcactatccattgattgaagatagtaatgacaactacttagaattaagtgatgcttttaatttattagtcataacagtgtaacatactttgaagcgtccacatatacgcaaaagatatataacgtggccgggcgcagtggctctcgcctgtaatcccagcactttgggaggccgaggcaggtggatcacctgaggtcaggagttcgagaccagcctgaccaatatgatgaaaccctgtccctactaaaaatacaaaaattagccgggtgtggtggcatgcacctgtaatcccagctactcaggaggctgagacaggagaatcgcttgagcccaggagacagaggttgcagtgagcgagagcgcaccactgcactccagcctgggcaacaagagcaaaactctgtctcaaaaaaaaaaaaaaaaagatacataacatattgagtctgcagaaagcacacagtgtgcatatggaccatggaccacagacattttgggacaactcagtaggccctcacaggccctcacgagcagctgcagtctacaggttgataccactggcctagggtgaggcttctgttatgcctgggttgagtcaggatccaggatcccctgccctaattcaactattagtagatgagttctgttttttcctctgctctatcgggattcttctcatttgaagaataagttctgcagcttacaaaaaatgtttcacaggcacgggcctacggctttggacttcagaaggagagtacttttccttactatactatttcctattgcaagaccatattttcagaaccaaaacttaaggcccactatgtgactggattttggggacatgaaagcgttgggatttctgggatgttttaatggtataaagctaacagaatagtctattggaatcagggactgccttggaagtgggtcctagcacgcatgatcagtacacctgcaccttcattccagatgagacaggttcttggctaatagttctttcatcgctttcagaatcatttctttctgtccttggattttcaggaaattcagcttagtttcttacccctctgatctctagtttctttctccctagattgctcagctacctctgaaacttgaatctgaagtgatggagaatggggataacttctcagtgggggaacggcagctcttgtgcatagctagagccctgctccgccactgtaaggtaaggcagtttggggttggcagcagcagagaatgggaatgttttagtgcagccttgccctgacacactggggtccaaaggtattcctggctctgatccctgttggcactttctaagagcatgaccagagataactctaaccctgacacaatttgggtatattggttctggggagggagaacagggttgctttgtttttaccttcatccaagaccaacttttgtttctggccattgagtagttgtacgactgcaaaccatagacatagaagattttttttttttttgagacggagtcttgctctgtctccaggctggagtgtagtggccaaatctcggctcactgcaacctccacctcccaggttcaagtgattctcctgcctcagcctcccgagtagctgggattacaggcgtgcgccaccatgcccagctaatttttgcatttttagtagagatggggtttcaccatgttggccaggatagtctcgatctcttgacctcgtgatctgcccgctttggcctcccaaagtgctgggattacaggcgtgagccaccgtgtctggccgacatagattttaaaattgcaagagactttaaggtcatccaatccagccccttcattttataaacaggaaaagaatgtccttttgtccagtatgttaccagccatattggattcaagggaaaaaaagaattaattgtacatgctcactgtcacagagcatgtaggggcaagtatttgattaaatccgtggttttgttttgttttgttttgtttttgagacagagtctcactctgccacccaggctggagtgcagtggtgtgatctcggctcactgcaacctccacctcctggattcgcgcgattctcttgcctccgcctcccgagtagctgggactacaggtgcgcgtcaccacgcccggctaatttttgtatttttagtagagacaggttttcaccatattggccaggatggtctcgatctcttgacctcgtgatccgcctgcctcggcctctcaaagtgctgggattacaggcatgagccactgcgctcagcctagatcagtattttacaaatatgctgttttggaaatcaaggcaaacatggttttgaaattgtatcacttctaagcaaaaggatgtttttacatatatgcgtgctttcttagaaaaaaaaaaaaaaaacaataggctgggcacggtggctcaagcctgtaatcccagcactttgggaggccgaggcaggtggatcgcaaggtcaggaggtcgagaccatcctggctaacatggtgaaaccccgtctctactaaaaatacaaaaaattagctgggcgtggtggcgggcgcctgtagtcccagctactcaggcggctgaggcaggagaatggcgtgaacccgggaggcggagcttgcagtgagccgagattgcgccactgcactccagcctgggcgacagagcaagactccgtctcaaaaaaaaaaaaaaaagaaagaaaagaaaacaatagatagtgtaaaacttaaatgaaatacattttagtaaaatctagattaaccagaatgctaaaggaatttaatcgagtttctttctcctctgcttctctggcagattctgattttagatgaagccacagctgccatggacacagagacagacttattgattcaagagaccatccgagaagcatttgcagactgtaccatgctgaccattgcccatcgcctgcacacggttctaggctccgataggattatggtgctggcccagggacaggtaccgagtccttcaggaactttggcttggcatgtctgggaggaaactggcccctggcagggatggactgattgccatctttgtagggttctgggcattcagataagcacttgcagcagcgctatttacttgctattgggagggatacagcctccgaatcacaagattactcaggcacctctgatggggttctcattttactttactaatttgtccttttgttgcttgtgagtagcgacactgacttaagtcagagagtacatgtacttagtgattcattcacatacacaatgatcacccctggcatacttaggccagagagtatagatacttgtgattcattcacatacacaattatcatccctggtacatgtacttagtgattcattcacatacacaatgattaccgctcccggaggcctactgagaccagccagcacatgtttgcttttttgcaatcacgcagcggcaccaaacttcttaccctgttgtttcaggcgttcccacagcctggccctagccttgccttcttcattttccactcttcctttgcaggtgcggttggctatagacatcttgcattctccaagctttttatctgtctttagtcagatagttccatctacctaaaaggccctttgcccttctctctcccatatccacctgctctcaacctgcctgtccctgaagaatgacatggcccagatgccaaagcctccatgaaaccccctggctgcctcagccgccctagactgtatctgtacctctcttgtagctcttctgtctcagttgataggaattgtgcaatgccctgtctccctagagaactccctgaacgctctctgagggcagagtcaccgctcattcatctttagggccccagcagtgcttagtactacagttctttatacaggtgatgttaagtacatttatgttagacaaatacctcttttgcatgcccctaggatacaagtaaattaataatttggaggaaatagcaagccatttataatgggtaacatgtcttctattgtagaagctcccacagtgacagctactataatagctacttctactgaatgtttactgtgtgtcaggcactgtgcttagtgctttacatataatctctcaacataccatcagtcatcacaacaacctagagaaagacatagcctggattctgctttacacatgaggagacaaagtctcagggaaagtccataggaagtggagtaggccgggcacggtggctcatgcctgtaatcccagcagtttgggaggccgaggcgggcagattgcctgagctcaggcgttcaagagcagcctgggcaacatgacgaaacgccgtctctaccaaaaatacaaaaaattagccaggagtggtggcacacacctgtaatcccagctactaaggaatttgaggtggaaggatcatttaaccctgggaggcagcggaggttgcagtgagctgagatagcgccactgcactccagcctgggtgacagagtgagacctcatgtcaaaaaaaaaaaaaaaaaaaaaaagcaaacagtaaaaattggtgggatttaaaaaaaaaggaagcggaggagatgggacaggactcaggccagcaaccgcactgccagcacactgtctaaattgtggagaaatattgagaaaaggttaaatagcgcaggttcagcctgggcttcaaagctgaattgagagaacttgggggctaaggatttttctcctcatcttgaaattattttcacactagtgttttttgtgactatctttgtttgccttaaactaagtgttgactgagattctgtcatacataagatacgttgagctactactttgtaagtaggtgttaaaatagagcctagtaaggtataatagatgggaccaagaacatcttctgggaaattctttttttctttttttgagccagagtctcgctctgtcgcccaggctggagtacagtggtgcaatcttggctcactgcaaccttcgcctccggggttcaagcgattctcctgcctcagtctcctgagcagctgggagtacaggcatgtgccaccatgcctggctaatttttgtatttttagtagacacagggtttcaccatgttggccaggctggtctcgaacttctgacctcagataatccgcccacctcagcctcccaaagtgctgggattacaggcacaagctactgtgcccagctggaaattttttcttaagaacacaaattgagacccctttctttcgatgggtggcttgatgttttggagtggggagcccattcactctttatgagggactctatccttctcttcccttaatttttttcttgctaattaaaatttccttgtaatttcaggaaagcctaaaaaaaaaaaaccacacacacaccagaaaagcataaaggcaaaaacaggatgataagccatttacccccagagacgagcattgtaatacactgacttaccccagctgtgtttttcttgcatctgcacacacagactccaacagatgggatgctctctgccgcagacacaaaataccagactaaaaggggtttggaggatgggattttgttatcccacatgggttggtttttgtgcagctcagcagtgtggggctctgtatcactctcagccagtactcaccttcccctgctggtacaggatgcctgctcaagcacccaaccaaaggaaggacacgtgtccaaaggaaggacacgcttatgttctccttgtggcctgtccactgagcaggacaccctctcctaaagcaccaaggagacttcctcttacatctccttaaacaaggttatgttccatgcctttgccctgtggcgggggcggctgagaaagttgagtacatgcatttcagcctctgccacaggaggtgggttctgccagcgtatcattcagggttctgctgccacatgattttccacggctacatagaagtccatcataggaatggccacctgactaagtcactccctgacttcctttttctcccctgacaactagacattctgagctcttccatttccctctataaggttagatcagcttgcataacaaaatggcatttgtctggtgtgcccttgacttgagctgcaacttctctcccctgcagtttatttattttattttgtttatttatttatttatttttttgagacggagtttcgctcttgttgcccaggctgggagtgcaatagcacgatctctgctcaccacaacctccgcctcccgggttccagcgattctcctgcctcagactccccagtagctgggattacaggcatgcaccaccacacccagctaatttttgtattttcactagagacagggtttcaccatgttggtcaggctggtctcgaactcctgacctcaggtgatccgcctgcctcgacctcccaaagtgctgggattacaggcatcaaccaccgcacccagcctgttgttttttatttatttatttatttatttatttatttatttatttatttattattttgaggcagagtctcgttgtgtcgcccagcctggcatgcagtggtacaatctcagttcactgcaacctccacctcctgggttcaagcgattctcctgcctcagcctcccaagtcactgggattgtaggcacccgccaaccatgcccagctaatttttgtatatttagtagagacagggtttcaccatgttggccaggctggtcttgaactcctcacctcaggcagtctgcccacctcagcctcccaaagtgttgagattacaggcgtgagccaccagcctcctgcagtttatagacctggttggttggttccttcactcccaaggctgaaggaatttggatttatgtgaaggaggtctggaagtcgttttctttttttttttttgctatgatactactttattaggcaaaaccacatactacaaaaatgctggaagtcattttctctgtcctttcccttactccctggatagttgaaaataaaaaaataaggggggaggtgcacgcagggctagttgaattgtccccagattctaccctcagagggcactggcacttactgagccgtggatcctctgaatcaccctgcatgacccagagctgtgtcctgacggcgtctccttcttttgcaggtggtggagtttgacaccccatcggtccttctgtccaacgacagttcccgattctatgccatgtttgctgctgcagagaacaaggtcgctgtcaagggctgactcctccctgttgacgaagtctcttttctttagagcattgccattccctgcctggggcgggcccctcatcgcgtcctcctaccgaaaccttgcctttctcgattttatctttcgcacagcagttccggattggcttgtgtgtttcacttttagggagagtcatattttgattattgtatttattccatattcatgtaaacaaaatttagtttttgttcttaattgcactctaaaaggttcagggaaccgttattataattgtatcagaggcctataatgaagctttatacgtgtagctatatctatatataattctgtacatagcctatatttacagtgaaaatgtaagctgtttattttatattaaaataagcactgtgctaataacagtgcatattcctttctatcatttttgtacagtttgctgtactagagatctggttttgctattagactgtaggaagagtagcatttcattcttctctagctggtggtttcacggtgccaggttttctgggtgtccaaaggaagacgtgtggcaatagtgggccctccgacagccccctctgccgcctccccacggccgctccaggggtggctggagacgggtgggcggctggagaccatgcagagcgccgtgagttctcagggctcctgccttctgtcctggtgtcacttactgtttctgtcaggagagcagcggggcgaagcccaggccccttttcactccctccatcaagaatggggatcacagagacattcctccgagccggggagtttctttcctgccttcttctttttgctgttgtttctaaacaagaatcagtctatccacagagagtcccactgcctcaggttcctatggctggccactgcacagagctctccagctccaagacctgttggttccaagccctggagccaactgctgctttttgaggtggcactttttcatttgcctattcccacacctccacagttcagtggcagggctcaggatttcgtgggtctgttttcctttctcaccgcagtcgtcgcacagtctctctctctctctcccctcaaagtctgcaactttaagcagctcttgctaatcagtgtctcacactggcgtagaagtttttgtactgtaaagagacctacctcaggttgctggttgctgtgtggtttggtgtgttcccgcaaaccccctttgtgctgtggggctggtagctcaggtgggcgtggtcactgctgtcatcaattgaatggtcagcgttgcatgtcgtgaccaactagacattctgtcgccttagcatgtttgctgaacaccttgtggaagcaaaaatctgaaaatgtgaataaaattattttggattttgtaaaa

SEQ ID NO: 1120 - DNA, 84382 bp, Homo sapiens
gacggccgggccgggcggcggagctgcaagggacagaggcgcggcaggcgcgcggagccagcggagccagctgagcccgagcccagcccgcgcccgcgccgccatgcccctggccttctgcggcagcgagaaccactcggccgcctaccgggtggaccagggggtcctcaacaacggctgctttgtggacgcgctcaacgtggtgccgcacgtcttcctactcttcatcaccttccccatcctcttcattggtgagtgcgcgcagcgagccgcggaggaggggacgggagagcagggagggaggaggaggcgctgcgcgccgcaccgctcggcgtccccttccggcccgcgaccgccgtccgcctcgttcccggggtcccctgccctgtgtcctgcccgccggtccccgcactcgcacaccagctcatcccttcactcccccggtgcccccgatcccgcgccaaacacagcggacgtttgtgacccatgggatcaccaagttttgcttctgcagggccaagagctgggatggggaaaagggaaagaggaggtctcagcacgcagtgggaaactggagaggggtcgggcctcaccctccgtggcgcagcttagggagccgggtcacccctcccgcaaggcagcctccctgtcagccgcagctgggcctagggaagagggaagcctgtgctttggagtctgggatggaggcccagctaacccctatgctttcaccgggctgagccgcgcagtggtccgtgatctctgacagtcccaggcccgcgccctgggcgaggagaggcgagagctagggacttggattcccttcccccgccaccccacccgggcatgtgtctccagagcgcaacttctcaggctctgcgcaaagtagctccgactcgccgacgcagcgaccccggcgcccttgcttgcaaagttgggcgccacggccgggacaatcgtgcgtgcctctccactgaggtcccccccatctctctccaagaccttgactcttccagaccagtcaagtctatcaactcatagggtgtcccctgcatccccaaaacgtgttcattcactttaagaaaacaagcaaatcttaaaattcatatacagctttggggaagaaaggaaagattgtcacaaaattagatttacaagaggttgctgcagaagcagagttgctagttattaacaaagacagttagatagaaatagaaataaaacatacaaaatatgtgctcatatgtgcatcaaaaatcaaaaaagaacagcatttacacttctgttctcagccaaacggtttattaacctgatgacttgtcacacaagaagttagtatgtataatggggtaccttggcagggcacagtggcttacatctgtaatctcagcattttggtgggctgtgacaggaagactgcttgagtccaggagttcgagaccagcctgggcaacatagtgagaccccccccgccctttctacaaaaaattaaaaattagctgagcatggtgatgtgcgcctgtagtcccagctactcaggaggctgaggcgggaggatcacttgagcctaggagatcaaggctgtagtgagccgtgatcgtggcactgcactccagcagaggcaacagagcaagaccctgtctcagtaaaaaggtgtggtgggggaggtaccagcataggaccaggctgaatgagttggacgtttagtttgtgtgtaccagccttggggatcctcatgtgtaggtgtcaccctcaccatggacccaatgcccaagcacctttctggggttcatgcaccctcttcctcctccaagtgggcaggcatcctgcctctgactgtctctccctgcaggatggggaagtcagagctccaaggtgcacatccaccacagcacatggcttcatttccctgggcacaacctgcggtggatcctgaccttcatgctgctcttcgtcctggtgtgtgagattgcagagggcatcctgtctgatgggtgagtgactgtctgaggactcaggaaagtgaatctgctccagggtacttcctgaaaggcccaaggagatcctagctcacctatattccacaagcccatgtcttttgttactacatccagcagctcagtgtcttctatgtgccaacctctctgagctgggcactggacgcaagtgagtcccaggccctgccatcagtccaggagagcagagggaacacggacctgcatgccaagtcccagtgaaataatgctagagcctattagaatgccacaactccagtgaaaaatgtctggcctcttctacaacctgccggagttaccttcttggaaaaaaaaaaaaatctaaccatgccacccactcttgcataagacctttccttggttctcagctgttttgaagatgtggtctcagatcctcagcccaccattcaaggtcttcacagtcagccccacctatctctggcctcattccccatgcccaccttccgtttgggcctcacagcacactcctcacacctctgctacagcacagatcacactgtatgttaaagtttatgtctatttgcaaaactgtcttcagagtcagaaaggcctaagagttagaatctgagtcttgttcatctttgtgttcacagtgcaaggcatgtgataaacataaacattattcagtccataaacatttattgggtccttaggagaatgaatgaaaccatgttacaaataagtactctgggaggtgagaggaaggcagaattgggcaagctccatggttgagagggctttggagcggagtctggaagggtgactaggcttcagacacacagaggaggaaggagagagagaactggtggtgcctgagggaagggaaaaggcaccaaagagaaaagcaggtagggctagggagcagcgcaggggctggagcattaaacacaggctggggagcgatggaggctgaggctgggaacccaggttggggcatctcaggaggactgtgaatcccagcctgcatgtttgggtcggatttggtcagcagtttggaacagaagagagatgtcatcagcataacacttttaggtgggaacctgaggtgttcagcgcaggctggaggcagggagaatctagaggtataatagaagcaggacttagcattgactgcagtagtctaggtgagcaataactgcagacagaaatggtgtgtcagcagtcagggacagaagaggagcgggagcagccatctcactaaggaagaatccagtaaccagcaaggatgagagactgccaggagagggagtggtggaggagagggatatttggcttgagtatctgaggtccagcgccccctgagctggaatcagattatacccagactgcactcctgcagtgctgcctggctcctgtagttggatggcaggggataggctccctcatcctccctcccgttccccaccttcccttccccaatgtccctgcatcctggcttcagcagtgatctctaaaatacctgcttgacttggaggcagcagctctgcctgcttattaaagtccctagaccagcaagaagaccagaaggcatactgctacacaagcacgtgacaagtccgcctccacccccacccctacaccccttccaaagtagcacaaatgccacagtgagccctcagatgggaaatactcaccagatggtgacagagaaagacacctccgcccttggagaaggaagacctgggtcttcagtgagcactgctgctgtgtaccagctatgggactttgcacaagtcattcaggctttctgggcctcataagcatttataaacatacgataaaacattttagttgccaacttaaaaatgtgtgagaaagtataaggtgtttcaaaattatttcaaggagtaaagaggcaagagttttgaagatccctgggcagggtgttggctgttcccagtgtggccattcatgactgctctctggccttatgaaacaagcatcatagtccctggcttgcctgcttcatggggctgtggagggtgaaattcgagcatggacagggtgcagagcccggagtggcagagcactgggtagactgtgtattcccagaatgtgggaaactggaatgaatcggtccagggatgccctcctgctggctgtcagcagcccctcctgtgtgtggctgtactgcttcagctcagtgcaaagggccatctcctccccagggcacagatcagctcaagctgagtaattgtcatctggtctttgtgagctcctacccccaggcctgagtgaggggcaggaaaagagcagacaggagaagtcacagacccttgtgatacctccagtctaatccagcctgggttttcagagctgtctggaaatttagggggcaggtgggagggggctgattaaggcagccctgatttgatttagagtgagcctcatttagtgactaattaagccatcttaaacctgtagggcttcccctcttcctttgggtattatttctttctgtgatgttctgaattcagaacaatcaaaacagtataagttagtgaagaagatattttttaataactacaatattttcccagaccaccatacactggataaagcctgtatataaaactttacctaatttcttaactaattgaatgtgtattatttaacaaagcagctaaaaactattctatgaagccatgtcatgaaatatttagttcaattatggttaatcctcatcttatttcgtcttataaaattttaacatttctacctcctattgcaaaaaaaagcatttatatcagcatataataaaacatgtctagatgtcagcttaaaaatgtgtgagagagtagagggtgtttcaaaattatttcaaggagtaaagaggcaagagttttgaagatccccaggaagggtgttggctgtgcccagtgttgccattcatgactgctctctggccttgtctgtcttgtaccttctatattagtttgaagaccttttttggagaatattcactaaagaatatcaatatctaccatttcattaaaaaagaaatgtggagtttgccttttcaagttggtttgatgcttattgatgttttcagggacccagcctcttcccatctttccataccatcctgtgtgtgtgtgtcagcctatcttccccatggtcacaaggtggctgcctagctccgggtattgcttagcatgagcagagagggcatgctgccgacatgcctctcctttatgacagagatcattctttctttgacatctcactggccagaatacgtggaccaacactggcaaaggagtatggaattgcatggctgcttaaaccaatcaccatccattccctggggctgggtatattgctgctggagcaaacctgtggtcctcctggcacagaataaggggaagatactctttggtggacagcccacattgcctctacacttgcacctcagtcccaccagacccactgaggtcacaggatagctctcctcatgtccttcctccttctctgttgaactcttatgtatccttcaaagtccagcctggtgccacctcctctgggaagctgtccttggttgcccaccccctcctttgtgctctctcagtctctgtccatcggcagtatcacttccctagcctgctgactccaacagttagctctgagcatggcagccccctccataccatcagcttctcaagggcagggacccttggcacactggatagaagtagcctggtgggcaacagcagcactgaggcagcaagctgtagcaggccatctgggaatggagtgggtaccacagggctggagcagaaagggcaggctgggcagatctgataaagtggctggaggccacatagcctgggcctttcgttccaggctgagcagagtgggttttgctgtctgcaggagggagctgtggaagggcatgatcacgaccaactaaggtgaccctcctcaccaggcccagggaagactgaggcctggaaggaggctctggctgcctctgggtcttacccccaggccacagtccacccacttagaggcctctgtgagttaaggtggagagactatgagctggtattgactgctccattccccatcccgagagaggagacaaaatcagtgaccttggaaatgcctcttcgtgcctcagtttcctcaccccataaaatgggagactaagagtacccactcgatggggtttaatgaagattaaatgggttaacatatatcgcatgcttagaacagtgcctggcacagagtaaatgctccataaatactgactctcatcagtttgttatcacagcctctggggagggcgccagtgctgacttatgctgttcgtgttaaatggggctgtcactgggtgagttgtggcatacaggcccctgcactgttcaagagaccccagcaacccttgtgcttagggctcagcacatagtaaggcctccagatcatatacccagctctactccatgtactggcagctctgcccagcccataccccaaatacgcccattaactaaagggccctgcagcctataaagtgatgctataaaggttcagtgttcagcctttgaaattcaaggcctgggctgctctattgcagtacttagcatgtccccatcctgtctgtttctctctcccatctcagggtgaccgaatcccaccatctgcacctgtacatgccagccgggatggcgttcatggctgctgtcacctccgtggtctactatcacaacatcgagacttccaacttccccaagctgctaattggtaggtgaggtgtaggagggaggggcagtaccttcattcatttcttcagataatgtttactgaggactcattatgtgccagctattgctctaaacagtagagatttggaatagaaaaagaaaaaaatccctgccttcatggagcttacagtctggtgaaggaggatagacaggcaaagacagtgaataaacaagcaaacaaataggtggtggggatgctatgaagaaaatcaagctgagtaaggggtaggggcaatgacaatgttgctatctacacaggatggtcagggaagggctgtggtaactgtgggcatgcagatatttgggggaaggtattccctgcaaggggagtgacaagtgcaaagtcctctgatagggatagatttggcaaagatgtcactgtgggcaaagccaaatgagcaaggggaagagtgggaggtgagggcaggcgtcaggagaggagcgagcaagagtcccaggctctgggcctgagagcctgggtgaactgtggcatcaataactgatgtgacagaggagggggaggtgggctgtggtggggataaagttttctactgggggcatatcgagtttgagatgtcacagagacagccaactcaagtgtcaagttgggctttcatggggaggtcaggacaggagctacactttcaggaggtgggccttgtagatgacatctaaagcttgagcctggggctggctgccgtggctcacacctgtaaccccagcactttgggaggccgaggtgggcggatcacccgaggtcaggagtttgagaccagcctgaccaacatggagaaacccccacctctactaaaaatagaaaaattagctgggcatggtggcacgcatcggtggtcccaggtactcaggaggctgaggcagtcaaatctcttgaacccaggaggtggagattgtagtgagctgagatcgcgccactgcagtccagcctgggtgacagagcaagactccatctagaaggaaggaaggaaggaaggaaggagggagggagggaagggagggagggaggagggagggagaagaaagcttgagcctggatgaggtcacctggggagagaagagaaaggctctgggaccagagcttgaggtttgctaacatttagagagactcgggaaggactgcccacttagagcttctgagatgttaaatactgcaggactggggtcccaggcagaagcaacaggatgatggttggtgtttactgagcatgtgccatggggcaggctccatgccatgttccttacattcattgtcccacaggctaattcccccagcctccttattggtattgttaatatccccattttccagtgtggaccctgaaactgagaggttaaaaataataacagtaaatactcactttgtacttactgtatgccaggccccatcctacctatgtgatatattaattcatttaatccttgcaacaactctatgaggtaggtaccattattattttccctttacatatcagaaaactgaggctcagaggttaaataactggcactagtctagctcgtcaaggggcacagccgggagtctagcatctgtgcaatctcctaatcatttctgagactgcgtgtctaagggccctcagacttcgtccttggggtaaaggtatcaatccgcaggtctgcctctgtgttggggttcagcctgtgtgtctaaggctggggctgtacatctggcagttagactttgttcacactatgtccttaagtcagactgatttttaggtatcacagcatcgaattgacatttggagtctggcacactctgtgctaagccagtgacatcatggtgttgtcagggagtacagggtgtttcttgcactagtcacaggtctgcctttctgtagaaggtgggatctgagctccattaggattatccaggtgatccccctacccctagcccaggggcccccacatgagtatgaatgggagctgggggaagcaggttgagaggggagatgttaaatacaggcttcagagagccaccctgcttccatttctgaagtagctccttgtctgtagagaacccttcattaaccagggcctggctgaccagtgtcctctggaaacaccctgtctggacatctgaggagttcattttctcattctccagcaaacacataatgttctctctttaaagcacaagttatcacccgtggatggatttgtccttttctaaggaacaaagactaactccctccattccccttgttggagttatctccccttgaaaggacactccacagagccagaaattctagaacagggaaaagtggaggggacgtgcctgtgaactgcagggacagaaggaaatgggtattgggagaatggccagccctccaaggggctgatgtctggcctgggtatggagtcccacagaaaggggacctgtgatgcagcttacattgtcccgtgagggaaccatgatcctggaacccagatgaggccaaggaaatgttctctgaaaaagtcatatttgagctgagaactgaaggaactaactgggagaagggaggaaagagtgcttcaggcagaggaaacagcatgtgcaaaggccccaaggcagaaggaacaaaacacattagaaaattcagaagaagaagagtggcgtgggtgcaaagtggaggggagctggactttgggttttgtttgcttgtgcccaggctggagtgcagtggcaccaccttgggtcactacaacctccgcttcctgggttcaagcggattcttgtgcctcagcctgctgagtagctgggaatacaggcgtgtaccaccacactcagataattttttgtatttttagaagagttgggatttcaccctgttgaccatgctggtcttgaactcctggccttaagtgatcaggtctcaacttcccaaagtgttgggattacagccgtgagccaccgcacccacctggaaggtcataccacagatgtttgcctttatcccaacagcaatgggaagttgtgtgtgtgtgtgtgtgtgtgtgtgtgtgtgtgtgtgtgtgtggtttaacatgtttaacataaaatttatcatcttaactgtttttaagtatagtgttctgtggcattaagtatattcacagccgggcatggtggctcatgcctgtaatcccagcaccttggcaggccaaggcaggtgaattgcttgagctcagaagttcgagaccagcctggccaacatgccaaaaccccgtctctacaaaaaacataaaaattagctgggcgtggtaatgtacacctgtagttccagctacttgggaggctgaggtgggagtatcatgggaggctgaggagagaggatcagttgagcctggaaagtggaggctacagtgagccaagattgtgccactgcactccagccaagattgtgccactgcactccagcctggacaacagagtgagaccctgtctcaaaaaaagaaaaaaaaagtatattcacagtgctgtgtagccatcaccactatccatctccagaactttttcatcttcccaggttgaaactctgtactcattaaatgataactccccatttctccctccttacagcccctgacgaccaccattctactttctatctatgaatttgagcactctaggtacctcatctaagcggcatcatgcactgtctttttttttttttttttttttgagatggagtcttgctctgttgcccaggttggagtgcagtggtgcaatctcggctcaccgcaacctctgcttctctggttcaagcgattctcctgcctcagcctcctgagtaactgggactataggtacctgccaccacgcctggctaatttttgtatttttagtagagacggggtttcaccatattggctaggctggtctcaaactcctgatcttgtgatctgcccacctcggcctcccaaagtgctcggattacaggcgagagccaccttgcctggcctatttgtctttttatgacttgcttatttcactgagcataatgtcctcaaggttcatccatgttgtagcatgtattgaaatttccttcctttttaaggctaatattctactgtatggatatgccacattttgtttatctattcgtctgtcagtgggttgcttccacctcttgactcttgtaaatagcactgctatgaacatgggtgcattgaggggttttcgacataatcataataattgctttatggagaccagcttggaggagaacaagatggggaggaagtgtggaaaccaatgagaaggctctcagggtatagcgggaatacagaggacgcatgatgatgcctggacttaggtggtaccacagggatggagagaagtagatagagtcaagctatttaggacgtgaaatagacagcatttgttaatgggagaggtgtggggcgagggagaagaatagagggagaaggaggagtaatgggagctcaccagcagcccccatgttatgcctctttccttccttttccctcttctctcatcaggcattcagcttttgctgagtacttctgtgtctgacaacaggctgagcactcagcactgcaggacaggactatgcaaaaaacctctgggcctagtcctgggtgcactgctaattccctgtgtgaccttgcacaagacatccaagctctctgagcctcggattccccacctgggcaggaagagtaagtccctgcctaagtcatagggttgtaatgaagagcaaagcagaccatatctgttaagtgttagggacaagacaagcatgaggcatattttcaagtctcggctcctgtaggcagctctcactaagggctaaagggcttctgatgcctgggatagaatctgtccggcagagtggagtggaggcagggggacagccttcagctgtggaattcctccagtcctagagaccagcctgagctgggggacattattccagtcctgaggcatgagagcagaaggccgatgcttctgccctccatcctaatgtcctcctgcagggacccaaggtggatggcatcgatccccccgggtgagctcagccctgggcgcatggtggggcccaacatctcaacctgtttcctaaccctgagccaggcaggacagatcccagatttgtgcccaagagatgctctggcatccatgcccaggcccacatagggatagagggcagggtgaaagtctctctccctcactcgggtcctctggagaggggctctgtgtcatgaagctgaccttatccgcatctggtctaggagggaggagggaaggagctgccagtgctaaaatctcccccaccctcaaagggggacttcacaggttattgctggttttggttgttggaagctgacagtgatttattggcagattgaagtgagtgtgtgtgcgagaatttaggatagaatctactgatagcttctgaggtttaccttccccaggtcttaaatctggagataataaaaatataacagctaatgtccaaagagcacccgctgcgtgtgaggctcactgcactaaatgctttccatatgtttctcacaagaaccttctaggtagcactattatgattcccacttaatggatgaggaaactaagctctagaaggctaagtgactaatccaaggtcacacagctattatgtcacaggctctgagcccaggtgtatctggctgcggagccaccaccactaacccctgtataacgctgcctcacagaactgtggctggctctttccgtatcccccatgcccctgctccatcatcatgctgtggtgggctctgaactgtgaggacagggatccaggctttcaccctctctctgtccctagctgccagtgcacttgggcaaggtcacatcctatttctgggcctcagtttcctcatctgtaaaatgaaaggctggattgaatgacctttaagatttccctcacttggaaattccacaagtaagtcattatagcatggagcttgcatgcatgggctccagcgtcaggccagcccagctctgccagttaatgggtgtgtggccttggatctgttacctaacctttctgagcctcatttcctttgtctgagaaattgggggtgacggcagtgtactttctttgaaaagttatggtgaggaatagataagatcatgtgtttaaagtgcttacttggcacagtgcctgtaacttagttaaattcaataaataaatttcccattcttcccatgatcatttatttttaagggacatttgtctgaccagtttgatttatgagattattggtgtttttcatgaatgttaagacgtacgtgcgtcatcttagagtcatgtactctgatatattcacacgtgcacatccacttactcggaaatgtacacacccaggcacgcttattctgtctccttctctgccacatacttgcacacattatgtgagtgtacacacatgatgcacacacgtctctgcgatcttccatctctcctcggcagccctgctggtgtattggaccctggccttcatcaccaagaccatcaagtttgtcaagttcttggaccacgccatcggcttctcgcagctacgcttctgcctcacagggctgctggtgatcctctatgggatgctgctcctcgtggaggtcaatgtcatcagggtgagggtaagcaggccacctgggccagggtggggtgggaagcagaggctctggcctctgtcctgccctgggttcaggcccccaccctgcttctcagccaaactgagaagggatcagcttgttttacccgcccgtgtaaaggggagtggggccgtggcggaaatttcaggatagacactgcatctggcccacgtgtgctctaccccagggtcccagagggagaggggggtgatgggtgtgttcgctgaggttggcggatgactttccgtagaaagggaagataagcatcaggcactggcctctcctactttctttcttcgggggtgggggactttgctttaatgtattcatatcgtcacgctggtaaatgaatgagtaagtgttttgttttcctttctgtttgctcccgcctccctctctcttcctcaccccagactccaaccttccccttcccctgcccctacctccccaggcagcccagactaatgaactcgtttgtctttcccatgctttgtttttattagtataataccatatgtgtctgtctaaataaatacctattcaggttttttcctctcaacacaagtgaatatgtaggtttcccccacggtatttatcttgtaagaatgggatcatattatgcagttttctgcactgtgcttttctcacccaacaaatatctcttgggactccctccaagccatctgatatggctaattccgttttcttaatggctgcataatattccatcgtatggatgagccataatgtgttcagctatttctctatggatgggcatttactttgttgccaagttcttgccttcatgaataatggtgtgttgaacatacttatatatttatgtattgctgcttttatttctatgggagagagtccaaggaatggcgttgctgggtcaaagggtctgtgtattttaaattttgatcagtgttacatattgccttccagaaagactgtaatctgccagcaatgagtgagaaaaccctttccctgccttccaaccagcagtgagggctacagccctttcgaacttggactgcctgcatttctctgactcttctgcttttagttggtgatctgcagggcacaaagctccttatgtgtccccccatccagtgaccctcacaggaaccctgtgatgcaagcaccatcccctttatagatgaggaaacattttagatgaggcttgtccaaaaacaccttgctagtaagtggaggaggcaggattcaaaaccaggtctgcatgacttggagttctgtgaactgtatatgaaacatggtggtatccttagatctgtggagaagatagcatatgagagattcctgctcctccccaacccaacctaaacccaacccagcctagccatggggggttcaaagtcgacctcaatgagcagttacaaagtcaggatgccctgacattggtggccaagaagtgttggggaatccttttcctggtaataattacaggcgaaagatggccccatctgttagagatcaagtgtggaatatcacaaccccagatccttgctggggcaaggtagggagtggtgagaagttggacttacccatcccccatggcccatgtgccccacagagatacatcttcttcaagacaccgagggaggtgaagcctcccgaggacctgcaagacctgggggtacgcttcctgcagcccttcgtgaatctgctgtccaaaggcacctactggtggatgaacgccttcatcaagactgcccacaagaagcccatcgacttgcgagccatcgggaagctgcccatcgccatgagggccctcaccaactaccaacggctctgcgaggcctttgacgcccaggtggtcagtgggggcacagccacaccatctattcactgccttctggtttagggtcacagagagggacctcaaagggcattaggtcaaaatcctggtgggacaagaggggaaactgaggctggtgaggggaagaagcttgccttaagtcacacagtgaaccagggacaggtgcagggctgaggattcataggacaggcacagttggaatggcccttaccgtttaggtcgtctagtccaaagtccttatccagatggggaaactgaggctctgagaagggaagtgaccccactggactctcacatccctgtgctctttcctctgcagcttactgactataaaggttggagtgttcacttgatttggagcaggggtgttagtggcctgatccttatggtaactctatgagttgagccagacaggaatctccccatatcactgaggagcaaattgaggccctgagaaaggctgtgacctgcccagagctggccacagctggcaggcggcagaggcagtctcctggctcccagtccagtgctccttcacttcctctgccctcgcaccagggcagttgctgaggcagacacggtggcaggtggtaatgagtgagtgtggcacatggccacctcctcattccagtgctgtgctcatcacatagtccctgaccagctgtgtgaccttgagcaatcatctggccttagtttccccatctagaccatgttggtgttgatagggccctcccaactgtgcacttgctgattccatgatctcttcctggagttcacctatttgcagaggatgtgaccactgggtttccccagacaacaggagctaggggcatcctgggaggctaggcccagccgtgaattagccctcaggcactctgacctggccatggtctctctgggcagcggaaggacattcagggcactcaaggtgcccgggccatctggcaggcactcagccatgccttcgggaggcgcctggtcctcagcagcactttccgcatcttggccgacctgctgggcttcgccgggccactgtgcatctttgggatcgtggaccaccttgggaaggagaacgacgtcttccagcccaaggtaggcagccccaggggtagggtaaggcaccctctagatggttttcagttgtttctgagagtgcaacaggccaatgtgtgtgagccatggccacactggagtggctcctcacacatgcgcaaagcccatagcagtatccccaccacagaatactctacatctggtcaacagaaatgccagagggcgagcctatgccccaagggtatcctactctcctctcaccgtcactaccatagtacctctcccggtagttaggtcagtccgaaaactgcaggaagtgcttttgtttgtccagtgtctagagcttctgtgacttggatttgttggctttcagttcatgtcatcttagtaaactctttaaaagttttcaagatctgtcttcttcagtcctgtaaaggctggcacttgagctttctgcaggggcatcttgggagctactgtcagaggagagagaagtgggaaaccctcacgagtggagctttgtctctccccactccaaatttcattcaaagctgcccgtagttttattaatatgttggacttttccattaaaatttcttttttaagaaaagtttccatggcttaaaaaacactggagacttattagactagattatatccaatggccttggcagttgtaacgattctgcaaactgaaatttgttggagctagaaaacctttccccggggttatttgccctgcgtggggccgtagcatccacttcgggggctgggcagactgtgctctgttgtctgtttccttgcagccgtttaggtttaaatggccacaaaatgaaaactttttcacccctaataagtttcagagttttagtttccaagtgaggatgtcattataacattttaaccacagacagtctgaaaataatgcagagaatggggaattagggtttttaataatttatgacaccctttgcgtaacatttgttcatctcatgagctccaaaatcgcagccagcagttaatcctcaggaggtttatgttcatttttctggagacataattagtcagctgaacagttttggccacagatatgagatacgttgagtctgatttatgcagcaaactttcattgaacactgctgtgtgccaggcctgggttgggctgtgggaatatgaaagcaatagttatgatgaggatgattaacaatattaacagccacttactgaccacataatacatacctggctgtgtgcaggagttatccatgtgttatttaatccctaaaactatcctttggcgtgagtatattttgcaacatctttactgtggtatacctcaaatactgtacagtttatgagatgataggtattcttatccccattttacagatgagaaagttgaggctcagaaagtttaagtaattttccccagggtctctcagctagttaataacagaggcagaatttgaacacaagactcactccacagtctgggcatttacagccaggaagctaaattgactattattatcaagccatcacctctggctccaaggattatgaaatccaacagtgaggagagaaatcaaaataaaatacttttatgctatgtgttacatgtgactcttaggaggaatattcagggaattgtgggaaaagatagtgattaacttagccagtggtcatgaacagcttcatagaggaggggatgtttgaaaggggtcttgacggatgagtaggaatttgccaggctgccatgggaagatttcttgctcaaccaagaatgcaaggaccacttttgcttatttaaactttgatggcttttgaagccatatctggctttttgagcctctctactttacctggcccataaaagagaggggaagcggctgcttctcttgtctacaggagtgtcacctttggctctagcctgaccataggctaccccagaatacccccattggcgatcctgaagcagcatggagccagttgttaatatcagggggaaatggcacaggccagagcccttatcagagtgtccacaccacgctcttcttcctgtgtttcccaaaacccttgtgggattctgctaaggagagagctctgaggcaggacgtgccaaagagatggcgaaagcacttagaattttagttcatctgaacgttatcattgccgtttttttctctttgtttatacacaaaccctggggtttattaccgtctcattggaatgctcttgtcccagttacttagcacacaaatccctgagacagatggccctgcctcagtggcagtgggccttatcagatttaatattttttccctgcagcccaaacacaatcagaaaatttccgacacagaaacaagagttgaaagtaaatatagtctccagtgtccgcaacaaagaactctccatcatgtggttgcctgggatgtggcttaattctcatgtgggcttctgagctcagaaaatgggggaaagggatcatttactgagatcatttggttcatctcccagcccccaagccattctaatccagagagaaccgagtgctattctggtctttatgaatgacaaagaaggaagctccctagctacatgttgcagtgtttcacagtctgggagaggaagccgttttttctgcccagcctgaatccatcctgcagcagttggcacagcgaggcacctgtggtttattcatcatcactcttccttcctaagatactcagagttggcaagaaacatgtcatccttggtatccgcaaggacgaacatttctgatgtcctctttagttactgaaagtgtctgtgacttgccagatctttgatgctcctgtcaccccgctgccactccccagggaaagctgggacccaggttgggctctgcctatgatctatagctctttccagcctcctctccaacccaacccctactcccaatctgtcacctcccatggatgccactgatctggctgaaggacaagagaattagattcataatgagctgctggtgtctgaaacctgccagcactgccctgggctatcagttgagccaaaggaagaaggaacagtctgggtttgatcgaagggctaaagcttcaaacagcctctaagtctcagtaggaaaatgtgtaggtttgggagggtgtatgtgtttccgaatgagttcccctaagaactgcttatggttctatatgtgtgttctgtttgtccctgtgtcttttggtgtgtctttttctgcgtgtgtgtgtgcatgtgtgtgtgtctatgcccccgtttggattgccatatttgtggctatcattatgagtgacttaatgagtgtatatgcattggtgtttctgtgactttgtggttttgatgcatgggctggcctcttcataaccatgtccatgcagctggtctggcctagagtacctgccttcaattcactagctccttcttggccatcaagactctgctcaaatgtcacctgctccagggagccttcacctggttgaattagatgccccttatctgtgctcacataacatcctatcaaagcgccctgtttctttccctgacttgatcctctgtcccctattgcctgacctctgtgtgcccagcactcagcccactgcctgacacccaggagatgcacgggaaatggttctgcaaagaaggaataatgcagcaattactatatattgagtgcttacacttactgttttttcacatgcactgttacattgacttctcataacaactctctgaagtcccttcatagcctcaccttacagatgaggaaactgaagctaagagaggttgaggaacttacctaaggacacagtggctaatatatgatgagtcaggacctctaagtccaggctcttaaccaccgtgtcaaacagtcttgtatgaatgggtaggtgtgttggtctctgggtggccaaagataattttattctttacccagggcctcccggggctgggacctacggacaactcaccttttgacacctgccaaaataggaaacaagagtccaagtgatcccctctcctttaagcaccagagaacatgtgaaggggacctttccaatcatacctctggcctggcagagacaatggggctccaaactgtagagtcgggagtgctgggttttagtcctacctctgcagctaactcatttattctcctcagcagtcacattctgcaagcctcaaatgcaaaatgtgtaataacttctgtagaaagtacatgggggcatgaagatcattggcttgattgcttttaaaaaatcggtattgagcactactggggaaatccctggaaacaaacacaattcttccctgagagcttgtgaaaatgcaagactagggcctatgattttccaaagcattttcttccaccaagtgtcaggttgtaggtccttggtcttttctctcttgccttggtacctgcagggtgctgaccagtgctatcatatcccctccccgtttcctaggaccctcttctcggtagactccaacagggcctgccttccttgggcagcatggcaggcctcttggctagtctagtacccacttcttttttttttttttttttttttggatggagcctcactctgtctcccaggctggagtgcactggcgcaatcttagctcactgcaacctctgcctcctgggttcaagcaattctcctggcccagcctcccaagtagctgggattacaggcatgcatcaccatgtccagctatttttttgtatttttagtagaaacagggtttcagcatgttggccaggctggtctcaaactcccgacctcaggtgatctgcctacttcagcctcccaaaatgctggaattacaggcatgacccaccacgcctagtcaggtacccacttcttaactgaaacttagctattccaggttctatcccttttaaaccaactctttgaagagaggtctaataatgacccaatgacttatagctgcagtgagatttttattttaacaggtcacaaaattctcaatccacaaaagtagatttctgaccctaggttattttgttgggggcggagagaggaagtcaaaggttttgcagcctttagagctgcaaaaccagaatttgttgttttgttaaaaatgcacaaataccgacgagtatatttaagtaacacccatagtctaacgaacaaacatgatcagttggcttttccagccctcattctccagcctgtgtgttttctgctcattgtaacacagcgtgtgtgtggcattccatgtttctccagagctttcatgagaatcagtggtcttggatgcatagtgttcccatgagtaccttaattacctaaccattccctgtggttggaaatttatatgggtttttgcattctccttctgctctgaccccaaaataaatgtctgtgttcatacagctattaccttatgtgaaattattttctttgggataaattctcatgatgtgttgttgctttaaaatagtggactccagtctccagagctgcgtctctgcagaggacagtgggacagaagaatcccagggcatgttaaaaaggaccgggtcttcctaaacccacatgcctatatttctgacccagtaccagccaggggggcaagtttccatcccccacaagtcacaaacctgtaactgacactaggatgcttaaggtcaaaggcctggacgaggcctagacagtgggtctggggtagtgtttttgacatcactcaggttcatgttcacatgttgtccccttaccagcatgtgaccttgggccagccactaaccctactgaaactcctttttttcatgtatgaaatggggctaataatggtaccctcctcattagggtattgtgaggatagagttttgcacctgataaatattgtctcctgccccttcctcccctggaaattcaggtctctccctgcagcctaattttaaggcccatttttctgcttccagcccacccctgcccttctaccttcgacctcctccctctgcctctccctctggtgcactggcaaatgggacagagagcctcggtagggccttcctcttagagtcttgcacgcatccctcagtggtctccctgtggctgcttcctgctgccaccaacagatacagacccctgtcgcacagatcatggtagagacagtggtgagcaggaccagacagctccagggagcagtgagggctggcttagagaacctctgttaaactgagaggccaccatcaggaagctctgatccaagatccaggaatccctgactctagggaaaggcctccaatgagagcctgggccctctctgcctgattctgattgtggatgtgccctcaaactccttctcatcactttgttccatccctctttaccctgcagcagctcccacaccctgccaaacaggatgcacagtccagggcagtgtctgagaaagagcagagatctgtcttcatggaaatattgatgtggctctgctggggagcaatggatttatcaagatcaaagttttcctgggagttattgatgcttaatttggaaatagacacactgttgatccctggtatctttagcaacaaagttaaaatgtttgtttttcttcactggttgccatctgagatcttgccggaagtacacaagagaaccttaaatttaacaggaggccctgggagcccatgaggctggcgggcttgggtctgaaatcttttcagtctcttgtaagtgatgagctctcattctctcctgagagctctacggtgccatgttttccactggccttttctgctcagtaattgctacattacaggctgttggtaagttcggaacaagggagctgctgattccatttctgtagcagagaacatgcaccgtgagacttgttgtaccagttcaggttttaggtgctctatttattcttgccccattcagaatgctctcccctgggtctgtggccacaatgctaagagtcatatttatgggcctgcagttgtaattgggccccattctgttcccccaagtggaaagatgaacagggtgtaagcaaccttccctgtagttagaaaaacgtttagttggatttatcagtctgatttttcactcataaacaattgcacaagcctttgcaagcccagagggtcttgtaataatgatggccgtggtccattatggcacagtgatgtgttctacggtggtcattttgctggcaatgacagtcacctctgaacttctctttccaacagacacaatttctcggggtttactttgtctcatcccaagagttccttgccaatgcctacgtcttagctgtgcttctgttccttgccctcctactgcaaaggacatttctgcaagcatcctactatgtggccattgaaactggaattaacttgagaggagcaatacaggtacttggatgattattttttcactttgccataagaaccattattaggaataatgtccatgagtgttattcatcctcatggacactcaagaataattctgctgtaaatttattttttgttgcccattaacgatgttttaaaacagtaaccattgacaaggcagtgtgggatagtggaaaatatcttgggctgaacttgggagacagtgtagctctggctctggttctgccttggactgggtctgaaaatccagctgctcagcccttggcttgaaagtggtagacgtcactaattgatcacagcactctttctgaccaagggtaaatgcaaccttggaatcctctctaagtggctgttccagagttctgctaccagacagtcttctttgggtgtgaaaaaaggaatgtgcttgacatacaaggtctagatagcctctaagacagggtcccctctaagatggggtattggtccatggcctgttaggaactgagccacacatcaggaggtaagcagtgggagcaagcattactacctgagctctgcctcctgtcagatcagcggctacattagactctcataggagtgcgaaccctattgtgaactgtgcaggcaagggtctaggttgtgtgttccttatgagaatctaatgcctgatgatctgaagtggaacagtttcatcctgaaaccatccctctcccccaggtccatggaaaaattgtcttccacgaaaccagtccctggtgccaaaaaggttgaggaccactgctctaagttctatttgaacccttaagtcttgctcactaatgagagtgacctatttggtctgttgggtcacttaagtctaggctcttggtcctgccttctgtgatttccttcttagagtttctggaaagatgatcaaagccagggagtgttcagggcccctctgaagaaggtgatgatgagagttgtccaagtcccagggtcttcactaggattttggttcagctatcagactagagagacatcctgattgagagtagtttaaatgggatagaagtttgtttattcttcagatagagtcagggctgacacaggagctactcaatgatcagagacctggcttcttctgtcatgttgctctgccagccttcttttgtgacttttgtctccatagccatggtgggtattgaaactgccactatatttacatttaaactagccagaagaagggacaagaggagggaacgcattttccttttaaaatggtaatacctgatttgcacataccctctcgcatcccattggtgagaaagtggccaaatggccgtatctagagagtctagaaagagcttggtctttattcttgacagctatatatgcactgctagaaattctctgtgcaaagaggagaatgggcattgggaataactagatgcagctatgcctagtgatgtccatgaagttgtggtaaaatcctgaagctaccttgttctttggaaatgttcctcagaatcattaacattagtcatgtgggagacaggagaagaagctctgcagaaaagggaccgagaggacaaggatatagcttgggctggggacaatgtcagagtccaaactctggctatcttggaatagtctgtgtgaacggtgccctcccaagttgtgcagtgcacaacctgtgcagctatatatggcaaccctgcccatccccagtggtttctcactgggaaagcagagtatttcctcagggatgtcattatgtgacaatagtggaaaaagcccaggaaaatctaagaccttctaagactcatgggggcccagagctgggaggaaccaagctgttgctcagttcagaaaacttctctagaaatcccagcctctcctcacacccctccagtgacaggcagacttgcaccaccacaagcaacagccacttttgtggttgggcagttttgtaattaaatatactaatgtgtgtatgtcataaattacattttccaattatgccaaaagagccaaaaatggttttttaatggttagcatataatcgtttttatcaaattgcttgaatctttcatgttaataagagagattcattactatgccacaaaaagcaaatactggcattaattatagaaacaaattaggggggtggagcgcaatggctcatgactgtaatcccagcgctttgggaggctgaggcgggtggatcacaaggtcagaagtttgagaccagcctgaccaacatagtgaaaccccatctctactaaaaatacaaaaattagccaggcatgttggcgtgcacctgtagtcccagctactcaggaggctgaggcaggagaatcgcttgaacccagcaggtggaggttgcagtgagctgagatcgtgccactatactccagcttgggcgacagagtgagacttcatctcaaaaaaaaaaaaaaaaaaaaagtggctcatgcctgtaatcccagcactttgggaggccaaggcgggtggatcacaaggtcaggagatcgagaccatcctggctaacatggtgaaaccccgtctctactaaaaatacaaaaaaaaattagccaggcatggtggcgggtgcctgtagtcccagctactcgggaggctgaggcaggagaatggcgtgaacccaggaggaggagcttgcagtgagccgagatggcaccaccgcactccagcctgggcgacacagcaagactctgaaaaaaaaaaaaaggaaagaaagaaggaaaggaaaggaaagaaaggaaaggaaaggaaggaaagaaagaaagaaaggaaagagagagagagaaagaaagaaagaaagaaagaaagaaagaaagaaagaaagaaagaaagaaagaaagaaagaaagagaaagaaagaaagaaaaagaaaagaaaggagttagggagaaaaaaaccctttctttctttcttttggagatttccggaaaatgtacccttacggatgagagcctgtgtcttcatgggttagagaataaccacgctttgtgcataaaaagttattaagcacaattcctgaattatacataattactagctgtcagtcagttgtgcatttctgtgtatgctggtcttcacttaataagactttatttcacagatcacttggtgtccctacttcactgaaactaggtgattatcttttgaagtctcatttcacataacctaggaggtatatagatttctttaaaaatgtcattgccattattttaaaccttacccatggtatatataaacttacagaaagacagaataggttcattattttaaaccttgcccatggtgtatattagctcacagaaagacatagaataggttcctgccttaagaaaacctgacccacaaaaaagcctgggtttacacaaaagaggaattaagggcggggagcccaccttacaacagaatgaataatagaattttatccaagagcaggcatcctgaggacatttaagacccggatgcatttttccttgttcaagagcacacatccaaaaattgcagtctttctgcgagtcatgatcactctgcacataaagcgtttaggttcagagctcggggaggccattaccatggctgctctctgtctgccctgtgagggtccttggggtggctgcactctggggatggtgctggggctgactgactcacgcggtcgtgtaacacatcagaccttccaaagtcgaacccttgttttgtttcaaggctcaattatgacaggacttggtctcagagcagatcccctccctaggctggagaaggccactttaaaacagatggcctgccccacttcatcatttttatggctctgatctgtgttctccactggcctctggtaaatcaagaatacaagtggacatgaagatctgctttaaaaaataaagaacagaccgggtgcggtggctcatgcctgtaatctcagcatttggaggccgaggtggatggatctcctgaggtcaggagtttgagaccagcctggccaacatggcaaaaccccatctctgctaaaaatataaaaattagctgggcatggtaggcacgtgcctataattccagctactccggaggctgaggcatgagaattgcttgaacccggaaggtggaggctgcagtgagctgagatcatgccacttcactccagcctgggaagcagagcgagactctgtctctaaataaataagtaaatgaattaaattaaataaaaataaagaaccaattaagtcctgtctacaggaaaaggccttacttgctggagaagtagcttgctgtgctggagtagactagtaagttggaacggtgatacagtaccaccttacagagctgctctagggcaccatggggactgtctgagaagcccctggcacactgtaacaggtggcatctggtgtggtgatgatgatgagaatgatgatgaatgtgaaacactctgctctcatttctagaccaagatttacaataaaattatgcacctgtccacctccaacctgtccatgggagaaatgactgctggacagatctgtaatctggttgccatcgacaccaatcagctcatgtggtttttcttcttgtgcccaaacctctgggctatgccagtacaggtactagatgggctgaggggaagggaggggggcagcaggacacacaaccagaatctgctggtccatggccagtaactaggagcacaccgtcttccactccatgcttgcctgtacctttcacacacttggctataccacaggctgtacctctgggtccctcctgtcccatactctgcaagcactgaccatctctcttaatgaccagagaaggcagtatcattaagactttaaaaatggagccaactttataaactatagaaaaatcaagccaggttcaggggctcacacctgtaatcccagcactttgggaggctgaggcaggaagattacatgagcacaggagttcaagactggcctgggcaacacagtgagaccccttctatgcagaaaaaaaaaagaagaaagaaaagaaaaatcgtacatggaatgcccacagatcttaaaagctatgttgtagcaaaatatttaattacatcaaaaagtgttagtgatgtatttttaagcaaaaagagtaagttacaaatagtatatgttgtatgcttactactaaactggaatatatgttatgtatacatttgtacagattcacacatgaaaaagaattggaaaatcacatagtgggattataagtgatttttattttctttatgtgtttctaaattctctaataagcgtgtataagatttggaaatcaacaacatgatacttttagcctaggcaacaaagtgagaccctgtctgtacaaaaaattagctggaagtggtggctcacaactatagccccagctactcagaggctgaggtgggaagattacctaaagtccaggaggcagaggttgcagtgagctacaatcacaccactgcactccagcctgggcgatagagtgacaccttgtctcaaaaacaaacaaaacctggtgttttttagccagatgtggtggtgcgcccctttagtcccagctacctgggagtctgagatggaaggattgcttgaccccaggagttcaaggctgcagtgagcaatgatcacgcccctgcacttcagcctggacaacagagagactcctgtctcttaaaaaataaaaataaaaacgttaaaacatggtatttttttaaagcaagacaacctttggtgctggctcaggaagaggtacattaccccccaataatcagaggagaatcgtcagcatgattgatctgacctcgggcttcatgtgtcccatctcccacccggagctcttccaccacagagtctgatcctgtcctatgcctgggactaaatcttcaccctggtgttcaggccagaaaccgaaatcccagacccattcccagagggcgggaaggttccaccgggagagcttgatgtagcagaaagtgacttgggtgagacaggctgattcaaatacttaacctctctgagccttggtttctttatctatgaaatggggaggctgcccaccctctggagttgctatggcaattcagttagataatgtaagtaacacagcaggcagagtggcccccagagtcttcacttcgtaaatatcagatccctctaccttgcacatgtttggtatgagtgaggtgttaccaatccagaatccattgcttcttgggataaagattccataaaccttcatctccagtgatttgtattggtcctccttacttgtaaagcttagagtttaaaaatattaaaagaaaaaaaggggagaggctcccacagggacacagctagacaagatgagatgcagggaatctgatgttcttttttatgggaacagtcatatatgccatcccccattaccacctacccatgcccagactgcccccgctccattctgccaagacagatcaatgactataaaagctacaaaagggcctggagatctcatctagtttagttaccaaccaaccttttatgcacaagactttctaagctgggtgtggtggctcatgcctgtagtctcagccactcaaaaggctgaggtaggaggatggcttgagcccaagagttcgagtccagcctgggcaacatagagagacctcatctctaacacaattttttttttgaaacatgaaaaatgaagatttctgaccatgcttctctcattagttaacactttgggctgtgagggtctgatgcagagagacacagcctgggaggatcctaacatgtacacagcattcaaaaggctacaagacactttctgttgtgtccccttgaacaagcagtttgtaagattttgttggccaggcatggtggctcgctcctgtaatcccagcactttgggaggctgaggctgatggttcacctgaggtcaggagttcgagaccagcctgaccaatatggtgaaaccccgtctctactaaaaatacaaaaattagccgggcatgatggcgtgtgcctgtagtctcagctactccggaggctgagacaggagaattgcttgagcccaggaggcggagactgtggtgagctgagatcgtgtcactgcgttccagcctgggtaacagagcgagactcggtctaaaaaaaaaaaaaaaaaagaaatcaggttttgtctactaaacctgctgcacggttaccgttactagtactcacagggtttgttgcacatgcatcgttgctaatagtgctaactaatattaacagcccttgccctatgcctggccctgtcccagcccccctcccttgtataatttaacccttgcactgggggtagagattttcatatctactgatttcttacctttgctcatttatcatggagtgtcctttggttttctgtgtttgtatatacctttaccacttatagatttgaccagcactcaagaaccagtgttactcctgggagttaatacaatcccagccccatggcaaagaaactcatgtggttaggattctgtgtgcagcctggttagccacagggcacgtaaggctttttataatattgacatgagtgcagaagccccattcccgtgtaagccctgagggctcttgtttcataatctttttttggtcacatgcacacagctttattgagatataacccactcatttaaagcatacaaatcagtgggttttagtgtcctatattcacagagctgtgcagccatcatcacaaatgtggaagttttcatttccccaaaaagaaacccgtacccattggcagtcactcctcatcttcgcccccagcccttggccaccgtttatctacacatacttttgaaaggctagtgaaactttctcagaaaaataaatgcttgctcaaacatttgggctataatttcaggggcttcatgggtgcccccctgacatttatcaagaacaccaggttaaggaatttagctataatggaggcctctgtgtttcccagtctcctgggtatcagaggcccagagagggcaggtgccttaccctgggccacgcagtgaaccagtggcagcaccatactcacacatctcctttctgcggttccccagtgacagagttctcaggaagctttttcatttattttctgagaggagggtaggccatcttgtattgatctccaactatatgccagccacaattctaggtgcttatcataaaggttcatttaatcttcacaatagtcctgcagagtggacagagtccttcagagtgggcattataatcaccattttaaagatggagaagctgaaaaccagagaggttaagtaactcacccaagactgcacagcaaaaggctggggctttgaaactcagggccacagactccaaagactatgtcctccccactatgctagatttttttcctaacctgtgaataggagacaaaatagtccttttatttctcacagttgctttgcacactcagaatccatgatttcttctgcatgagggccattcagacctgtgcagaagagagtaatggaccaaggagtcttgggagcacctaggaggaggggatgggggagcatgaggaggagccagggaacagcagcagctgcagcaccagctcccaccccagcctctgccagtctcttggaggtggtgtgggtgcagacaccggctcacaaggtgccctgttagtgagcttggggtgccatgggagccttcttgttgtcaggcccaacccaagctggctgaagaacaccctgatggcctccatttgagcacaactaatgaaggactggatgccagagataagtccaggagggtgatgctgcagggcaggccagggaagagggtacttcatctctatcatggtcctctgcccatccatgccagcatctaacacctgttaaacactgggaggcaggtggtgaaggggccacttcccagcctctaagatacctcctaagccaggaggcattctgtgattaaattacagggcctcccacttactcctttatccttgaggcggtgctggaagcttaatgccaatctggtgtagggctctgggactacaggaccaaggcaagcagtcctttctctctctctctctctttttagctaaggaagccagcacatctgttctttgagaaaaagccctgtatttagaggtgtctgcctttgaaggcaacctgagaaactgtcatcttggcgctttggggactggccatttacacttctcataaatattcagaagtaggcagtcatttacataaagctaaatgcagaaggaattctcttttcagggaatacctggcagattcattaaaaaaattaaagaaaccaagagcataagaatgaaaagcgaattctcggaccccaggctggttttttctggcatgggtgcagtaactttgcctctttgctcagttatcacttttttccaatgacagtaaccataagccctgagagccagcaaatagaacaaaaggtgctgtcacaaacattgtgcaatctcatctctgagatttccatctggaaaatagactggagagagttaaggcttcaaccagccttgcagataaatgcagttagttaccagcccagcaaccctctgcttgcatgagagcccattatgctaacctccttttgaaattgctttgtttctcctccttccctgcactccactccccaagataatttggaaacctgggcaccaaggcttgtcccactctaggggactggggaaacagggattttgccagcacctcctggcagggcaaccatcaggtcaaagggacctgacccatgaccccttcctcagatcattgtgggtgtgattctcctctactacatactcggagtcagtgccttaattggagcagctgtcatcattctactggctcctgtccagtacttcgtggccaccaagctgtctcaggcccagcggagcacactggtgagtgcccaaaggtgtgtgtgttttgtccctcttcccctccttccctcgacagcagcaggtctcctcccacacacccacactgtcattgactttgactttgactttgagtaggccacttcacctgtccaggcctcagcttctttgtctgggaaatggagtcaatgggggaggaggctgcctcccggtgaggacaggaggcgggcatggcagtgacagtattgacactcaggccttcctctcgggtgggagacggagcagaagcctctcccctctgactcggggacccctgcaggagtattccaatgagcggctgaagcagaccaacgagatgctccgcggcatcaagctgctgaagctgtacgcctgggagaacatcttccgcacgcgggtggagacgacccgcaggaaggagatgaccagcctcagggcctttgccatctatacctccatctccagtgagttcaccccacacagccagccctgggtgctgctgcgtacatgcaaggagagggtgtcagagctcgggtaagagggggtgcagggacagaagcaggaggccttgagattatccgactcagtaggggagcctcaaactggctctgatagctaagctcccagaaatcaaagtactcttcattcatttatccaacaaacatgcatggaaagcctgctatgtgctggacactgtgctggccctcaggatacagtgatgaggaagagagatgaagtttcattcctcatggaactgatatgttattgacagacagcagcaagtaagtaaatgaccacagttttgaactctcctaagaatgaagactttttagtaagtcagactgagctgtcattgccctggggaagctacaagaaagcttccatccacttggggctatgcaaaagaaaaagactagttatccttaaatatcagaagcccaggctgaaggtactcacaggtgtagggactgaatttatattaaccaagtagtttgggaaccccaagccaaggaagaagaaaaagaccaaaactggtaaaagtcctagagtcccatatacttgaaaccattttactgagaatgtaaaacttttttttctttttttgagatggagtctcgctctgtcacccaggctggagtgcagtggcaaaatctcggctcactgcaacctccacatcccaggttcaagtgattctcctgcctcagcctcccatgtagctgggactacaggcacacaccaccacacccgactaatttttgtatttttagtagagacagagtttcaccatattggccaggctagtcttgaactcctgacctcgtgatccacccgcctcagcctcccaaagtgctggaattacatgcatgagccactgtgcccagcccaaaagattttttagaaattgaaattttagttatggaaattaattcagtgaacaatggtcccctggtcagagtgagggcttacggaggtcaggtgatccatggagtcctggcccaagtttatctcacagttggtctcgtggctccgtggacccatcccatggtggttacttcccaagtgcataattgggatgtagatatttagcaaccagctgacttcacactagttccctgacctgtccagtctaagagtcattatggccaagtggaagcccctggaaagaagaaaacaaaaaagaaaccaaaacttactcagtgcacaggttacatgaatgagtatagctgaagagagaatttttgaattagaagacagatgagtggggattacacagaacgtggcaaggagagtaagttggtagaaccattttacagatgggaaattaaggccagaggggagtgtgttcctgagatccctcctgaggttagtagcatggctcggactagatcctccaaagtctcttaactcctggtctcaggctattttccacaaagagctgggggcctctgtggggtgaagaagacttaggacaccatggggcaccattatgaggccatttcctcctaggagaaaaaaaatctctgggctctgaaaggagtagaattagggtaggaaattaagagaggctaccgaccacctcctccaactaaaattggttcttttggtgccaggaagagacacacctggtgggggagggaaggtggtaatggagggggtgctggtagtgtctcccagatagacccatccaacaagtctcatggagaatgagacggtcactcaggtcatctgcgtattcttggcattcttgctgcctagagagagagtctgatggagctaggtggccaccaagctgtcccactccccaagacagtttggaaacatgggcaccaaggcatgtccctgtctaggggactggggaaatatcccatagcagtgttctcacagtatggggctggccatgaataccccaggagtccaacctccctttgtccagctagaccatggtgtcctatgcctcaggcagggaatgtggtccagtcatcagtggctgggccgtctgccatacatggtgcaagccatggcgttttatgcagaaagtcctgctagcatttgattttctcagaatggagctgtgagcatggcaggcaaccactgtttcctggattcttcaccaagacaccccaagttcctggtctctccccgttatcctcatccctgaccctgtggttctcagagcctccaaacacactcaggctaagcactccatagacaggggaaatttggaaggaacatctagggagctcagaaaagccaatgtccctagccccaggcccacttcaaccttctctctgtcagtcctgcctgcccctggaggctggttacatgaagagtaaccccctgcttgtgtatagccccccagttttgtacaggtttagagacagttcccagcagtaggaacagctgccgaggtgggagagggcttctcccgatagccgggggacttcctctcccaggaacaacagggtggggtagagcaggcttgtcgttgctgagatagagagagggaagggaaacaacaaggaaagtgggggcactgggtccccaaggttcctggcacagcaagcagtgaagttggggcagcctcaggtcatgtagtgggggcaggtgacatctgctttgactgctcctaagagatatgtactcatctcctggattccaaactgcagcctgggacatgttttcttatataaacagcatcaaaagatgtgtgagttcccaggctagcccactgaaccctacctagtgggtgctcattgtcccccagagcccccagaagacaagccgtggctttgtgatgggcctggggccaggaggacctagggatatgttgtgaagagctgagaagactctggaaaaaaggggctctggagccaagcaggagcccgcccaggactcctcacgtgtccaagtcacctagggagagaaacagagcagcccaggttggtccctggaagagagcagcggaggaggggaaaggggagagcccctggggagagctttgaaagtcaagtgctgtttgctcagtgtgtttgcctttccgaggatgtgtttttttttccctccgttagtcagcagtgggagggggagagagacgggtggtagggtgcagggtacctcctggctgcaggcatatgctttgagtgcgtgttcatttacctcctctggacttcctgccttctgttaccagggatcaagacacaggtcattaggcgtgaggtaatggggcatctcttgttctgacccctggcgccagtcttggagtcctgacgctgcagaggagccccagagtcacatttcctgttggggcccatcctgctcatatgcggcaccatcagacttctgggcaggcaagattacctgtgactctgtctgatggtctcgccatcaatatcactgagagtagctgtgtatggagtcccgaactggtacaggataaaacagggggctgaaaagggaatgaatgggcacagtttctctggcatcaaaagtcacatccagaattgatatttcctgttgagtaaaaatagaaatataagttgctcagtggatgttgagtgagccctattcatgtgccccactctgtgccaagcaccaggaaggagggaagggaaaaatgataagatgttctccccgttctccaggagtttatgctccactaagaagtcagagctaacatgcacagaacagtgtggcagcgagagcagaaccgtgtggccagctccatgcttgccgcctagcaagcgtgattgcacttcatcctcataacaacttggtgaggtgtgttgctctgttgtcccattttacagcagagaggactgactctcagtgaattgaaatgtctcagtgaggtcttccacagcaaaaggcgaagcacagagaaggaagtccatgtgggctgggagttcacccagagattcatgtaggggcaatgtgggctgtaccttgcaagatggtgggatttcaatgaggagaagacaaagtgggaggaagctggagacaaggactgtggtctcttcctttagaagtcagttcaatctttttttccttgtggaagcagcataactctaggtggttcctctgtatctgaggacaagctttgtagaggtgacaaaggggtcctaggtcctatcaggcaagcactcgatatgctgccagttcattctgtccattgtgagatacccattccagagcgcttcctctgtgccaggctctacggaggttctggatgttaaagaggaagcaggcatggccctggccctcccagtcttgtgggagattgatcatgcccatgaatagtgaccatgtggtcagagccacagggtcaattccaaatgcccctgtttctcttttgtgttactcacctgactctgggtctttcgtttcttccattcattttttttaaacaaatatttcctgcccaccttctgtgtgccaggcctggggatgcagtgggagaagcctctgtcctcctcagtggaggcgctaactcagaacaggcagtggagaaaaacaacatgacctggagacctggtgccccttccttccccagcatctttgaaattcttttggttgttgttgttttgagatggagtctcactctgttgtcaggctggagtgcagtggcgcgatctcaactcactgcaacctctgcctcccaggttcaagtaattctccctgcctcagcctcccaagtagctgggattacaggtgctctctaccatgcccagtaatattttttgtatttttagtagagacagggtttcgccatgttggccagcctggtctcaaactcctgacctcaggtgatccacctgccttggcctcccaaaatgctgggattacaagcatgagccactgtgcctggcctgaaattcttcaatatctacctgcccttctgccagttggtgcagccacagtgggctgcttatgcatatcctggcctggcttggtggggagcatggctgagggagagccggggcacccatcaattaaggaggtaaagatcagtctgactgagatgcctcctgccacacttcctcagctgccagcaactgacaccattaacctgatttccttccccctctgttgactgcactgactattggactgaatgggaaacagccccgtgcacctcaaaatgcacttcccctcctgcagatgcatcttgcaattaggcccaaactgtgagcctgcatgctcctcccctggccctgcacaggcaacaaagctgaagttaatcagaggtacaaatggctggctatgcctctctgacacgtaacttctggaacatgtatcaatgctttggaaatgaaaagctcctggtattgcaatgccaggctggtgcccataagggccagaaaacattccttgggcaaagccagggggagtgggtgatctgatcccagctcaggtttgttgatttgttgttttgtttgtttcgttttgtatggggcaagggttgagggtatgaaaaacttacactatcatttactaccgtagtccccagaacccagcacaccagcacaaggcctggaacagggataccttttttgaatgaataagtctttttttttttttttttttttttttttgagacagagtttcactcttgttgcccaggctggagtgcagtggcgcgatctcggctcactgcaacctccgcctcctgggttcaagcgattctcctgcctcagcctctcgagtagctaggattacaggtatgcgccaccacgcctggctaatattttggtatttttagtagagatggggtttcaccatgttggccaggctggtctcaaactcctgacctcaggtgatccacccaccttggcctcccagagtgctgggattacaggcgtgagccactgtgcccagccttgaatggataagtcttaagggatatttttggaaaggatattctaaaaaatacccatgtctctacactattgcagaagggctttcagttttgatggcagcctttcaggccagcctacacgcaactaaacttttccataacagcatcacacttacacaagaagaaggttttataatccacttgccattatttaacatagttcttcctccttaactttcaagatctgagcactataatgttcttctttttgtttttgtttttttctaaatcaaattaaggtgagtcacctcaccttgggcctgagttggacagaaatctattcttggctatattccccacccctccaccaccttggaaccttatagaactttatgtggttcaggaaaatgagggcgaggcctcagatcttcaacccatgacagctgtatgcccagctccctgccttcctgtcttacccccagctagggcacaggactgactattgtgcccagagaggtgccagagcctgtaacaaccccagacttcccaggtccagccacatccaccccagagccccaaaagatgatcttcagagagacctttaaaacacaagtagctggtcacttccatccagaccagaacccaagatggctgtgctcttgctgagacatgttggttgtcattgcctccgagcccactttagccctcagctctgtaccagaaatgctgttcctttgggaatcacagccaaagaagagatggagcagttctggaataagaacacaagttcaaactgtcccatatctccccacatcactatctacagttggtctcttcccatggcgatgtccatctgccaccgtggcactggtattgctttgagtgcaggggtctctctttttggcatgttggccctgttactccctgggaactttgagtcttatttggaatgcgtgaagtccctgtgtccggggccagcactgatccacacagctaagtttgcactcatcttccctctcatgtatcatatctggaatggggtctgacacttgatgtgggacctaggaaaaggcctgaagattccccagctataccaatctggagtggttgtcccggttcttactgtactgtcctctgtagggctggcagccatgtgaagaacagaggttcccagcatcatcttcctacacattattacattcacccatctttctgtttctcacttttatctccagcctgggaaaagttctccttatttgtttaaatccttttgtgcttttagatccccttggagcagtagagtaccttgtagaccataagagtggaaaagggtctagttttctccttgtttctaaagatggggtggctgaaaaaactccccttttttgcctacagcttgcctctctgggcctagaagtggttattctgtctccatattggcctttgatttgtgctgagggtcagcttttggctccttcttcctgagacagtggaaacaatgccagctgtgtggcttctgccctgggggctgggggtgaggctttgggtgccactgcctgtgggttgctggcttaaaggacaattctgttcattggtgagagcccaggccattaacacctacgcagtgttattgaaagaagagaggcgggggtggaggggaattagtctatcccagctagagggagataaagagggctagttagttcttggagcagctgctttgaggagaaaatgtatagcttttgacacaacaggaagatccagaaaattatcattgaacatattaaaggttatttctttttcttgcaaaacacacacacacacacacacacacacacacacacgcgaacacacgcagctgatgattctactctcccagccccagccctgaaggggacccagaactccctgcacaaaggctgtccttcaaggggagggtgaaagaagtggaaaatcacattttcattctttagcgtctccatacaacagccagaactgggcagaagctaattatatcagaagcatactccatgttgctgcatcagctttgggatgttcatttttaaatttatttatagcttgtctcattcctcaaaggagttcagggagctacaaaaataaagacaataaaattgaaaaaaattaaattaaaaaaaccatgaccagggaaaatgtgcagtagaatgaagtgtcaattatcacgttttctgactgcaaaatctcccccacggctgatgcaccatcatttactacaacagcccctcttgttggacatttccagtttatttcgtttgggatggtttgttgctgttgctgtggttgtggttttgttttattgaattttgtgttagctgcagctaataccatcttgctgatggctttgcgctgctcttgaatgattactcaggataaatttcctggagacggattataggatcagaaggtctgaacttctgtgtggctctagctacaaagcaccagattgctttccaagagcgttgtagcaatttataatccaacactcagcctattttttggctgggagtcaagccccagaatgtgaaggaggggtcttggcctggagcaggggctgagggatgggtgcacaggacccctccttattggttatttatggggatgggccaggaggagcagaatagaggcccctgccctcccagttgctccttggagtgactgaccccataggggaggggcgaggctacctcacatttagaactatgtagttggtgatggtcaaggtcctaggtctgatgggcatcctcctccctctcctcctcagccagtaatggctgcactatgtcgtatgtcctagatctgggtcccttttgctgtgggaacaccaataatacttacgctgtttcctgccggaaacggtgcaggagggctgtggcatggtagtgggccctggaaaccatctagccttcatgaggaagggcagttaaagcacaggcatgtatgatgttggtattgattaaaagcctcacgggcagagaaattcgccatctgccagggccccagccatacgagggctccagccatacatcctccaggagactgggacctctccaattgcaggagccttgccttccccatcagattaggaattccccgaggatggggacaatgtccttcccacctgcttgagaactcctaaggggcatgtactctgtctccccattgtatctggaacttcctgggagcatagctcctgtctccgtcctcagactgggaatcccctaagggcagaggccatgtccttccacccacttgggattccctgaagttggggaccacatctctgatgtacaatgctttgtatgtactgactgctgcaggattcttggagtaaatgggcagtcaacttcttggactggtattgaccatctggacttcatcagagtgtccaagactttgccattcattagacaggggccatgtgcacaggcagagccctggcctctggcttctggctcctgactcctggtccctctgctttaatttggctaatggcagaaccagactcctttctgggctgccctggaaggggatccttgaatgaaagaggatagatgggaaggtggcagctgacatggttacctcttatgccatgggggggctgctctctctggaaatttaggcctggggtcagggcactgttgagcattttacaccctaggccagaggaggggtgacctgtggagcagggctaagctagtagcccatgaggtatgatgtgtaggcagcacctggggctcacagagcctgttacccatgttatctcctctgaccttggaaagagctggggtgtatgaacaagtatttataagtttacaaaaatcatatgaggaaactgaggcacggggaaggtaaatgacatgccctaggttacacagcttataagtagcagggattctgcccttctgtcacaccaagtcccactgtcttttcttcctggagtccctgtgactgatctaaaggccacatgtttaacagaataaggaggaggcctctgttgcagcaaaccagctaccccacccgcacacagactctaagggacatcctgctttaagctgtccttagttactaatacctcagtgagaatgagtttgaaattttctcaagagccatgggagactaggaagtctctaagcttcatagagagcctggcttggggggacacaggagccaaaggcagaggaagaagtggcagctttgtgcccccagaaacacgtgctcctgacctcacagttggccacagccagccaactctcccatccttctcccaccactttcccgtggggctaacttcaccctgtccacacggagtgacttaacagtttaagccccagagtcgggggccggggtacctgggacaagagtcctgagggaaatggggtgaggaactggaagtgccacagggctagagttctgcccctagcctactggagctgtgccccacaggctggccccactggactgcgctgcctccaagccatcctgggcatctccatgtgtagctgtcacgctcctcccactaaacgcctccctgtgcttcctctgcagttttcatgaacacggccatccccattgcagctgtcctcatagtaagtggatcctttctccatctcttgggggtagggtggagggggagggcgtctgcagtgacaggctgcccagatttggcctttctgcacaggggcctcagaagacaggctccacagccagactgaaaataggatcgaaagtttatagagggtgtggcccctccccaactccagccgaacaggggcctctgcctccaggcctggaagaccggaggcttagtatttagagaaattaaactttcttttaaaaaatagctatccaaatttttaatttttaaagtgaaacatgtgtattgtagaagtgatgggaaatccagaacagaaagctcaaagagaattaaaatcacccataatcccactggtaacatttttaatgtgtttctttccagtctttttttaaggcctatgatatgtcattttctacaaaaataggaatgtgctatgcatgcagttttgcaacctgctcttttaaatttaggaatatgccacacacaattctccatgccactgaatattatgatggtggctttctaaagcaattttgataaaagctgtgtgtgagctgagccatgggggtcaagcagcatgctcctacagaaaggcctgggcccctacgagcctgcagccccctcacccagcctcccatccccatcttctgtgatggctgcagttccttaaaaagatctgcttatttcccccggggccagtgtccctgagctgtgtagagttcacagcctgtcggatacacttgggaattcacttccaatgtgatgtattgagctggttcctggcctggctcctgggggaactgtgggtaacagaggccactgagccagccaggtggctggggcaaagcactgtgcagtttcgtaatcactctgtttacgttatcccgatgaggactggggagatgagcaccccgcctgctgtctgcagagggggccgtgctgacctaacccgagatctcctccctgcttattcccagccaagactgggcaggacagggagtcttggccaggacagggagggagcagcccctgctctccagcttgaagtcctgaacttgttggggacgtttccatgagatgactgtggggatgatgaaggtgtctccaactaaaagatcctcttaggagcctgctccctgacagccctctcatttcccttccagtgctgagcgtttccagtgtgggagggacccacaccctgggccaccctggcctcacttgtgcctctgtccacagactttcgtgggccacgtcagcttcttcaaagaggccgacttctcgccctccgtggcctttgcctccctctccctcttccatatcttggtcacaccgctgttcctgctgtccagtgtggtccgatctaccgtcaaagctctagtgaggtgaggggagggtccgggcgagggcactgggcaggcaggtcctgtgtcagcctcaaggcttgctcgagtgatggccaaaccacagctgtttggtcccggaacacacccccattgctgggccttgctgtagctggtcctggttggtcagagggacattggcctgtatggtttcccagctcgccatccctgagcaaggacttgcttacatacctcccaggagaggggactcactgtcactttcacgacaacttaaaaaaaaaaaaaaaccagtgttgagccaaatgtggaatcctcctaaattctacccactggtcctaacttcaccctccagagccaccaagaatgaggccatcccgtccccacgtggctgccccatggatatcagaaggcatccactgtgtctatctttcccaggccaagtatcccctaccctttccacagcccctgagccctcacagcctcagccagtgaaacagcttcccccaagcgctgggtcctgctctgattggcccacagctcttggaggctcccacttccaggctctagagcctcatggggactctgccactgtcccagaggcattgccctcttgggaatgaaagcctgaaggtagaaggctgaggctttggctgggaaatgccctgtctggagtgagaagatgtccttgggcctctgaagtagctctgcctccttgaaagcaagagcctgtcatgcctctatggagggctggcttgtccttacccatggccagagaaccagtcagtaacaaatgtcctctgtgtcttcagccttgaggaaggtgacacccctgtctcatgggaccctggcaggtactgggaagctggaaggaaggagtagctgttggaatgaagtagctgatagagagggtagcttgcagggggagactctagcatgggttcaaagatggaatggggcataactcagcaaaattatgctctaaggagtatctgaccaggcagtagctggttaaacagggattagctcccatttccacagtcggctgtgctgactcagtttcttgaccagggtgttgtggggtctgaagatcacccctcctcccaccacccactctccagccctatgattctgtgtagaaaccacagatttaagaacgctgcacctgcctgaaaactgttgcactgatcccaaagcgttcatattttcaaacactctggatcccactgtttccaggaatggaacaccagagtagcagaggccttttcagtgaggcagctcaggctctggctgaaggtgggcgcaggacactacctgaagcttcaccccaagagatgagggccagctccactcttcccagtcaccgcctgtgggggagggaggctggacagggcatgaaggcagagcctggtggtctgcccctcccatctaggggtggcgcacagaaagggagactccaggccacagctcacttacaccccagaataaccttgccttgagggtgggatggcttgtctgccccaggcctgttggacatttagcaaaagagaagaaaggggaatacaaacaatcctgagcttcccagaaagctttcacacctccaggatgggagagaatgaactagaagagtgaagcttccagtgcttcctcaggtccacagggaaatctggacaggggagagggtaggaatagccgcctcccccgtgagtaatgacacctcctccagcaggctgttatggggatccgattacataatgctacaaaacagttaacacagtgtctggcatttagtgtatgctcacaaaatactagctattgattctttaccaatcctagtcctaactaaccttaaccctgaccaatccaacaccaaccatccttcagtctaataacccagactaactaacttcaacattaaccctaaaactaaccaatctcacctccaatccagaccccagcctattccagctgactggtcaaccctagcaaaccctggtaacaccaattacctgcccccatgcccactggtctgcccccttcagtgtgggctttgtgggactatacttcaggcctgagatcctgctcagagctctctatcaggctgcgccctctcccctcccctctgcccctggcaggggtgaggggtgtctctgtgcttcccgagcagcgtgcaaaagctaagcgagttcctgtccagtgcagagatccgtgaggagcagtgtgccccccatgagcccacacctcagggcccagccagcaagtaccaggcggtggtgagtgcccggcctccccttgctactcccagcatggtcctctaaggcccaaaacttgggcctgctgtgtcggacttctgccttttttcccaggaagaggggctcccttccctacacagctcccagcccagtgggtcctcacctccaaaccacccccagcccctcagggttgtgaaccgcaagcgtccagcccgggaggattgtcggggcctcaccggcccactgcagagcctggtccccagtgcagatggcgatgctgacaactgctgtgtccaggtgagtcctgctgccccatgcctggccacccagcaccaactcccagagggagctcagcacctggaaagccagaaagctgcatgcttagtcctctgcagaggtcaccctgcctgcctgtacggtccataggagtccagaaaccagggaccaccaagtggggggacccccagccttaggcaagggtcagcatgagaaggccagtctcccactcccctgctctggaagtgatccaggggctggaatcagtgtcttttggctttcatggaggaggggaagccagagactattcactgggaactggctgcctttctgttctctcctgggcggtgggacacgcctaatgaagatcatgggaggctacttcacgtggaccccagatggaatccccacactgtccaacatcaccattcgtatcccccgaggtatggcccagtccacccctccagcatgcccctccccatgtcccactgaataacatagagataaaaagacaaagctgcatttattgagcacctactctctgctcattcttggtgtatgccctgggtatattatagaaggggaaggctacattctagaggcttccgtgtgctgggtgggagtgaagcactaaggacagggtaaaattgccagccttaatgtcaaaccatccattgcagacagtataggtaatgcacaaaaagatcagaagtgggtagccaaggaacgcaagtggaagtgatggggtttctgagaatggacaaaggccctgaggccatgaggcaggaggattttctggcagaggcagccatgagcaaagtatggaggtgggttggaggtgggacccaggatggtgtttcttgggaccacaaggagcctgggctcatactaggagcatgggaaaggagaagcgagtgcttaggaagggtggcggggcaggaaatcagagagggggaaggacctggggagccagaggaggatgttgatttccagaaggaaaggattaaagagggagaggacttgctggggattctaggtaggaagaaagaaaacaggggccccagggttgggtgcatctgtctgtctgtctttctgggtaatggttgttcagactcccccggccccactcacatctgccaccctccctccctgcaggccagctgactatgatcgtggggcaggtgggctgcggcaagtcctcgctccttctagccgcactgggggagatgcagaaggtctcaggggctgtcttctggagcaggtaatacatgtatcctcagggcccagtggaggggaaatctccttttaaccatcctcctcagttgaggatgcacacacatttattggagggcccactctgtgttcagtgaggactcaataaatgctgctaatggatattctcatcatcatcactagtacgtattcacctcttactatgcgcaggttctttgctaagtcctttgcatgcattatttcatttaatttttatgataactaacaaggtccatactgttctcaattctcatttatagaggaaggttaaactatttgtcctaattcacacagctaataagtggcagagctggaattgaaactcagttctgtcagactctgaatcccatggttactcagatgcacggcagtaatttcccagtgtgggaaattgcaacaccaacattggtttccagcttggtcctgagctgcactgacctacacaccataagtgggtgttctgaagatccagatgtaaccaataaatgttggtttctgggcaaagatcactgtcttaattaaagagccagaaccccaggctcagtcaatcacgaatctgttatttatacccacctacttccaagaagcacttgaaactagttgatgaaagattcatgtaaaaatcaaaaccacaatgagataccatctcacacccgttagaatggtgatcgttaaaaagtcaggaaacaacaaatgctggagaggatgtggagaaataggaacgcttttacactgttggtgggagtgtaaattagttcaaccattgtggaagacagtgcggtgattcctcaaggatctagaaccagaaataccatttgacccagcaattccattactgggtatatacccaaaggattataaatcattctactataaagacacatgcagacgtatgtttattgcagcactattcacaatagcaaagacttggaaacaacccaaatgcccatcaatgatagactggataaagaaaatgtggcacatatacaccatggaatactatgcagacataaaaaaggttgagttcgtgtcctttgcagggacatggatgaagctggaaactatcattctcagcaaactcacacaggaacagaaaagcaaataccacatgttctcactcataagtgggagttgaacaatgagaacacatggacacagggaggggaacatcacacactggggcctgtctgggggtggggggcaaggggagggatagcattaggagaaatacttaatgtagatgaagggttgatgggtgcagcaaaccaccatggcatgtgtatacctatgtaacaaacctgcacgttctgcacgtatatcccagaacttgaagtataataaaaaaagatgcatgtaaaataaaaccctttaaaaaggtaagaaaataggaactgagaaatgaagagggtaaaaagatgttcagcaacctgggcagaggacaactacagccatcaacataaaacctggctctgtgccctctggtagccaagggaaaaagggatctctgggctttggagtattcatttaggaataaaagttgcagccaatcagcagaagggcaagctttccctaccaatcatttctaggggaaaattattgaaggtgtcaggtttttcataagcatgagtacagaactgagcagggagaaagactttgggcccaatgtctgaatatcaacatgcacccccgtttcctgcatttccaagatgtccctgaatggtgtatccaaaagatggcaaatttccctcctcagtggggtcgtgggctagcagatgagccccttgggtttcccatcacctcccatcagggactgtgatgtctttgggggcagaggggtctttgcctccattcgccattttatttgggagatttttcaacatagcctgactgggaaggcccaggtattcggtttgagatcatattgccttattccgactgcctctccagcctttggagggaggagcccttttctgctgtccaactgcatgcctgcagcaagaagacaagagtccccagtgcactgtgagctgaagaaagtaaccaatatttattgggtacctcctatgggccatgccctttgctaagtgcattgtcaacatgatctcatcaagcctcctactaagtttaggaggggagtgttgttaccccatttcacagaagcagaaactcaggctcagagaagttgggtgacttactagtcagtgtgtggagcagagactctgcccatgttctttccctcaaacctggtcactgctggggcccccagggcctagtcctaagggttattgtccaagccccatgtagtggtcaggctggatctgggctctcctccaaggcagggcttttccagaaggattgcagggctcagacactggagctgcccctgccttgacctgctcagcatggatgtcaaaacccactctgaacctggtccctttgccctgctttcttctcctcccccaccctcatgccctcatgtggcatcgtgcctgcctcaggagctctccttgtcctatgtagatgaagcaggcatgattggcaggggtctgctctgccctgcctcagtccccacctcttctccaagctgtgccaaccctccgggtctgactgctgcccctctctcttaggaaacctctgccccagcccagggaacacaaggagcctctccaaggcagaggaccctaagcacttcttttttttattattttttattttattttaggttctgagatacatgtgcagagtgtgcaggtttgttacatagctatacatgtgccatggtgctttgctgcacctatcaacctgtcatctttttaagccccacatgtattaggtatttgtcctaatgctctccctcctcttgcctcccaccccccgacaggctcggtatgtgatgttcccctccctgtgtccacgtgttctcattgttcaactcccacttatagtgagcacatgtggtggttggttttctgttcctgcctaagcacttattataggccaggcactgtgcaggcacctcatcatctcagtcagtctgcaccgaactctgtgcagtagatattattatatcctcatttatcagattaggaaactgaggtgaagcaagttgtccaaggccacccagctgttaaatggcagaagtgggatttgcacctaggtgctcaagtgcattggtttgccaccatgtgctcaaagagaaggggcacaagagcctcatgaagaaggcatagctagcctgacagtccaaaggccagcagccgctgtggccatgactcacacacacctgcctcctcccagaactgccacgtgggtcctcacagctctgtccttatcaacacttactctcctttacaggtagcctaggccccagctcccagctctgttcgaggctcgcagaggggcggtagtgaaggggtctcatttctccaggatcctctttgctctctcgcccggtcctggtccagcttccctttcaagcatagtgaagtgcatttgttagcttgcagccaaccctgggaaatcatgagaatttgttcccaagtcaactcattctccagcgtccacagtgacgtattcactcacccagttgagcgcctagtgtatactagaccctgtgacagcaacaggagtgcaaaggtgactaagacgtggcccctgctttttttttttttttttttttttgagacggagtctcgccctgttgcccaggctggagtgcagtggtgcgatctcagctcctcacaagctctgcctcctaggttcaagcgattctcctgcttcagcctcccaagtagctgggactacaggtgtacaccaccatgccggctaattttttgtatttttagtagagacggggtttcactatgttggccagggtaatctcgaactcctgacctcatgatccgcccgcctcagcctcccaaagtgctgggattacaggcatgagccaccacccctggccggccccgcttttaagagaggggagagaagacctgggccttagaagagctcagaggaaccacaattgactctgcagtcaaggagaggaggctcactgcggatgtggtatttgagccttgaaggatgagtgtggtttcatcaagtagaaaaggcagggatgggaaagggaggtggtccaggcaggggtgatggtgtgggcaaagccttgctgatattaaagaacatagttctgtgcacctggaacactggatgcatggggtgcattatgaaagatgggactgaagaagtgaacttggcttagatcccatgtagtaggtctgagaagtaagatttaacccaaaggttgcaaaagaaccatgcttgtgataaaggatgatggattggggaaacagagaaaaagacagacagactgtaggaagggaggtattagcaaataatcataacacagtgtgaggtgtgcattaatattcactcattccaagtattgatcaagaagagaggtaggtactgggttaggaaacagcttgggcaaatgcatggggaaatgagagatgtcaagatgcattctaatggcagcctcttgaagatcttaagttgtttttggttcactcatttcgcaaatgaattcatttagcaaaagcactatggatacagtgcttacctctaggaagtaagttttagcccaaatgctgcagaaggatcatgcttatgacaaaggatgatggactggggagagagaaaaagaaaagacagacagactccaggaaggaaggtcagtctgcagctccttatagtggctaggagaaggagtctaggcagatacgactcaattagcttcatctgctgtttgtctctcaaaatctagacatgtgcactgctctggctggcccacctatcctgggcattgagttaagtgtgggggctgtgtgttgagagtccccctccattactggcaggaactccacacctcagacattgagccccaggtctgcagggagaagacgtgcttgcaaagtgagctaaaagcaaaacagcctctgacctggcaagcattcccaagtctgcacgcctgcagccagaggagagggtgatgccaggctgctgctcagatgcttttcagccatacccaggccaagacctggtgaccaggcagccagaaggagttccaggaggcacaaggcaggaagttgggggattaggaggtgtagaatggagaatgctctggggagatgggtgctttgttggtgcaactattcgtttattcctccagtgaccacgtgagcagtatggctgcacacacaggctctgcagccaagctgcctgggttcacatttggtctctgtgctttggaaaatttcataagctttctctaccagtttcccttattacccatgagattgatgtgaggattaacctagcatgtagtaaatatcctataaatattattattcaatagtgtacttctttgccaggaacaaaattcacctgttcctctttaaatgtcctccagtctgtctcctgggaaagattcttgtgagctccctggggacagggaccatattttgtttgtctcactgtatccgtagtgctttttgctaaacgaattcacttgctaaatgaatgaaccaggaacaacttaagaccttcaagaggctgccattataatgcatcttgacatctctctcctttccacatgcctttgtccgagctgtttcctaacccagtatttcactacccctcttctccatcaatatttggaatgagcaaataccgttagtgcatacctcacatggtattataattatttgctaatgcgtctgtctcctccatgactctgagctccttgagggattattccatgttgtaccccaggtgccccatgcagatgtgtattttgtgcactgttctgtgtaggctacaaaggaaaaggcctagcacctgcccttggggagctcacccacccaggatggacagaggtgtgcagacagagctgcagggtgggcacaaagggtccatctgctgaagtcctgcagatgcagccccgagcttgtccctcacgtcagcagcctggctcctggtctcagagagaactgtgtggttcccaagcattcactttaggaagaatcacttgcccctccctggctctctgcttcaaggaactgtgacaaccttgggatttgcaaactctctctttaatccttaagaggaaaatgttttggtaaaaagtcaagattagcagatacactcgggtgaaattctttccctggaaataaagaatagagccattaatatccacagtagagtgactttaaatgcccccggggggtcagcaggaaccagggccctgaggaaaggatcagcgtggggaagaggctcccacttccctgtgaggagctgcacatgcagtctcactggagctccctgctgcaatgctgttgcctgtggtggttggtgtggatgctgcctgccaagagccctgattccccaggaagagagaaaaaggcttctctcaggacggccctggtcgcatctgcctgtacaattcctggagcctttggggagctgaagtcaggggctcaagtgcccctgggtttcctggaggaggcaggtgtggtgagacagctgacagacaggagaagggatgctctgaggaagtgactgtccagccatgggaaccagatggcccctggctgtagtcctgatgctgccacttgctagctctgtgaccttgagcaggttacttcacctctctgagacagactcactgtctggacaatgagtaaaaccctacctttcctgtctcagagatttggcaatgggacccaatgacatcaattggaaaggatgctgtgggtgaaaggtaacctttcaggacagcgacaagcctgtctgggcaggatgaatgggctgtggagccctgtatatcctagctcactctttgaacctcagtttccacttcttccctttttatttattgccggggtcttaaatgagtgttgggggtatctgattctccctctgcctgtacttttggggccaagcactgagctgaaaagacaattcctcctagttctccaagcctacaacctgccccctaaccagctgtgagctgtaatacattctccagtgtcactgtgaggtttgtgccttcacccccattttatagatcaggaaacagaggctcctccaagtaaaggagcttgcctcagatttcacagccaatgagtggaaaagcctctgggattcaaatgtcagagcccatatttttcctacttctcgcacctgttatcatatgctgcctcttcctttaacctgcagttccctcccttcacctccaccgtctcaatccttcccactctttaaggttcagttcagctatgacttcttctatgaggctctactcattttctcagatttcttcctcctccaaatttcttgtaaaaattatgttttttctctgattctaaaagaatgcacattacattagaaaagatacacaagcatacagaagataaaaaccacctaatatcccatcacccagaagcttccagtttttctttatgcatttgcatatgcatttgtgtttacttttccccaaaagttctccgatactttgtcctacttttcttttgacccttataacttcctgacttcggtacctttctgatttgccctaccagagtgtgagcccctggaaggcagcctctgcaccctgattcaggttgccacacatatgccagctcctagtgggctggagggaaggacatgcggttggggaactggaagactcatgctttcagctgtgtgcttcctccctagagtgcaggcagaggaggaatcgaatcccctcagcactcttgtaaagaccacagcaatgagtgagagatggtgcctgccagacataccattctttacttttcagcttaaaacagatacaaagtttggggaggctcactggaggaggcttggggctacactggaaagagaagaacttggattcacaccccagcttcccctcttcccagctctgtcacatttgcaaactctgagtctcagtatcctcatgtgtaaaatggggatagggtttatagggttgtaaggatgagatgatgagttgtttgcaaacaacttctcacagtgcacagtgaaggtcagcaatgagagccagccccgccctttcttctttccaaatgattaatatatctgttaccagcctccattcattatatagctctgtcatgtgctaagcaccatgggggctgaaaaagatgttcttcctgccttaaaattccactggggatgaacaaattacacgggagctgatcagagaggaaggcagtccattatgagggctaattgagcagtgcagaccatgttgcaaactgagttagggcctggagagcttactgtgtgctggggtcctcaggaatgccacagatgcatcaataaccacctctgctactctggaagtagtcacatcaggaagactccagagataagcttatctgggctgtggccacagagctggaatttgtaagctttaggtttctatgtctcatgttaccagcttgtctataaattgtaaattacagccatctgatggttagggaatatgaagtttggttaagagaatgaaatgagaccacgaagattagagaacaggaaaagaggggactggggactacatacccatcagaatcttcattcagtcctgaccctcagcaggagggggatttcatcaggctcatttccatccttgatttcgtccatcctggttctcctgacaaggggcatttatcagagttatggcatgggaaatcacaggggagtaatgtaccatggcatttaagagtatgaacgttggagtcggagctattttctccgctacttactagctgtgtgactttgggcaagttacttagcctttctctgagcctcactttctttatctgtaaagtgagggcgatcagaataaacctccttcatatggttattttgagctttataaagagacaatactggctgagcacggtggctcactgccagtaatcccagcactttaggaggccaaagctggaggatcgcttgagcccaggagttggagaccagcctgggcaacatagggaatgagactcctgtctctacaaaaaatatacaaaaattagtcaggcatggtggtacgtgcctgtaatcccatctactcaggaggctaaggcaggaggatcgcttgagcccaggaggtggaggttgcagtgagccaagatcacgccattgtactccagcctgggcaacaggagtgaaaccctgtctgagagagagagagagagagaaaatactactatggtgcttataaaagttcaataaattttagctgttgttagtattattaaagtaagatctgtatgaaaataaagcagattttttcccccaaatgttcatgtcagaagtatatatttcattggcaaggggctgcttctggaaggttgagaggtatcctgggggaggggatagagcactggcaaaattggcatcacaattcaagtcacctcactcagtgttttttaagttatcaaaatccacagtatgaaaagcatttgacattacagtccactatatttatgcatttataaacaagagaaaaaatcacgaaaaatacagtaccacgtgcagtacacactgattccatctattctttttttttctttttcctcaaatgcacttgccgcctacttattccagacccaatgattgggtccctatccacagtttggaaaacactataagaaatgattgtgtcctctcactttccctctctgggatttagttttccaactataaaatgctcctgatgcccagccagcctcaccgctgctccgagtcaatgccaggaacgctgatttagcacatgctatttggagggtacccatccaggtgctgtgggagggacagagattgagaagagtgctttctgaccccacagaggccatttggaaaccctgggaatgggtgggagggttggaggtggggattgcttctcccctaagactcagcgtgatggaaaggcaatggggtgggaactaactggtgttggtctgtcccatttgtgtcccagcagccttcctgacagcgagataggagaggaccccaggtacagccttgggactgggtcagaagtgggtctcaacaaagggaaggggtagggtgggggtggaggacttgtgggtgggtaatgctgagtatggattcagggatgtgcagcctacatattttcagagacatggggctaaggcctgcattctcaatgagggcaaaatttggttcttggggacagaaaacacttagacattgcaatgctttgtggctgtccaaagtaccaaacagatgccagtatatctgtggtgctgaaatttcatggtgaatggagtcagaaaatagactagcgattgccagggtctggtgggagagagagggaagggactgccaatgtgtatgggatttgttttggggaagataaaaatgttttggaattagatagtggagatagttgcacaacctggtgaacgtacttttagtttcagaggttttctaaacctctgatttttttttaagtgacaggaaagacagaaaaaagtatatctaaaaaggctctaggggtgatcatggaaaagaaagttaagaaatatgactgtaaggaaaggagatgggtgtccctcaggccaggcagaaaattcagtcttgttgctttatgttcatgtgcaaatctaaaaaatccaagtgatatagattaatgaggctctgagtccctcaaaaccttccctccccttacctctccaaaaaacacttgagataccctagaggtggtatgaagtcaggatgggaaggttggctcagctttgcaaataagtttaagcctctggcctttgctctccaacaccaaagaggcttcactttggtatattttctctgccctttctccctccttgtccccaactgtcagtatgtgatgacaggctcagcctctgtaatggtagtgatcatatttcttgagccaaaaatcagacctcatggcatgtgacaagtttgcatatgtggatgagaacagagtggcagaatatttgacacgggagcagcttgggcagtccagggcacatggcactgcacctgacatccctggcagatcccccacattccgtggttgtcttctgatggggccatatggggctgcagatcatgcctggagccctcgcagctccagggctgcgggttcccagccccagagtgcaggtgctggtgtcagcctgcctggcctggcctggctctgtccagagcactccttgccccagctgtttgtgcagctgtatcagcctcagacctcagcctattcattccaacctgaatgcagaggctgggtctggaggagccacattgcgggcttcatactcctgatctgacaagttttccccccagagcctgcaccaatggcacctctccccattctccctcttaactgggtcctccagggccctcctcacacacccacgtggtcaggcagcagaggcttccccaagatgggcacaccccactctccacacctctctatgcagcatttgtggctacagactgggtccaggggattgtaaaggcatgctcatgttgggttggagggagctcaggatcttcctggaggatatggttcactcccatgagagctcagtatgcctttcctcccctgctgcagcccagagcgggagacagcgaccgacttggatatcaggtactgcgtcctgggaacattgccccccagggtcaactccctccagggtgctctcaggcccaagggagccacatcaccctgctgggcagcccccagaccccagccccagtgttgggggaggccagggagggcccctgtgctccaccaggtggctcgggagctgctgctgtttctgtgcatccatttactcccttcacataagatcatttttatctgggatctctttttcttttttcttcaaaaaccacatcactcaaaatgtggcttccttggctctgcttttaaaaaaaaaaaaaaaagttcttccatttggagaattacctgctgacttcaaagtccagtggcttgagggctacccaaagagggaggaagccagaagttgagtgttcccttggtttggtcacacttttgggctcctccctgactaaggaacaacagactgcagggctggggcaggctgggtgtagggcagggaggggatgaggtcctgctgccccagtcagttgagacccagacctctcaaacctgcctgggggaaggcaaggccaccagaggccacactaagcagatttctaccaactgcacctccccatccccttgcctccatctgagccatcagcttgacaactgcctctgagaacaagcccctgagaatgccttccgcaccccctactcccgccctgctttttccaggaagagaggccccgtggcctatgcttcgcagaaaccatggctgctaaatgccactgtggaggagaacatcatctttgagagtcccttcaacaaacaacggtaaaagcctgtcggagggaggcaggatgtggaggggaggaactgtctctggccagcctgccccagttccgggcccctccatcgatcacccacacccagccatctcactccccaggtgcttacctgcactccagcctctccatatggtgcacctggagaggggccaggtgtgcctgagcattggggcaatccagctcccataggggagagggcaggaatggagggaagggagagagccccgctgccttttctctagctggtgggagggctagctagctctctctgtgagtctccattcgcctggctcctgcactattttccctccaatgataatagttagggctagcatcgactgcgctcttactacataccaggcacagtgccgagctctttgtacacggaatttcctctcatgcttacaacaacctcagtaggtagatattattgttattcccactctacagatgaagaaccaagtttcagaaaggtcccaaggccacccagccagtaagtgaccaagatgggtctcaaatccaaagctgcctaacacctaagtacatgtttgtcaccaacatactctgatgcctccatgaactctggctggcacctgcccaggctaagggctggctggggaagtatgagaggaacaggctgggcaaatatttgaccagccatcatcattactgcctaaaccaaccagcagtggttttccctgcagtgccccaagcacgggttccggctgcagcttttcccactgcacagagatcatgagcgccctttcatcacttactctgcatatttgttcccaaccaattccatccttctagtatttaacctgcccaaacgctgtgtgaagtgctgacctcagctcttttcaagctcacacggtgtttgcttgcacccaagcgggaggcctattaaagccattgctcaccctgggcatagctacccagagactaatgaccctctgcaagtgctcgggccaactctgaccaggctgaccagctgcatcccctgcctctacccacgccaggtacaagatggtcattgaagcctgctctctgcagccagacatcgacatcctgccccatggagaccagacccagattggggaacgggttagtagcagcctctgaggggttttttcaaagccaggacccccaacctaccatgccctgagacactactcaggacaatgggtaactaggaaataggagacattgaaggctgaagagttgcctgcagtaaggtcaaacatgttgttcttgatgatgtcctttgacaggttttcagtcctgcttggagggcaaggtcagcttagtgccctcccaggctggggatcttcttcatttgcaccccaggtatacactgagagcccacacagcactgtgctcagcctggggttgtattgttcctgttcatcctccagatggggtcccctccacaagcttagacgaacaggattctcctgtgactgtcctccttttgtgtgattttaatccctgctgcctctgtctttgtttgtactggtcagatggtccctagcgcctacacaatgaatctttaaagacttggggctcatgctgccctcttctgaatgaattcagtaaacacgtgcaagttccttctctatgcaaggtgagaagcaggcaaagaagtggatagagccaggcctccatcccaaagagctcatagtccagtagggtacaggacagtgtctcctgaatggctgagggcatgatgtgttcctcctctttggtgacagggcatcaacctgtctggtggtcaacgccagcgaatcagtgtggcccgagccctctaccagcacgccaacgttgtcttcttggtgagtgcaagttcccttggggtcctggtctctggctgcctcccaggcctaactgcccacctccacctccccgcaaccccaccatcatccaacaatctccctctccaggagtaaatccctcctgccagagatattgccttatcatcctagtgatagggaaactgaggcaggcaaggatagcacaaatgacccattgcagacttcagatggagctctgcagtagccaatgaggagaggcaagctgtagttataggctgcctgtctgtgggacagcccaacccctcaacacttatgcagcccgactataagaatggctgataacagaatgtgtgctgccacttcccatcttatgcccagtgcagacattgctaattgttcacagcattatttcccatggaacttaactcatcctcagaatccttctcaacacagcactccaggtaaccactagccatcaaacatgagataaaactaggccaggcgcggtggctcacgcctgttattccagcactttgggaggccgaggcaggcggatcacgaggtcgggagatcgagaccatcctggccaacacggtgaaaccccgtctctactaaaaatacaaaaaattagctgggtgcggtggcgggcgcctgtagtcccagctactccggaggctgaggcaggagaatggcgtgaacccgggaggcggagcttgcagcgagccgagatcgcaccactgcactccagcctggggacaaaccgagactttgtctcaaaaaaaaaaaaaaaaaaaagaacgtattcgcaatccttacactacttcatgtcaagttctgttgtgtcaggtgccttgactgacactgaagaattctaagaaccagtccttggcctcaaagatttagaatctgattagggagacagagctcacccagttcaagaggcccagcccggttcaaatccaaactgtgcggcataaactatgagggggccttgtccagggagacaactgtgagggctggagtaatcagggagggcttcctggaggagagcctcaaagggagagtcaattaaacagaaggaaagagggaggccatttgcacagtgagttggaagaaggaagctcaagtctctgattccagctttattccctcccctctccctacaccacacgcacaagcactcctttactaaagacacttcacagtgggaagattcagtctccgttaccgtctgacacacacacagcgttttacaaagcatgggtgcattcgcgatctctcatgagatttaaacaaccctgctagagaaaagtgaagtggacattttatttcagtaaacgtttatgaagcgtctactctgtgccaggcactaaacgtttatgaagcgtctactctgtgccaggcacaggcacaagaagtctcagttcttgggagtgccataatcaggaatggacaaacaatgatcagatctggctttgcgccagtgtcacgggaatagggaggaaggaagggtaggcgtgggggtcaggacaggatgcaggaggaactggtgcttaggtgagcgaaggatgggtgggagttcacaaggcagacaaaaggcagagcagcactccaggcagaggaacagctcaggagaaggcccagacggcaggcttcctgggaacctggaatgcagagtgctgggaaagcacagatgaagcatgagtctagaagggaaagcgagaggttataaagcacctggaacaccagcccacagggtttgactttagagatgatggggagccgttgaaggtccaggagtcaggcagtgaagtgattagatctgtttgagagtgatatctgacaactgccccattttaaatgaggtaaccaaggcccagagaggttgggtgagttgtccaaagccacacagctaactagcttcagtccctagagcagagttgatagaactctaatgggttttatactcattgtcacccctccccaccatgcctttccctaccctctactctcttcctctcccttctgcccaggatgaccccttctcagctctggatatccatctgagtgaccacttaatgcaggccggcatccttgagctgctccgggacgacaagaggacagtggtcttagtgacccacaagctacagtacctgccccatgcagactgggtgagggggaacaagggggtcaggctatagggggcagggctggggaggctgtcaggcatcttggcaggaaccaatccgttgtcttggtagcaactgctgagggccacaaagcataagagaccagcactggatggctttatgcatgctgggcatttcagggagaccctgtacaggccaggggtttggtatcacctagacccacagacactccccatcctggcccgggccccccatggtacactcaaggctggcaccaagaagtctcaggaataatcaagtgctcacttctcaccttctgattcctgcccttttgatgacccatccccgcagtcatggggagtgcccatttggatggaaaagccctcttcccaccctatgaccttcccggggtggatggatgcaccaccccgggaatcatatgggaaatatggaaccaaacaatagcagtagtaatagaaacttcaggctgggcgcaggggctcacacctgtaatcccagcactttgggaggccaggacaagaggatcacttgagcccagaagtttaaggctgctgtgaaccatgatcatgccactgcactccactacagcctgggcgacagagccttgtctctgaaaatttgaaaaaggaaagaaagaaagaaagaaacttcaatattatcagtagagtccaatgttgtgaaacccctcattaactaaatttccatactcttcagtaggtagaaaataattactttttgattcattagaaagcacttaatttttaagatggagatcatgtaattttgaactctaggtcttgcctactcctatataaattctcctctaaacaacagccaaaattgaggccctctttgagcttcaggctggtgccaaatggctctgcttattttccccaaaataaatcttccttccatgtatgatgagaccccctccagtataaagaagacccaaagaaaatcacccaaagaaaaaaggcccaaagataagacccaaagacctaaagatttaaatatatatacagatacagaaggtttgtttctgagtttctgtagtgaccttggcaataccttgtagttcaggacaatcctgaggaacacagaagtgctggcttccttgaggaatcagtgatcaggactctcgagccccttgaaccccagcatagggcgggagggggtgagggcagcaggggtgggtgtctgaattaatgtcaggtctacgtgatggtgtcatcaagtgttccagataaaaagttttattgagccgggcgcggtggctaatgcctgtaatcccagcaccttgggaggccaaggcgggtggattgcttgagcccaggagttcgagaccagcttggggcaacatggtgaaaccctatctctataaaaaaaaaaaaaaaaattagccaggtatggtggcgtgcacctgtggtcccagctactcaggaggctgaggcaggaggatggcttgagccaggaagcagagattgcagtgagctgagatggtgccattgcaccccagcctaggcaacagagtgagaccctgtctcaaaaaaaaaaaaaaaaaaagatttattgattccaaagaggcatggccacacacacttagaccagcaggtgctttgctaagccctgatggaggctgccagacccgccgtcaagaggagctaagggtagtgtacaatgagcccacttagtgtatgacggccgctgccgtgggtggagtccttgtgagtaaccagccagcttgagcaggatgcactaatttgctctgcaaacccagccattgagaaatacgcctcagatgtaccgaactctaggtcctaggagtatgttggttggggtaggttatcaataccagcccacttgcagtggatgagctggtggccatttgtagtgaggaaagggatgtgtcaacctccatcttagactccacaattgagggatgtgaccaccattcctccccagccagcccccaaaccacgtttgttgctgcctttccagatcattgccatgaaggatggcaccatccagagggagggtaccctcaaggacttccagaggtctgaatgccagctctttgagcactggaagaccctcatgaaccgacaggaccaagagctggagaaggtgggtatatccagggatggccaagcagccacccctggatgcaaaggttctgctagaacctgaactcataaaggtcttcctgtccttagtgccccaggaagccccctaaagggcagatgtgggagctgggcatgaactggctcctaccagaggagagacagtacctgtgccaggtgcccagggcagaatcaggtgggcaccttcgccttatcctgaggtagtcagatactatttagttgcaaagtttcagaaaatcaactcaaactggcaaagaaaactaagcaaagaaaacaagagggaattaaggatttattgacccatgaaaccaaaaagtccaggtgtgtcatagctttaagtgtgctggatccaggtagtcagtgtaatcagaaatctgtttctcccatctcttgactctgctcccctcaaattggctcagctcccctcaaattggctccattctcatggtatcagtgagggccaccagcagtcttaggtttacattctcccagctcaacaactctgccagaaaaaaagtgcctctttccccatagttcagcaaaagtcccagggctgagtctcactggtccagtttggtcatgtgcccacccctgaacaaatcactgtggccagcggtgtggaatgtgaggattggcctgtcctgggtcacgtgccactttgggagccagatccacctgaatcacagagactaaaaacaggggaagagtggttccccacagggatatgggggtgctattatctgatgaaggggaaggactaaatcctggcaagatgaatgtgtgtctgtctgcccctccctcaggcagggacaaagtagaaatctgacattggtcatcaccagagtagttaccccttaacttccccttcccccaccaaccatatatcctgaagacattgcccaggccacatctgtcttttaggagactgtcacagagagaaaagccacagagccaccccagggcctatctcgtgccatgtcctcgagggatggccttctgcaggatgaggaagaggaggaaggtacaggcaatgggactgggagtgaaattatggcctgaggtctgatcagccacagagaggctaaggtttggggttctgggtgtggtgcagtagtgtgcctttgattaaatggcttccctctgtgtgcccccgttgtcccctcagtaagtggggataaaatgccctgattcaccctcagagggatggaaatgtgtagccacagagtgggttcttgcggcctgcagaggaggcagctgagagcgaggaggatgacaacctgtcgtccatgctgcaccagcgtgctgagatcccatggcgagcctgcgccaagtacctgtcctccgccggcatcctgctcctgtcgttgctggtcttctcacagctgctcaagcacatggtcctggtggccatcgactactggctggccaagtggaccgacagcgccctgaccctgacccctgcagccaggaactgctccctcagccaggtgtgactggcggcccatggcagaggttgggagtggggatgggggaagggctgagcccatgggcaccctggaactccaaatcactctctgcctgtgaaggagtgcaccctcgaccagactgtctatgccatggtgttcacggtgctctgcagcctgggcattgtgctgtgcctcgtcacgtctgtcactgtggagtggacagggctgaaggtggccaagagactgcaccgcagcctgctaaaccggatcatcctagcccccatgaggtacccgtctcccctggccaggctgggactgtgagcaagtcactgttctctgagccttagtcttcccatctataaaatggggatatacaacctgtcacaagcttgtgggggtgactcaaggagacagtgtgtgtaaaagtgccctccttgtgcaagaagcagggagaaactggcatttactcagccagatactgtgataggcattgtgtgtggttagctcatttaattgttaccatggccctttaaagtgagcgtctgcacatccaagtaaagattgttttctcctccctaagtgggtgtaatttgcccatccccacccatgagttcagctccctgccctcccctcactctctctccctcagccagcctcaggttttgacactgggggaacaggtagctgttctattaataatttcctgtaatgggatggataaaaatctcaaaggccacttgatgtcaaagaggtttaaagttgtccctgcccaattggttggccaacttggcttaaaaacacaacaggcaaacagattttctggccccttgtcgaggctagacctcacaatctaactgcactttttactttccagcctcatgagttttctgtggcccacagatatggcctccaagtttatttacttttactctctatttgccccagctctgtagttctgaaactccctggttggggttgggctgactctgggtcagccagccggcaggctgtccccagggccctgttcctcttggcaggttgtccctctggagaggactctgtgtcccaggaggacagctgctgagtcaggccgagccggcagctgagaaaggcggcagtcgtcagatgggcttgagaaactgaaaggctaacgaaaggccagcgcccctttgggcagctgcaggaattcacggggatacaggccagatgtctacaaattggcagaggatgccagacccatgaatgactccagagacacttacatgaaataattaactatctcattcagtaaacaggaagtaaatcaatggacaaatgagtaactcttcctctggctgcctcttaggttttttgagaccacgccccttgggagcatcctgaacagattttcatctgactgtaacaccatcgaccaggtacagaggaccgtgccacactatccccccttccagagacacctcggacccctgggggcttctcctgtctgaggctgggttccccagatcaggtgatcacagccctctgggaagaagccagtgtccccgatccgattataatgctgcttcagggctggggcctccctcgtgggagcctcacagtaaggctgagggaaaccagatccctttagcttccacctgagatcccactggctttctctagtaaagttccagcatattctgaaccaaggtggctgattgtatggagaatattcattttgattcagcctgtgttctttatttaccattgtaccagatggtgtgaaaacaaaatcttgattcctacctcagggagtttaccttgtagctggagagatgagatacgtgcctataataaagggagagcaaggccgggctcagtggctcactcctgtaaccccagcactttgggaggcggaggcaggcggatcacttgaggccaggtgttcaagaccagcctgatggccaacatgatgaaaccccttctctattaaaaatacaaaaattagccaggtgtggtggcaggtgcctgtaatcccaactacttgggaagctgaggcaggagaatcatttgaacccaaggggcagaggctgccgtgaaccgagattacgctgctgcactcaagtctgggcaacagtgagactcagtctcaaaaaaataaaggatcaaaaaataaagtgagagcaaaacatggcggccagtagcactctaaacacagtcaataccaaaattcacctcactctctccccctcgtctccctcagcacatcccatccacgctggagtgcctgagccgctccaccctgctctgtgtctcagccctggccgtcatctcctatgtcacacctgtgttcctcgtggccctcttgcccctggccatcgtgtgctacttcatccagaagtacttccgggtggcgtccaggtgatggcctcaggggtgaggggtgggaggtgctttgcaatgtgcagtttggtgtacttgctagactcatcgttatgagagtaatagggtcgtgttccctccaaaaaataaaaacaaaaaacagaaatgaaggaaatagaaatatccacatcttattccaccgccctaatataatagtctgccaacacacgcacacactgaggttgacatctgaattatttccttgggcgatatggtcaggactggaattgctaggtcatgataaatgcacattttatgcccttcattcattttgccaacatgcttcccaggagggttgcatcattctagtggtcaggctgattgctgatgcatgaaatcggcgggcacctgattcaagcagtgttatgataacacctcccagcccacgtgagtccagagtgtagctgtaagccttgacttgagggagcctctcacagccattctcatggatcacatttgccctcatgagctttggatccatgcacgcctctttcctcctcaaaattttctaagaatgttctctagggagttctttctgggagtgattctcccagattcatagaaactcatagattcaaaaaattgtaggaaaaaatttaaagaacgtctaggccagtgtttctcaaactgccaattacagcccatcagtgggtcatgaaatcaatatcatggatcacaaccagcatttttttaaaaatgaaaaaaacatcagactgtattcatagagtaaagcaagctttgcttcatgaaacctttgtgttggtcatggaggtgtgtgagtactgatttgtgagataaaatatatttctgactgcaggttgtggtcagaaaggttaagtacctttcccaagtgcacatagttggctagaaactagagttgagatacttattagcaataataaaatttagatgcattttggacacaattacctgccccaaaggatcaacatttgtataaatggctttttgcttggatgatccagaatggcccgacacccacacgaacaacatagctttttgacactcaaaaaattcaaagtgctgcacaagctgttctacaaagttcatttcttctgccagagaaacagcccagtctctgtggcacccagtctgaccctggagatggtttatcagggaaatcaacttcctgcatcccaaactggcctccctggcactgatgtgcttgtcgaggtgcagctttggggagcaggaggcaattctgttgccatggaaacctctggccttaccccgagacgaaacctatcatttcagcacatcactggccagggtctaaagagctccttgatggggtaagcggaagacggggttgaacgctttgagtttggtcttctgttcctttggccagctgtctcaaggttcagattgttcacctgtaaaatggaactagcactgcctgcccagccttagctcagctccaggctgtgcagcagaagtacagggacagatggcgacctggggttgacaatgcccaggacagcagtaattgtgccccacatcaggctgtgtctaagcattgtacataaacgatctcattcagtgctcacaaaagctcaatgggctggtggcattgtcttcccccttcacggggtaagaagctgaggcctagagaggtaaggccattcacccacacagcggtagcaggtggagctaggcttcaggcccaggccgagccctgagcctgccctcttaactgttccactctgttccccgccacagggacctgcagcagctggatgacaccacccagcttccacttctctcacactttgccgaaaccgtagaaggactcaccaccatccgggccttcaggtacgagtccacattcccccaaggtaggagtggaacaggggtggggccagggggcacaggccatgagatttgattctcaggactccacttgggaaggccaaggacacgttctctctcaagctgcctcaggtcccaaggcccaagggatatccaccagcagggacaggccaggtgggctcccactgaatgttctagagaggaaaattccagctctgtagacaagcccaggacctctgtgaggcagagcatgaaaagagacaaagctgggacaagtcttcatgtatcaacgctagaaagggccttaggtgcgggccaccctaagcccttcttttattaaggagcccctgtgtgccaaacactatgctgagtactgtacaggccaatcccactcattctgcactgcaaccctcggtgctgagaatggtcatttccattgcacagacaaggaaactgaggcacagagacgttctataacctctctgtgtaaggtgccacaaagcccagacttgaacctatttgttcatgcaacaaacatttactaagccccgactatgtgctaagccccatgccaggcactaaaaagatgagtcaaataagccgctgccctgcaggcgtttacagcccagactttgagcaggccaggataaatccacgtgacaagtattctgaaaaaagcggattcaagggctgtgggagcatagaagagagacagtccgggaaggtttttgtaccagaggtgtcatcagaactaggactcaaaggaggggcaggagttcaccaggctgaggaattcctgaaaacttcagtgcccctgccatcgtctcactaccctgagtggtgatgttggggtggacaggagcatctgaggttgcctggggaatgagggaagctgttgtttcccactccccaagagtctgtctgatctccagaggcatctctcttccagtcaggcaggccagagacccctgacacacaaagttgggctcttttctcatcttcatccagagagtgataataggttatttttagggtggcacagctgcacgaagtatgacagtaaccatgagacaccaagcactgtgtccaggagtaaccatagggcacaaggaccagccaagggccagagaggcttacatctcctccccccaacccctgaagtccagcttcagccctggagaggtatccaggcccctctgcccaccctggagcacctagggccagtggaaatccacctcttagggatcttgtctaagtaaagaagagcagagcaaagctctgccctggccttggcgctgctccctggacatcccttgcccctggacaagcctatgctgtgtcttccacaaagaagcttgctggggactggattatgactctagagtctcctcccagcctcctcttctcaagcctgaacttctcccgttccttcaacttccaggtccctcgacattactgagcctagcctttgctctaagttttggtgatttccctctctcaattggtgtctcagagggccctggggtagagagatggtgactcttctagagtgggccacagccccttgtgtgcagatcccagcttcctgtaaacagcctcagatcaggccaaacctgtggtcagccagagccactgctacccagtgaggtcttccacaccctactgacacggtgaatgatttttaaatttgaatgaaaggctttttaatcaaccccatacacatttaatgcattggctttaatccagcagcctgttgagagctattagcacttattgattgcccacttactgtatgccaggcaccgtgctaagtgttgtatgtgcattattacatttaatcctcacaaggaccacataacataggtacgaatcgccacattctccagatgcagaagcgagacccagagaggctgggtaatcaatccaaggtcacacagactgcgggggctggcgctgagcttggaacccaggtttgcctgaccttctgggctttcctaagagatcttattttttcccaaaagagtttcaagagtgcccagcactgggctcagtggcgggctcggaggttgttttcgttcatgtaggaactatcacttccccatttttttcataagaaaactgagtctcagtcctgatacacagccaggaagttgtgatgttcaggctccaacctgggtttacatggctccgaggctggggctcttttctagtcctcagacacactgtcgcacgcctgtggcagaagctcccatctcacacttgccgaccctcaactcacacagtcctgagacccacatacgctgagcgcctcacactcctataacacgcacatgccctgatgcacacacattttcaacacgcacttactctacccttcaggcatggtttcacactcactgcagacacgtcaccctcccacacgtctccaccctgggggtgtgcagtagcatgctctctcccacctcagaacctcccttcagtcccctcagacacatgccctctctccacgcagagacaatcaaagctgaactaacaccttccagggtgaaaagcaaatgcccagtaaggtacgtcttgggtgcctccgtgtcccctgagtttggtcctatcaaaccagcgatgatgaggcagcttttctttcgttccttcctccatcatcaaacaagtgctcctgcatctcctctgggccgggcctacgtcagcaaggtctgagggaagcggccaaggagagtgatgacggcagcccaggttgatcagagaaaggaggcaggtccatgcgcagtaactcagggaaaacatgatgaggacctaaggatgagaaagaagcctccagagttccctgtgcagagagattccatcaatttcagagggtcaggggagtgccatgcattcatccaacaaatatttattgatagtgccaggtgctggggtatattggtgaataaaacatcttcatggaatttgcagtctattgagggagatgattataaatagctagagaaatgcatgtacagcagatactgtggagcaaacaggttgcagacaataataggggaaacctactttatagtaaggtagtagccaggaagagcctctctgaggaggcagcatttaaggcaagccctgaaggttgagttgagccagccttatgaagagcaagggcaaaagccttccaggaaaagggaatagtgtgtgcaaaggccctggggtagggaagactttagtattgtcacagagcttttaaaaagctgagtggctgcagcatagtgtgtggggtgtttgtggcaggaattaggttggcaggagggggttcttcatcctataagcagtggaaggtcattaatattcttttttatttgtttttttttttttttttttttttttttttgaggcagagtctcactttgtcacccaggctggagtgcagtgaggtgatcttggctcactgcaacctccacctcccgggttcaagcaattatcctggcttcctcagcctcccaagtagctgggattacaggtgtgcaccaccatgcccagctactaatttttgtattattagtagagacagaattccaccatgttggccaggctggtcttgaactcttgacctcaggtgatccgcccgcctcagcctcccaaagtgctgggattacaggggtgagtcaccgcatccggccggagatcattaatattctaaacagtgggggagaggacacagtttgcgatttagatagattaagccagccactgtgtggagcatggactgtagggagacagcaggtagacgtattcaggaagctgatgcagtagtccaggtgagagtttgtggtgggcaggaagcaggatagagggggagggaggcaaggactcttttagagagagacataagaggacttgccaaggggctgaatgtgaatccaggtgattcctgggtgagaaactgggtaaagggaggtgccccttattataatgggaaagacctagagaaaatggatcttggggtgaaaacaagagtttggaggaggtggggattctggacaggtttgaataagcagaaaggagtggggtggacattccagagagggatagcttacatgaagtggccacggtggcatgtctggggactggaggggccctggagcctccctctgcaggtagggagactcctaggagctatgtggaccaacactgttcccttaggagcttctcatcctccctccaggtatgaggcccggttccagcagaagcttctcgaatacacagactccaacaacattgcttccctcttcctcacagctgccaacagatggctggaagtccgaatggcaagtgctattcccctctaccctggcctctgataggagggtggggccagagcaagagcacacaggtacctggggatgaaagagaggataggataccagatcgtgtggacaccaagccttcctgcttcccccagccctggtggtcctcctagtgtctagcctgtgctccttttccccatatcactgcctggaggcttgtgtatctgaggtgtgtgccagtggcaagaacagttgtggtgaatgtgtatctgcagtgggtcatatgacacccacattgtgtgtgtttgtgggccagctgaggcgtgcatgttaaagggtgtgcaggggctagggggtaggggagcatgagcttgtgggacatgttggctcctggggctccagccttcgcagcccttgtgtgtgtctggtgacgtgtgcatgagttgcagggctggagtggaggcctggctgagctgctctctgccccgaaaaggagtgaggtagaacaggggcctgtggctctaacccctgagcgcccaggtcagctcctctccctccccaggagtacatcggtgcatgtgtggtgctcatcgcagcggtgacctccatctccaactccctgcacagggagctctctgctggcctggtgggcctgggccttacctacgccctaatggtgagcggcagtgggctagggcagaggaggggtcagacaccagcactcccggagcaccttcgtcactggagacatgagacactcccaggccttaccccaatttcatttgcatctgatgccagagggacagtgcgggcaggaaggctgaccagcaggccccagggcccaggccccagacaggtggaggttggggagccacatgactgaccctccctgtgcctccagggagggctgctctgagcaggcagtggatggcagcaaaaggaatctggggccctggcccctctccagccttaagaagagccattctggtggctgaggacagaactaagcgaccatggagtgtgcgccactggcttgctccccacaggtctccaactacctcaactggatggtgaggaacctggcagacatggagctccagctgggggctgtgaagcgcatccatgggctcctgaaaaccgaggcagagagctacgaggggctcctgggtgagaggctcagggagaggggtggggaagagtccaaggaggagtgtgtctgggttgggggccacaagggagcctggggatggggtggcactttcggatactagctgtggcccatgcctggtggctgagcccagcccggcccccagcaccatcgctgatcccaaagaactggccagaccaagggaagatccagatccagaacctgagcgtgcgctacgacagctccctgaagccggtgctgaagcacgtcaatgccctcatcgcccctggacagaaggtcagagcacgggcccaacccaatgctgcaggacaggcgtgagcaggggatggggcatgcacggagctggatggcttcgcagtcacctcgtggccctccagggccgaggcctctcactattcagacatcgcagtctcctgccctgggcctgtgggggcccatctttcctctccttctattgccttcccccagtgctgccctcaggccttgtcttctcactcatccaccaaggagaccgacactctggactcccccagctcacacgggctttgtcagggcctccctctctgcgaatggtcaggggctttccctagggcactgccccgagcttcagggcagggacctgggggcagacagcgaggccacccttgtattgagggtgagcccctgcctatggccctggcccagctctcctctcgtttcccactctgtctctttgtctctgtctcactttgctgtggctgtccatgtcattctctgaccttgggatgtacctctgtccctgcctctctcatccttctatgtcactatctgtctccgtattgtaatttctgttggtacccaagtgccaggaagcaacgggatcagaggtggctccattgtagggcggggcacacagacacatccatgcataccactctcagctgcccctgtgtcctcctgccacacccatgcccatagagacacaccactgccccccagctctccttcagccaagtacccggcacacccagacccacaccaaggcccaggcaaatggacatccatgcctgcacttgcgtgccggtccctgtgtaagccctctctggacccactgcaggaaacaagcccaaacctgtggtgtccaaagagaaactagtcagaaaaccaggccaaaaagataccctgtgacctcccacacctgcacacacacccagagctagcatagaggctattcccagcagccccagagtcccagtggcggtgcctgcttctctctttccagatcgggatctgcggccgcaccggcagtgggaagtcctccttctctcttgccttcttccgcatggtggacacgttcgaaggtgagttgtaaggcgggcaccccacgtgtacccacagccaccagatgaggcctcagccctggcacgtggtcagacatgacaggaggcccagcagtcaccgccttcccctgcaccctcactgggacccatgcagggcacatcatcattgatggcattgacatcgccaaactgccgctgcacaccctgcgctcacgcctctccatcatcctgcaggaccccgtcctcttcagcggcaccatccggtgagccccaccacccctcaggcccacccagccccaggccggctcagttccatcagatctggagcacaaagaggagggggttgggggagaccaggatcccagaggtgtttcctgctcatgcccttctccatcccatcaggcccaggcagcctctggaaggggatcccccacccatgggtctaagatgctgtcccccacccactgccaccacctcggtgcttctcccagccagacctccaactcagtctgctctcgctcactgccctctttgccgcctggggatgcaggcaggaccctgctccctccctactggggctttctgtgccacttccagatttaacctggaccctgagaggaagtgctcagatagcacactgtgggaggccctggaaatcgcccagctgaagctggtggtgaaggcactgccaggaggcctcggtaactactcctggctatgcagctgggttggttgggcactcaaggaccctgtaaggatggcagacagaagcccgtgtctcaggtttgccccaagtttggagtctgaagcctggcaggaccatttagtcctacttctcactatacgggggcccagagaggtcaggtgtcttgccccaggtcacacaactggtcagttcagggtctggctcctcctgcagggtacagcgggtacagtcagggatccttgtgagacagagattgcgagtcccccatgccaagggggcatcttcagccctgccctgccccatccacctgcatgcccagttctgccttaggggaggagaagatggactgggcaatcatagacacgggtcactcatcaaggccaccggtgattggcaaagccttggtatatttgctgcagctcctggagcattgggggtggccaagccttggtttcaatgaatcaccctaccaaggccctacatacacactcagtgcacccctcagtgcacacgccccctcccagaactgcccagggccacagcagcacacacctccaggggtgcccttctcgttgcagtccttgcagacggcctccacattgttgtgtcaggtgcaccagccctgcacacgcctgtgctcttggacacacacccacctatttgcccccatgcacacattttccaacagccccccaagccatcccatctgctccactcacagcacaagattaactcagtcctacttcatctccccgggctgttttcagatgccatcatcacagaaggcggggagaatttcagccagggacagaggcagctgttctgcctggcccgggccttcgtgaggaagaccagcatcttcatcatggacgaggccacggcttccattgacatggccacggttggtcctgggcccctccatgggaccatggtcttggaaagggtttagtgggatgctagggagaaatttgcacgaagtagtcctgaggctcaagttgcctctaacatcaaatgctatgtgttgcagaaaatgaaaagagctggggggaccctgactctgtctagtcttagggaatgttacacacacacacgcacacacaaaaacactatgcaaacacacacataagctgcacacacagacccacacagacttcacactgtcacctatcacaacagcacacacacagccacaaccacaacctacatacacacacagagctgagctcccaacaggctgagtccagtccctgagtgccgggaacctgttcagtcctgtggggtgggggtgggactaggatcggggtcagatgggagctgagccacagacctgggctccacatcccccaagccaggccagaccccatccactgggcaggtgagccaacagctgttgcccccacttggcaggaaaacatcctccaaaaggtggtgatgacagccttcgcagaccgcactgtggtcaccatcgcggtaaggggcccattgatggggtgcagagggacacccagggacaggactggcctgttgtggccgtcatcagtgcacagcccctgggcttgcctggtcccagtaatcaagaaagaaccctgaagcaggcagttcagggcaaggggcctggagggcatgcagggagcctgggttgcaggatttggggtggggggttttgcccctgtgcttccctcagacctcccctctccttctccaggttccaaggcctgcccctgtcccaaggccttatatgttaggctggcgttacttctccataggaagtgggggaggggttgtggagggtctctgagccttgaagcctggaggtggggtagagttgggacttggagaggagagaagggtggtattagcagatggagagcttgtagtcacatccaccccaggaaagtgcagtccccacagtgacaggacattctggccacatgcctcatcctcctcctccaagccgcaggagggccaccctcagctgtggcccccaccgcgggtggtattcccaccatcctgacccgccccctcctgccctgcccagcatcgagtgcacaccatcctgagtgcagacctggtgatcgtcctgaagcggggtgccatccttgagttcgataagccagagaagctgctcagccggaaggacagcgtcttcgcctccttcgtccgtgcagacaagtgacctgccagagcccaagtgccatcccacattcggaccctgcccatacccctgcctgggttttctaactgtaaatcacttgtaaataaatagatttgattatttcctactagaggccctaagtctggtgggcaggggctggcggtggatggtgggttcagtagaaccagcctggctctgacatcaggcagaagctgtgtgagcaaaagcctgcttccttacctgtgaaatgaggcctctattagtcagccaggctgccacaacaacatatcacagactgggtggctttaaaacagacttttttctcacagttctggaggctgaagtctgggatcaaggtgttggcaggtttggtttctcctgaggcctctctccttggcttgcagagggctgccttctggctgtgtgctcacatgacctttactctgtgcacatgcatccctgctttctctctgtgtcttaaaaggacaccagtcatattggattagggccccac

SEQ ID NO: 1121 - DNA, 19900 bp, Homo sapiens
actgtcgcttcagccaggctgcggagcggacggacgcgcctggtgccccggggaggggcgccaccgggggaggaggaggaggagaaggtggagaggaagagacgccccctctgcccgagacctctcaaggccctgacctcaggggccagggcactgacaggacaggagagccaagttcctccacttgggctgcccgaagaggccgcgaccctggagggccctgagcccaccgcaccaggggccccagcaccaccccgggggcctaaagcgacagtctcaggggccatcgcaaggtttccagttgcctagacaacaggcccagggtcagagcaacaatccttccagccacctgcctcaactgctgccccaggcaccagccccagtccctacgcggcagccagcccaggtgacatgccggtgctctccaggccccggccctggcgggggaacacgctgaagcgcacggccgtgctcctggccctcgcggcctatggagcccacaaagtctaccccttggtgcgccagtgcctggccccggccaggggtcttcaggcgcccgccggggagcccacgcaggaggcctccggggtcgcggcggccaaagctggcatgaaccgggtattcctgcagcggctcctgtggctcctgcggctgctgttcccccgggtcctgtgccgggagacggggctgctggccctgcactcggccgccttggtgagccgcaccttcctgtcggtgtatgtggcccgcctggacggaaggctggcccgctgcatcgtccgcaaggacccgcgggcttttggctggcagctgctgcagtggctcctcatcgccctccctgctaccttcgtcaacagtgccatccgttacctggagggccaactggccctgtcgttccgcagccgtctggtggcccacgcctaccgcctctacttctcccagcagacctactaccgggtcagcaacatggacgggcggcttcgcaaccctgaccagtctctgacggaggacgtggtggcctttgcggcctctgtggcccacctctactccaacctgaccaagccactcctggacgtggctgtgacttcctacaccctgcttcgggcggcccgctcccgtggagccggcacagcctggccctcggccatcgccggcctcgtggtgttcctcacggccaacgtgctgcgggccttctcgcccaagttcggggagctggtggcagaggaggcgcggcggaagggggagctgcgctacatgcactcgcgtgtggtggccaactcggaggagatcgccttctatgggggccatgaggtggggcaggttggggtgccgggcacggagggaagcgtgtggcagggaggcccgggggcaggcagccgtgagcggtggggacagtctggggcgggccggggctgatgccaaaggtgtgggcaggccatgggagagccgggctggggtgggcagggcctttgggcagccgtggactcaggcgcggcagtggagaggcaggaaggctgggtggggactgtcctgtgctggttgcctgcacgctcgaggccacttctgcttcctctcctcctcaaggaggttgtcctggccttagagctgcgatcctagcggtttgagcctcgagagctcctgcccgccccactcctgcagccagccaggaggagacgcctgccattcatgagcggggaccgagggacgcagcctgctgcctagcccctcctgggcccttgggccctttgaaggccggcgtccagcagagctggctggccaggcaggccggcattatgggcatgactcagcccaagcggaggttaatgagcagcgcccagcacagcagtgggacttggggtcaaggccacccccgcctgagcccacaggcctgcctggctaccaactggctcagctgccttcccgggcccccagaccagagatgccgggcccaggccgccactgcggcgggacacacttcctgctcctggcgtggctgtccttccaaccctgtctgtctcctggctccctggtgggccggggccggcgggccagacaggcgctgggaaaggttactccaggtcaatgctccctttatctcgcctcagcccctccccttcctcgtgcctggggttgcagctgccttgggccctgctctctgcgactcagtttcggttccccagtgcttcttgggaggaggggcacaatggcatccatcccccgaaggcctgtgtgtgctccctgggtcaggtggcctcttgccctgggaccttgtctcactggctgtgcaccagcagagaagcaggcttgtccccgaattccacggagaggggcatcccgggtgtgggccagactgcagattcagagaaaaggcccctggacttcagccaccaccctggcttccctctcctcttctcccgcatgctgggctgcagggccttggcaagcagctgcagccttgggcgaggcgcttggcacattccccgcagctacattgtcagccttggctggcacccctgccagctcccagcacgagtctggattgccagggtgcttgcttcaggaatgggagatcgggcttgcagggagctcagctgtgcaggccgacctgggtggcgggggcagaagagagatcactggttctttgaaggccttcgtccgggctagcttcaggaagtagagagattactggttctttgaagggctagcttcaggaagtagcacgttggccaagagggtttgttggccagggcaggagggcccggtgtgcattcacggcctgtctgcataggcctcggctggaaagctgtgtggggtgagaggaccctcgggtagcatgtggcccatggcagtcccactggctgatgtccccgtggacactggcctaggctcagatcagggcagaagcagctgactggctggagggcacatagcagagtattctgtcctttctgggattgccgcgaggaggcttattgaaacgcacatgcacacgatctcttgtttgagaacaaagtaaagctctcttgataagtctaagcatcatttacaagaatgtggttcttctggcagctctgccagtgtggtccaaattcccacactggttgccaccatcaggctgtatgggcttgggcaggtcactttgcctccctgggcttcagtgttctgtgtacagtgggcacgtgaatacacatgcagtgggatgtggggagaatcaaatgcagagacgtgaaagcacttggcaaacagtggcaggctaggcagctgtcatcagacggctgtggggaggcaaggctggggtgcgtgcccctggactgagcccagaaattcacaaccccttggctaccttgctgggagcacttcccaacacctcccatctcccccgcctgtctgactgctgctgccacctcttccctgcggctgtccctttccccacctgctggtgtcctgacatagtggtggccagtgcaggaagggggacagaaggacaggggaggcctacccactgctgagggagcaaggtccaggctcagcagtggggacatccactggggcgagtcctgtagggcccagctcaggagcgcatcctcctggtttcagtgggaaaatgccatgcaaatttctcaccaaaaggaagtgtgggaaagttgaggggaaagagggcgtaaataggcccagactgttgaaccgagtttttcagaaccaagagacagggtttcactgtgctgcccaggctggggtgcagtggcgccatcactgcagcttcaaactccagggctcccgcgatcctcccacctcagcctcccgagtagctgggactacaggtgtgtgccaccacacctggctaatttttttttttaattatttttggtagagacagcatctcgccgtgttggccaggctggtctccaactcctgggctcaggcaatcctcccacctcagcctctcaaagtgctgggattgcaggtgtgagctactgcactcagcccaagagcactgccttttgctgtcctgcgctgctctttgcttagtttagggggggaaattagagctgatggatgatctctccgagccaggaggagggggctggcagggagcccaaagaaatgggctcagcagaggacagaaacaaggtgactagagagggagtggagaggggacgggagccgcactgtgacatcagccagtcccttatacccccttacaccttgagtttgagacctggccccacccaatcgtaacctctggctctcggccttctgatggccaccatggcacagcgtgtgtgagtggcactgggagaccctgaccatcgcccccacgggagctgcccctgtgcatggccaggaagcctctctgtgtctgtcaccccccgcaggtggagctggccctgctacagcgctcctaccaggacctggcctcgcagatcaacctcatccttctggaacgcctgtggtatgttatgctggagcagttcctcatgaagtatgtgtggagcgcctcgggcctgctcatggtggctgtccccatcatcactgccactggctactcagagtcaggtgagacccagggctccaagaggatccaggccaggggcctgtcccccataccgctgggtgctgagctcacgagggcccaactcagccagcccgccgcccacttctgctgccggggccaccgaggccctgctgccagccttgatgctttcagaggttgagctcgccttgcccctccttgttgccttttgccctgcgcgcacctcacgccctttgttaccactcagacaagcccaggactgcaagtcaggaacactacatgtcacttctccaggcacagataccctcacccacctgtccctgtcctcaacccaactgcgacttagaggtgggagaatgtgcggagtacctggagtgagccccttcatcactccagccttggtttcctcgccctgaaacagctcttgcaccctaaggtgttttagaggagtgggaagcctgttctacctgttattttagtgataagattaaatgtttaggtttctgcattcctgttgtttttgtttgtttgttttattttctttttggcttttgaaacaggagtctgactgtcgcccaggctggagtgcagtggcgcgaccttggctcactgcagcctcaacttcccaggctcaagtggtcctcccacttcagtctccccagtcgctgggactacaggcacaagccgccgtacctggctaattttaatatttttggtagagacagggtttcgccatgttgcccagactggtctcgaactcctggtcaggtgatcctcccgcctcagcctcccaaagtgctgggattacaggtgtgagctgccgcgcccggcctgcattcctgttttgttcctctgccggattgcaacttctgcatttgatttttagtccattagtggtcaccctttaaaaggtcaacacgcagccgggcgcgggggctcccgcctggcatcccagcactttgggagggtgaggcgggcagatcacgaggtcaggaggtcgagaccatcctggctaacagggtgaaaccccatctctactaaaaatacaaaaatttagccgggcgcggtggcgggcgcctatagtcccagctactcgggacgctgaggcagaagaatggcgtgaacccgggaggcggagctggcagtgagcccagatagcgccactgcactccagcctgggcgaaagaacgagacttcgtctcaaataaaaataaaaataaaaaataaaagatcaacacgcatacttgttaggttaatcaatagctccgccttctcctggaccttagaacgcagaagcagccccgtggggcatggcatcatagcccagccaagagttggatttgtacctagtttttcctctttgctatcgccttatccacacgtgttgaaactcactcgcatgtttgctgagttctgtgctcaccatttcgttcctacatctcaatttctcttctatgttctgttatcttcctccagatagacatgtttttagttttttgtttgtttgttttttaactcacaactatgctcaggacaaacagtcatcagtgcttctagttgtggttggtttttaaaaaaggttctttcagcaagggttttgtcatgggaaattcttgattattttattgtaattctttgtgttgtttagttttttgtttgtttgtttgttttttgtagaggcaggttctcgctgtgttgcccaggctagtgtggaactcctgggctcaagcggtcctcccgcattagcctctcaaagtgctgggattacagacgtgagccaccacacccaggctgttgtcattcttgattatttttgttgaaaatgtttctatttcacccttattcccaagctaaagttgagttgcgcaatggagtctaggtggactgttcttttctctcagccctttcacaatgtctcattgtctccctgcttcttctgtagctgctgacaaatctgtagctgctaacaaattgtcctccctgagtaccctgtgtttctttttttctgggtactttgatcactttctttctttttggcattctgcagtttcactatgacatgtttaggtgtcagtttttgttgattctgcttgagacttgttatatgtcctttgaatatttgagtttttcaatcattctggaagattctcagctattagcttttcagatattgcctgactctcattcttttttcctgttcttctagaactggcagccagtgctggacttctgactctcttcgttgtgtctttcggtttctgtttactgtttcccatctcacactgtctgtgctgaattctggggatgccctgaggccttcctgtttgctcattttccagttcaccagttttctctttggccatgtctaattggaattttgttcacatttcagtggctgttttgtaagttctatttcattctatttcaaataggaatttgaaaatggacatttcctttttcaagtagaaatgtcaggctgtttctgtgtcttatttgctcatctttttgactgctccttttatactgtgtatcaggttagtcatacttaccccaccgtctctatctgatggtttggttagcttcagttcttgggagtatcattcgcctgtcttctgtctgctggtcttcactcatggtggatcatttccttgtgggttttgcaacagaacttctatggggattggtgtggcctcaatggagggtgtaagtccaaatgtccttctgttttggccaagcactccagggtaagcagttggaggccattagttagtgcggaggggatggttcctgaattgagaggtggtttcatttgaattcatttgaactccaggcacattgttacaaattttcagaggaggctttttgttcattgggcatagagcccaggctaagcaaggaaagcttcctggtctttgccctgcctgcctctggggctatcaaaggatcacctggctgtctgcttctctttgctcccagaagtttcccttgctttccgtcaagcttggctctgctcgaaatagtgtcgtagtttacccagtttggtgggaagagggttttcgatttataaacagaagtctgattctctccctgttcctgtttccacctcggggcttccatgccctcaactgtctgtgtcatcctctgggtgactcaccaagaggaaggatctaattcggggactgcacatcaagggcagccttgatgctggcgtaggtgcccagcccagtcagcgcacctagccccgggcaccgagacagcccgcgagacagcacctgcagccgcttcgctccatggctgccattggtcacatcgggctgctccctgccctgaaggcttaggacttttctgagcctctgctgtgccaggctttgtgggctcctggccctgctctggtggtcctcagagccagcagcctttgaaggctgtgaagcattccctttcccctggcttgataggctctgtcctgtggccgtctgtttttttttggagggggagcttttgagatggagtctcactctgtctcccaggctggagtgcagtggcacgatcttggctcactgcaacctccatctcccgggttcaagtgattctcctgcctcagcctcccaagtagctgggactacaggtacacgccaccatgcctggctaatttttgtgtttttagtagagatggggtttcgccatgttggtcaggctggtcttgaactcctgacctcaagtgatccacctgcctcggcctcccaaagtgctgggattataggtgtgagccactgtgcctggtcctgtggccttcttatttccccaaatgccaggcctgctctgtcttggggcctgtgccaggagcactctttcctctgctgccccatggcgcagcccccctaggcaaggcccggcctgcccaccgccacctttcctgtctccttccctgccccactgctctcccaagcactcgacaccccgtcagtggcgcttttctctctccctgccatggactgcaagctccatggggtcagggatttttgtctgttttgtccctgctgtgtcccctgcatcgggtggctagtgagggctccaggtgcttcaaggaggtggagcgcactgggtgggaaggcaggctcttaccggttggaagatttagataagctttgctgggctggtgtgcaaggcaggtgggctcaggagatgggcagggcctgtggctcccactccagccctgaggccttgctctgtccagctctggggccctggccttattcacccaaggctccaagagaacctgcagaaggcagctggttctacgccaggatgccctgggcacaaagacttgcagacccttccctttgtccacagcgactgtccagctctcagaacacctggggaggagggctgtgtccttgagagcaccgtgggaaggaaggtccaaggccttcgacctttaggattcacatccccgccccgccagcccaatctagttccctggtttcccgggccaggcccctttccaccctgcatggccctgagcggatactgcgttccgtgtcttcccccagcccccagccaatgatccctgaggcttccccctcaggatcacacccacccctggatacagtcctcgggtccttcacaggacattcccaccacttcagccacaccccagcaccctcagaggcggccttcgcccttgctccccacctctgctcctgtggggaatctaaggatcaagaaactgagagtcaaggccattgatgagggtcaggggtgctgccacggggcctagagtgtgacagaaaagcaaattaagacaggagcagctcctgggagaagcagacaccaaacaatacggctgctggcccagaggtcaaaaaccatggcctagagggggcggtcaggaagtgggacattaggccgggcgtggtggcccatgcctgcaatcccagcatctttggaggccaaggcaagtggatcacctgagttcaggagtttgagaccagcctggccaacatggtgagacttcgtctctactaaaaatacaaaaaaaattcgctgggcttggtggcgggtgcctgtaatcccagctactcgggaggctgaggcacaagaatcccttgaacctggggaggcagaggttgcagtgagccaagatcacaccactgcactccagcctgggcaacagagcaagactccatctcaaaaaaaagaaaagaaaaaaaaaagaaagttggcgtttcaaagccaaacagctctgggcgttggatgacaaagttcagatgtgccccaggaggggcgacatcagtggtgcaggacagagggccggtggaaggagctggctgtacgtagaaacaaaaccagatgcctactggtgcatttaaaaatcaacgttattgagacgtaattaacatactatacaattcttccttttccatgtacagtttaaattcattcacagagttgtgcagccatcatcactaactccagaatgttttatttttattttatcccccaaagaaaccccagacccatgaacagtcactcctcattccctctctccagcccctggcacccactcatctgcttcctgtctctgtggatttgcctatctggacatgtcctagaaatggaatcatgtgctctgtggcattttgtgactagcttccttcactgagcatcatggtttcaagattcgtccatgtcataagatgaatcagtccttcattccttttcatggctgaataatattccattgtgtgcatagaccacaatttctttatccattcatcccttgatggacattttgggtttcttcatgttttggctattgtgaataacactgctgtgaacatccatggacaagtctctatgtgtgcagatattttcgtttctcctgggtgtgtagctaggagtagaattgccaggtcacatggtaactggacgtttcactttttgaggagctgcgagactgttctccacagtggctgccccattttaccttcccgccagcagtgttggagggttccaccttttcatcgtggctagcactggttatcatctcctttgtattctagccacctagtgggtgtgaggcagtatctcttggtggttttgatttgcatttccctgatgactaatgacgctgagcctcttttgatgtgttgagtggccatttgtatgtcttctttggagaaatgtctgttcacgtccttcgcccatgtgtgatcgggttatctctgtcgctgagttgtaaaagctctttgtatattctggatactgcaccctcatcagatgtgtggttcaccagtccagagttttctcccagtctgtaggttgtctttttcactgtctcgatattgtcctttggtgcacaaaagtgttgagttgaatgaggttcagttgatctgtttttctcttgttgctcatgcttttggtgtcctagtgaaggaactattgccatatccaaggtcgtgaagttttatcccattttcttctgagagtttcatactttgggccacactacacatcagcctgtgatgtgctctgggttggtttgtctgtatggtgtgaggggtccctctcctgcacatagagagaaagagagagagagctggttgccccggcaccatttgcagaagagcctcgcctttctctccagcggctcatttttgactttccgctgtctctgccctgcccctccccgccccgccacccacccctctggggctttgcagatgcagaggccgtgaagaaggcagccttggaaaagaaggaggaggagctggtgagcgagcgcacagaagccttcactattgcccgcaacctcctgacagcggctgcagatgccattgagcggatcatgtcgtcgtacaaggaggtacccctggcccagccccacccttgccatccttgccatgcttctctccctgcaactggcaggggctgagccagggtcaccctccctcaggtgacggagctggctggctacacagcccgggtgcacgagatgttccaggtatttgaagatgttcagcgctgtcacttcaagaggcccagggagctagaggacgctcaggcggggtctgggaccataggccggtctggtgtccgtgtggagggccccctgaagatccgaggtaaggctgtcccctccctatgagtgaccccgcccctgctgctgctgcaggtgctgacctgctgccccagctcctcctattcccgctccctcactcagggacctccatgtgcttctggcccatcccagtccacccaggacgggagggctgccgggcagggtctttgaggacttcggcctggtcgagctgggcccctggagggtttcctgcagagaggtgctggtccgcccgccttccttcccagacagtagctgccggccaccgtactgactcgccctttgagggcctcagcctggattattcattcaaaacaagggggatgtggtcccctcacccatgcaggacagcaagagaaagttccagtcagtgtgccagctgctggctgccacgggaggcaggtgctgcagaagggagtggcggcccagggcactgtattagacactgggggaagagttcagcttgttggaagacctggctgtgttccctagggaccctggaccacaggctgctggtcaggaaccagctggcatgctgccagggatgggaatgagggcgtgcagccaggggcacgcagactccccagaatgcagaggggtcgccaccactccctctccaccccagccccgctgtgctgtctctgcaggccaggtggtggatgtggaacaggggatcatctgcgagaacatccccatcgtcacgccctcaggagaggtggtggtggccagcctcaacatcagggtaggtccagcggggagggcgccagccacgcacatatgcaagcctcagcccttggcttcccgcctgtctgtgctggcaacagccattgtccctagatgtacgtggcaggtgggccaaggtcaaggtgagagaccaacgtgtctctgactgttcatcctggggcaacagaggcagggctcataaaagagactagtgataccaggattgaccaaggttcaccccggcgttcctggccctatcatctgatgccaactccccacactcctaagaaagccaagacccgggtgggggggctctggttcaaaccttgccgctcgacctccctcggaaggccacagcaaggaatccacagatcacctgtgtccccagccaggggtttggacagggctggggagtaatggagtgagggggagactggggtggagggacaggtagagaagtgacaaggaatcactcattcattcactcatttaaccaatgtgccctgaactctgagccgggcaccagaaacccgaggtaaatcaggagacctgcactcagggagtcttcactgtggaggggcactaaagtgttacaaagggtctccaggtagacagctgttcaagggacagtgggggtcacaagaagagtggtcagagtccctgggggtggtgggggtgggatgaagccttgcccaggagttgctgtgagcgagtgggcaggcagctgagggtagaggagtgaggggccgtgggcctgaggggcaggtcacgcaggaggaagcagagaggaggggcatgccagggaggagggggccggcacaggtggttacccctcaccgctcgcagcggcccctcctaggatgtcgggggagctgatcaccagtgagtccaaggaaggtggtttccaggctggccccgggcagcacaagcaggcaggggcagcgggcaagctcatggggcccctgcgcgcagggccacatatgctcagggagccgggtatgcgagatggggcaaggcccaggccccacccttcaggaggggacagtcaggtggcttcattagcatcctgtggctgcggtcacaaagcgttacaaactttgagtggctttcccagcagagatggcctctctcccggctcggggaatagcagtccgagaggaaggcgcaggcagggcgggcttctgccaaggaccgagaaggtgcctccgctcggggcctctgtcccagcttctgctctgctgcccatctgcgggcttccctggcttctgccacggcaggtcggcctcagcctctgtctccacacggcgctctccctctgggtgtgtccgtgtctccgtctcccctttctgtcaggacacaggtcacactgcattagggcccacccctctgcagaatgacctcatgcagacctaactcatcacgtccgcaatgaccctgtttccaaataagctcacactccgaggtagtggggattagggttcccacataggaatttcagaggacagagttccacccatgacactgcctgaggtaagctaaagaccacggcctcaagtcttcccaggagccccgtgtagcattgttgttgttaccgtgaacttcactgactccaggcccctggcctcctccctgcacacagcccgcctccagcctggccggcattttcccaaagtaggcatttcctagctccagcgaggaccatggagtcagtgaattgaggagcctgaggtccatgatgcagagcccaggggccactgtggcatctctgggccactctggcacctggggaggcagtggggtctgtactgtcagtctagagacataaagaaagtgctttttgggccgggcgtggtcgctcatgcctgtcatcccagcactttgggaggccgaggtgggcagatcgcttaagcccaggagttcaagaccagcctgggcaacatggcaaaccccgtctctacagaaatttttaaaaatacacaaataagccaagtgtggtggcggtgcctgtagttctagccacttgaaaaaaaaggctaaagtgagagggtctcttgagcccaggaggttgagcctgcagtgagccatgatcccaccactgcactccagcctgggcaacagagcaaggccccgtctcaaaaagaaaagaaagaaactgccttttgtccccagtgactcaggaggccaaggtgagagagtcgcttgaggccaagagtttgagaccagcctgagtaacatagcaagaccctgtctctaaaacaacatttaaaaattagccaggcatggtggcgtgcatctgtaggcccagctactcaggaggctgaggtgggaggatcacttgagcccaggagttggagactgcggtgagctgtgatcataccgctgcactccagcctgggcaacagagtgaggtctcgtctcttgaaaacaaagtgcctttcagggcagttccttaaagggggctgacagttgaccctgcacttggattcctggtgaagtgggagtcggatgggactgaggacggcgctggctgtgttggaacacacctactcattcagctgtggcagaataggcccttcctcttgtgctggcaccatgttctccaggcgtgtcagggcctgaggactgggccggggcttgtccattcctgtgtcctgggccaggcatttagcgagagccaaatttagctagggctgtggacgctggaccccatcccccaggccctgctgtcccttatcaagagatcaagaatggcctgcgtgctggcctcgggcattgggagcctctcaaggctggtcaggaggccatagggtacgggaaggggcctgcgctctctggcgtcagcggctgttgcccctgcaggtggaggaaggcatgcatctgctcatcacaggccccaatggctgcggcaagagctccctgttccggatcctgggtgggctctggcccacgtacggtggtgtgctctacaagcccccaccccagcgcatgttctacatcccgcagaggtaaggaagcccgtgcgcctctcctccacctcttcctgcctgtgcgctcacacatggcttcctgcagaggcccaggaagtggtgaagagtcagcacctcaggagaggacactgaggcactgtccccagagccagagacgggctgtggttcctgctccctccaaacccgcccgatccactgccctgttttggatctgtgtggggtgtgtgcacgggcggcgatgtgagcgtgtggatgcgtgtgagcgtggcatgtggacactgcctgggaggcgcagagtatcttgggggaggcagagccggcccttccctccgtggacacccagctttcccacaggccctacatgtctgtgggctccctgcgtgaccaggtgatctacccggactcagtggaggacatgcaaaggaagggctactcggagcaggacctggaagccatcctggacgtcgtgcacctgcaccacatcctgcagcgggagggaggtaggaggcctggggctggcagccaccctttgtcccaccctggcctctcccttggcctccagggagtgaagattacctcaacatccagagtctaaagtgccaggtgccacggggcggggcagaggctgctaccagggaggaccaacaccacacagatggccccaggtgctctagggaagggggcacctagcagggatgtgcacctcactgggggacccaggataccctctcccagagaaaagaggtctgagctgagccctgcagaatgctgagtggttaccccgtccggaagccaggggcagcagggcggagtgcgttccgaaggcttggtggtgcgagaggctggctcacagagggccctcgggaccaggcgggagcctaggctttccctgagcaggatcagacgctcttggaaggaccatggggtggtgggcaggggcagcctgggaggggcaggcacatgtgtgcagtgatggctactgtcaagaggtttgtgcagacgcttggagggggctggggccagcagagtcaggtggattcagagatgagttcactgaaaaggaggccagactgagctgttgtcttgtcctgggcttatcaaggaatactgcttgtccacagtgtctgtcgggccggaagagcggaggaggagagggggctgcagctacagggacacagtagatggagtgttcagttctgtctttgaattctgagcctctgggttctgcttccagcctgcactgctgggtgcgagatggccctgggcaaggacctcgccttgctggggctccccttcacggttcaagggcacgggcaccaagccctccctcggtggcaacatgagaagaagtggctcctgcaggaaatggccggggtgttgtcacctgcctgtggaggaagcggggacacaggtggcaatggcagtggagcagcccctggcccggccctgcctcttgctcctgctgccctcagcctgggagcacgtggcccctcccgcctctgtggcagcctgaatgcccagggcctgtggccggccagcatgagccattaggatggagttgagctgcgaggaacagaacgggcctccccgcaatagtggctaagatcatctgtgagtttatcctactgagctgttaggtcccaagagagccaggccacggttgccagggctggccctgctctgtgaaggccccagggctcgaggattttctaccaggtcactctgctgtgtttggcctccgttcccaaagtcacctcatgatccaggagggctgctgcagccctcacatcatgtcccaggctgtaggatggaggaagtagaagggaaggggcaaaaggtatgtgccttcttttaaggaaggttccagaagccgccatattgaatacttacagttatatctcattggccacaacttagtctcatgctcacacctcatcacaaggccacctgggaagcgtaatctctactctgggtggccatatgccctgttgccacttctagccctgggccgctggggaaggcagcatgggcgagaagacaggaagggccgcttctgccgcagcgccccgacctaatggagcagccggctcacctgctcgttcaagcagcccactcgagccttgccaaagtgctgacacggggcagtgacaggaggcccaacccctgtgggtgacaagcccccggtctggggagagcactcaggccgctctggagctctgtgccaaggaactgtatgggtgccctggggctgccataaaccgcagggatggattgtctcctagatccagcagtccgagatccaggtgccagcagggtgggctccttccgggtgccatgacagaaggatgtgttccaggcctctgtcctcggctcgcagatggtccacttctccctgtatatcttcacctcatgttcccctgtgcatgtcttctgcccacacaccccctttttatgaggacacagtcatattgaattagggtccactctgatgacctcatcttagtgtgatcacctctgcgaaggccctgtctccaaataaggtcacactgaagtgttggggcttggactccaccgtatctcttctgggggaaggcacgattccagtccccactcctccatgattaatgcctgtcagacagacaaggacgcagaggcacaggggccctgtcgtcacagctagctcattcccgcagctcccccagctccccggctggcccccgggtctgggtgctggtggaactgagccaagaccattgcccccgcctaggttgggaggctatgtgtgactggaaggacgtcctgtcgggtggcgagaagcagagaatcggcatggcccgcatgttctaccacaggtgagcactccgggccggcaggctccctggggtcccctggaaggggaagtagcagctgtggggaggcctgggctcagtggagcctgagccgggctggggtgttgggccctggagggtgcacagactctcctctcggcccggacccccaggcccaagtacgccctcctggatgaatgcaccagcgccgtgagcatcgacgtggaaggcaagatcttccaggcggccaaggacgcgggcattgccctgctctccatcacccaccggccctccctgtggtaggtgccctgtctccctgcctggggtcggtgggagtggctgcctgaggggaggaggtggcctggcgggcccggcagcagcaggcggctgtcatcagcagcccccgtgccgtgcccctgaccctgtccctctcctggccaggaaataccacacacacttgctacagttcgatggggagggcggctggaagttcgagaagctggactcagctgcccgcctgagcctgacggaggagaagcagcggctggagcagcagctggcgggcattcccaagatgcagcggcgcctccaggagctctgccagatcctgggcgaggccgtggccccagcgcatgtgccggcacctagcccgcaaggccctggtggcctccagggtgcctccacctgacacaaccgtccccggcccctgccccgcccccaagctcggatcacatgaaggagacagcagcacccacccatgcacgcaccccgcccctgcatgcctggcccctcctcctagaaaacccttcccgccctcgggaaagtagatgtggagggtggcgccctgcgtaaccctcgccctgtccctcccactccctgggggcgctgttccacagtgactgggccctgtccagggcagtgagtcctctactttgctccgtggaggaagctggggtacaaggggcccagtgctggccacacagcagcgcagccgagccccaggagcccgtcaggccacagcccctggcactgcaggtggcctccctccagagactcgagtccccatgattccctcctcgtcagtctctcaaagaccccatggtccatcccctgagggtggtcagccaaggctcccgttccgtgggatgccataaaagccgcccagtgggacccacagtcacacagagcgcctcacctgcatcctctcccccacaagagccccaaagatcccacgggagaggggagagggacgcacagcactgcctgccaagcgagaatgcaggccccgccccctcggcccctcaccacctctttctacagcctaatttattggattccctattcgtagccatctccgtggccaatgtgactaccgtgccagcagcgggggcggcccagcctctgagtcccgtggggccccggctcccaccggtgccaaacccagcccctgcggccgtcaccccgccagcctacactgccagccgccaccggggcacacgggcctctgcttgccagccaggagtgcggacaccatgttcccagctcagtgccaaagaggggtcaccagggggagctgtctgcggagccagcgcctgcccgagagagaccccaccgccaccgtgtgcctttcccgggccctcagccctcgggccgggcaccacccccagtccccccagtaaaagcctccactggcaaatgcagtccttcc

SEQ ID NO: 1122 - DNA, 226221 bp, Homo sapiens
agaggaagaagacggggaggaggcgcgagggcggaaggggacacttgactttccctctggtctcttcgggggccgcggggaagggtcggcgcggacggagctcggggcatgtgggacccccgcgcgttcgagcggcgctggcgggccgagttccccggggcggaggcgccggtcccgaggctggagtcggtgcgggacgcggagcgggagctggagcgccgcagactcaacctggagcggctgcaacaggtgctggcggaggagcagctcaaagcctcgctcccgcaggccgcgctggcccggggcggcggcggagactccggggagcccgggcgccccgaccccgaggccgagtctccccgcggggaccccgggcgccccgaccccgaggccgagtctccccgcggggacctgcccgccgggcccggggcggccggagaagccggcgggggaaggagctgggccgacgccgtccaccggcagctcctgcagccccagctgcggttccgggcccgggaggacgacgcgcccctcggggacccccaggcggctcccggcacggacgaggggggcgacggcggcgaccacgacttcgagatggtggatttcaacgagaagttcatcctcagccactggctggtggccccttgccggttcgggacccgcgagcgggcgcgcagcccccgccgctggatgcacctgatccccggggggcggcggccgcagcgggggacccgcgacctggagcagcgggaggccgaggccaagggccgcccgggctcgcccctcgccgcggaggagacccccgggcgcgagcacctgcccccgtggcggcgccgcaggttcctgcgggtgcccgagcgggactcgcccggccacagctcgccggagagagacagcgacggcagccggcacagctccgaccgcgaggacgacttctccgcaggtgggcgccccccccagaccccgctcgaccccgccgcgcgccccccaccccgggctgccgggaccccttcccggccgactccgcggccctgtttaacctcgagctcggggccggggagcgggcgggaaggagggtgagctgcgcccgtgtaccccaaagccacctgtggagcttagaaaacacgtgcaaggcgacgttaagctcgggcgactctatgaaaatgaactggcggcggcggcagggccggcgcccgggcctttgcgctttgcgctccgtggccctgacatcccccagcccctccctccggcctggcccccgccagatcccttggcgccaccgggtgctgtcacccttctgtctgtcacccctctctgcacacaccccaggggcttcccatctcccggaaatccccgatccttctgagctccgctttcctaaccgcggaaggccgaaccttccactccattttctgaacttagtctcctcttctccaggctgctctgtgtgttggggccacgtgcaaacttcagggaagggccacggccctcaccagccccctctgcggactcgttttcttcttagaaggcggcgcccggcctcttggctttctaggagtctgggagcaagagggcaaggggaggcttaggcccatctcgttttccggctggcctggtgcccagagaccatgtctagtccagcgtcttcactggataaaagaggaaaccgaagctcagaaagattaagtgctcgttggggtgagctgagaccttcaccgggtctcctgtcatctctctcccctcgcatctgctctcttttctgaggacagggcctgatcttagtcatctttgaacccccttctggtagtatgcacggtgctttgcagcagtcaaagctcaacgcataatggctgaataaatgattgcctggaattgagcgtccaccgagctctttctaggtcagggagtgggaatggggctaaggaggagaggtcaggtggggatgggggtggcgtgggagccctttgctgtgtctgtgaactgtcacggtctcctcagccacgcggaaagcagcacactggtggtgtccggttgggtcaagctgcaaccaggaatttaagatgccttcctgctcagtgaaggaggaaaaaaaatcattgatgctgggattgttccaaaatctccattattagattttatctggatgagtttgcatttgaatgaaaaactgtccactttgctaaaagcacagttggaaggtccatcaagtcatctgttttgatcaattacacttattccttagcaaagattggctgtgtttcccacaggcaatgctcttgccgcccatgctggtaacatttttatatgtctctttaacttaagggaagagcctgaagatttcaccctagtgccaagttccaaatgcccttggtggaggctacccaactggccccagctgcttcagagctggctgcaatcctgtctccccccagacccacatctgtcaccctccccggggtgcccagtacactaggcttttcccagggagtgatttttatttctgtgagtcgtcgcctgtctcccttaggacactctagcacatagggcaccttgatgcacgttagaaatcggcgctgcccctgggaattgcaaaagatgctcccctctgggtggaccaatgataacaagagtcaccttcctcaggactacagacgtgagctggggcacgtgtctggcactcacggctttggctagtgatgcctgggctagatttcaggtgccattccagccccctctgcagggcaagctcctgtggcacactgcacagctacatgttcgggttctgcctctgtctccaaagcctcctcgtgaggaagtgagtggggggtggacttgcacttggttacatgcatgcacacataaatgcatagcagcacatgtatatacatggtacactgccacatacatgcatgcacacatatacacacacacctgcacacgtatacacatggtacactgtcacatgcatgcacacacacgcacagcagcacatgtatatacgtgacacactgccacatacatgcatgcacacacacacacctgcacatgtaaacacatggcatactgtcacatacatacatgcacacattcacaccttcacatgtacatacatgcacacacacctgcatatgtacatgtgcacagtgccacataaatgcatgcacacacatacctgcacacctgcacacgtatgtacatggcacactgtcacatacatgcatgcacacacatgcacacctacacgtatacacatggcacagtgccacatacatgcatgcacacacatacacacctgcacacgtatatacatggcacactgccacatacatgcatacacagacacctgcacatgtacatacatgtgcacactgccacatacatgtgtgcacacacaatctaggagaaagagccctcaagcatacagggaggcattagagtggagcgattaagggaaggcgttttcgcactgtgggaaacagctcattgaaattagtgcagttggcaacagaagcacccgggcggtcttccttggccacccttgtcctttgttgcttcatttttctctacagcattccccaaattaccaccgtggatgctgcaattttgcatgtgggtcttattcactgtctccctccagtcaaacgcaagctccaggcaggcaggggtttttctctctcaagatgagtgcattggacacggcgagtattattctgtttttggactccgtttcggttctatgcggacgcgtatgtgtacactgggagctgatgtagaatgtatttcttgctgtgagatgaacaaaaaggtttgaaaacacggaattaaaccatgtttctgaagctagactgcctgtgtgacattgggagaagttatttgacttttctgagcctgagtcccctcatctgtaaactgaggctaataagcacctcttctctcctgctgttgatatgagaaataaatgggtcatatttctaaagcgttttggacgggtcctggcacgtaggaagcacccataagtgttaattaaccactactacaggtcatttttctttgagttgcttcttctttctttttcttttttgtcgagacagagtcccgctctgtcacctagactggagtgcagtggcgtcatctcgggtcactgcaacccctgcctcctgggttcaagtgattctcctgcctcagcctcctgagtagctgggatgacaagagtgtgccactacgcctggctaatttttgtattttagatgagatggggtttcaccatattggccgggctggtcttgaactcctgacctcaggtgatccgcctgtctcggcctcccaaagtgctaggattacaggcctgagccactgtgcccagctgagttgcttcctcagagcttcccactccccagtcattctggatcgcagatggtttggttttccgtggtgcatgtggctggtacaatggctcacacctgtaattctagcactttgggaggctgaggtgggaggactgcttgaggctgggaatttgagaccagcctgggcgatacagtgagaccccatttctttctttcttttcttttctttttttttttttttgagatggagtctcacggtgttgcccaggctggagtgcagtggtgccatctgggctccctgcaagctctgcctcctgggttcacaccattctcctgcctcagcctcctgagtagctgggactacaggtgcccgccaccacgcctgtctaattttttgtatttttagtagagacagggtttcaccgtgttagccaggatgatctcgatctcctgactttgtgatccgcccatctcagcctcccaaagtgctgggattacaggcgtgagccaccgcacccggtgagaccccatttctaagaaaaaaagaatcagtcagttgtggtggtgtgaacctatagtcccagctactcaggaggctgaagtgggaggatcacttgaacccaggaggtcgaggcttcagtgagctatgattgtgccactgcactccagcctgggtgacagagcgagtccctgtctctaaaaaatatgaatgaataagatacgtgtttccccctcccagcaaggctctgactctttctagaacctttcaggcagcagggcaggactcaaggcagaggtcatcttggctcatgagtctctttttgctggattggcctccaccagcaatcacactcattatctgcattcagaggtccttaaggtcaggttttattgggcaatccaggctttgccttagtctcagggtttcagagagagaacacgtgaggcctcacctacagaggcccagaagcagaggtgaaaagggcctccatttccttttagatgaggggcagattcctaagccaaaacacatttcggcttttttgtccgcgcacgatagcaacatcagagtgtaaataagttagtctgccaattcgcttagtatcttccttctagtaccttgtagccttgcttggtaccaggaaagacaaagaccaggccgtgttggtgtggtgaggagtgaggggacgggcagagccaggatcagctgtgttgggtggtgcgtgctgtgaagtcaggcctgcctctccccaggtgtgagaccaccggccagccactgacccttccaagcctccgtctctgacagatgggaataataaacgtcgctaaccctaagggcttacttttgccagctcctgttctgagcacttcgtatgctttaattcatggattccacagagcaccttcgggagacaggcactgatagggtttggctctgtatccccacccaaatctcatctcgaattgtcatccccacgtgtcgagggagggacctggtgggaggcgactggatcatggggcggtttcccccgggctgttgtcctgatcacgaggggagttctcatgagatctggtggttttaaagcgtttggaagtttcccccgcaggcttgcttgctctcctgccgccttgtgaagaaggtggttgcttttcctttgccttccgcggtgattgtaagtttcctgaggcctccccagccttggggaactgtgagtcaattaaacctctttcctttataaattacccagtctcgggtagttctttacagcagtgtgaacacggacaaatacaggtgctgttattatttccattttccatgagaatcacgaggcctggagaacttcaataacattgcccatggtcacccagcttataagtagcccttaggatttgaagccaggcagtctggcttccaggtccatgctttcgcacaccaagctgtaccgcctcaaatattagtacttccctctcaggatagttacgaagattaaatgcaagagaataattaaagagtgtagcagaacacctggcgtagagtgacgatggagggtattcgtgtctctgtgtgtgtgtgtgtgtgtgtgttgttactgattttttgtttgtttgagatggagtcttctgagtagctgagattactggtgcccgccaccaagcccggctaatttttatattatttatttttttgagatggagtatggctcttgtcaccccggctggtgtgtaatggcaagatctcggctcactgcaacctccgcctcctgagttcaagcaattctccagcctcagccccccgagtagctgggattacaggtgcccgccaccacacccggttactttttgtatttttagtagagacggggtttcgccatgttgtccaggctggtcttgaactcgtgacctcaggtgatctgcctgactcggactcccaaagtgctgggattacaggtgtaagccactgtccctggcctattttattttaagacagggtcttactctgttgcccaagctggagtgcagtggcatgaacacagctcactgcagcctccacctcctaggctcaagcgatcctcccacctcagcctcccatgtagctggaactataggcacatgccacgagccggctaatttttaattttttgtagagacggggtctcactatgttccccaggctcgtctagaactcccgggctcaagtgatcctcgctccttggcctccacaagtgctgagattacagatatgagccaccacacttggccctgagactttttatttttaatctttatgggaaatgaatttcctactaagtagtcatgttacctgaacctgattcatctgtaacctgatgggttttctgcccttcccatcagtgactaatgagattgttgctctaggaagaattccttgtgttcagtggatgtctgagtaacttaatttgaaggattgaattttcagcctcagctgtgatagagtaattttttcccatccctattgtgaagagatattaagaagccatttgaggccgggcgcggtggctcacgtacgcctgtaatcccagcactttgggaggccgaggtgggtggatcacttgaggtcaggagttcgagaccagcctggccaacatggtgaaaccccgtctctactaaaaatacaaaaattatccgggcagagtggcacatacctgtaatcccagctacttgggaggctgaggcaggagaattgcttgaacccgggaggcagaggttgcagtgagccgagatcacgactctgcactccagcttggtgacagggtgaaactccgtctcagaaaaaaagatgggatcctccatggtgctgttatcgttactcttcctcgatggtgtctttattgttgctgttataagtccaggaattttcagttggctaaaccaggctactgcttatatttgaatctctccaggtaataaagtttcccaagcttatttgtttgcctttctctccttttttacttaccgctgtccctactccagaggtgttttgcatcttcagaggaagacaacctttccaggtcccctggggtccctgatgcttccccgtcaagccctgtctctcttggcgtctgcaaagccaccatctggcttcttatattctgttttctacgcagatcctttctgccattgctcattccatccggcgtcttttcccgtgccctttctggcgtttgaagagccctcccgccttgacttccccaaaccagcccccaaaccaacccctcctttaagggctgattttccgtggaacctgggattggtcgataggggtttgctgtatatgacaaaactgaaaaaaagtagcttaaacaagatagaggcttatttatctcacatgtaacagaattccagcggccagcagtccggccgagagtatggtgactccatgatcatcaggaatggaggcttttcagtctttctgcttctctgtcctcaagctcacctcctggtccgaaatagctgctggagatccagccatcacattcacatttcaggcaggaattagaagaatgggaagaggagcgtaagagtgagtggtggctgtttgtctgccttttaaggcactttcctgggaacctctcttgacagtttctgtttttatctccttagtcacctcgaggtataagagaggctgggaaatgcagtattttatctgggtgtatggccacctcaagtaaaataggggctctgttacaaggaaaaatagaagaattgatattgcgtaggcagctagtggcctctggcacagccttttccaacgactccaacccatcttgcggttcttagagcgggccccacacggcacaattgtcttattattatgccatctattaatttattgagtcagtaaacaaataacaacggagccacggccctgtgcaaggcagtagccttttacatgtttactgtgaagagctgctctcaaactgagtggttagctgactcctggaaagcggggaccgtcgtttagaccccttttctctcccacaacagtatctttcacagggctgggctcatggccggcactcgataagttcctggttgattttagaatagtcacgaatgagaagttcagtgaaaaaaatacattccctgccttggtttactgtgctggaaaatgctggttgtgtaaggttcgtttttagcttgttctggttttgaggaacccattgcaaggagggtggggagtgggtcacctccaaacatcagggctgtgttgtagtcacagggactcgtcgtccaggtgttggggcagatttggctgttttggaaactgggctctgtataccatactagaatcataagcagaaatccccgtgaccacctgactttgcaccaccgctctgtgtagctgtatttacaccacgtgagtctgtcctgttatttctgcaccgcgtagctgcagagtaaatctgcaagtctttccgcagcgatcctgttcctgtcttcccattcgacgctcgctacagtcggcctgagataacactgtctgaggggaggctgcctggacctcacgtcgcgtttttcaactgctgagaaaaatgattactttaaattttttttttttttagacggagtctcgctctgtcgcccaggctggagtgcagtggtgtgatcttggttcactgcaagctctgcctccgggatccacaccattctcctgtctcagcctcccgagtagctgggaccacaggcgcccgccaccacgcccggctaattttttgtattttgagtagagatgggatttcaccatgttggccaggctggtgtcgatctcctgacctcgtgatccgcccgcctccgcctcccaaagtgctgtgattacaggcgtgagccaccgcgcccggccactttaaaatttttattgacacagagctgggaaggaactagagtataaagatactccagtacctactctctgcaaagcactaggtcaagtgctttacctacgctgtcacgttgaatttttagaacagcctcctattgggcagatggggagactgaggctctgactggtccaccagcaagcccaagatctcttagtgctaagtggtggggttattctttcctcagttttaaaaatcaattattttattttatttttttggggcatggagtctcgctgtgtcgcccaggctggagtgcagtggggcaatcccggctcactgtaacctccgcctcctgggttcaagcaattctcctgcctcagcctcctgagtagctgggattacaggcgagggccactgtgcctggctaacttttgtattagtctgagattttaatgggaggctggtcacataggcacatcgtgctatacaaccagccatggcaagaaaaaataaggaccgcaaaaatgaaataaatccagatgcacatcatcagtcttgacggcttatgcaaaggaaaatgatcagccttacaggatggttcattgctgcaggtgcaaggttattaaatcactaacatagtgagaaggatcctccttgtcacccatgagccaggtgtgtgaggccatggctgggcgtggtggctcacacctgtaatcccagcactttgggaggccaaggcaggcggaccatttgagctcaggagtttgagacctgcctggtcaacatggtgaaaccccatctctactaaaaaaaacaaaaattatccaggcgtggtggcaggcacctgtaatcccagctactcgagaggctgaggcaggataattgcctgaacccaggaggcagaggttgcagtgagccgagatcgcgccactgcactccagcctggacaacagagtgagactctgttacaaacaaacaaacaaacaaacaaacagatagaaaaggatactagaattaagcaccatgcaaacctattgtgttcctgatgtcattgacctagtagtatattaacttcatttgtgagggtggaaggcctaaagatctgattgctcagctctctgaaaaacgcgatttccttggggattttgcacatttggaatgtataaggaattcagagaagtctagaagtacactgcagttttccaaggtctctgttcactggacttgggggcccatcttggtgacctactcatcacttacagcattatttcaaatcataaagaacagactcatcggccaaagtttgaaatcgtccatttgtaatttggggacagctgactataatgagatggttttggcatgccgaatgttgagcagaagtgtaggttacacacatactttaatcagtatgttcccatgagactaaggatcattcttctcattctatattaacaagtctagagacattgagtcactggtctgtagtcacacagctcacaaaggacagagccaggattggaacacagctctttctggggccaaagttattctctactccagctcaccactaactgttaacctctccagactatagcttttcactttaaaataaggtgactggactagataattttcccgacagacctaaattttatggacgccagtaagttaaatgagctgggactacgtaccaagtaaggttaagagcctggctttgaatcagagaaactgggtttggatccaggctgtagccacttgttattttgtgtccttaaccaagttaattcacctgtctataagcttattttcttttctatacaatggggatcattgtacctcacttggtgttgcaaaggttaaatgaaataatgtagcatggggtccggcatgtggtgagctccgtataaatgaaaacagctactggtgtgatgatcaagagcatgctgtccgaggtagcggattacttgaagtcaggagttcgaggccagcctggccaacatggtgaaaccccgtctccactaaaaatacaaaaattagtcgggcgtggtagcacgttcctgtaatgccagcactttgggaggccgaggcgggcggatcacctgaggtcaggagttcaagaccagcctggccaacatggtgaaaccccgtctctgctaaaaatacaaaaattagctgagcatggtggcacgtgcctgtaatcccagctactcaggaggctgaggcaggagaatcgcttgaacctgggaggtggaggttgcagtgaactgagattgcaccactgcactccagcctgggccacagagcaagactccgtctcaaaaaaacaaaacaaaataaataagagcacgctgtctaggaccacattgcctgggttcgattcacggctctgccacttaactgctatgtgaccttgagcaaattcctcaacctttttgcacctcagtgtttatatttgtaggctaggggacgatgataatataatatcaatagtcaagtaagttggcgtgaaggttaaataagtcaatatgtatataacataccttgaaccagacctgacacatggtaaccactcagtacgtgttggttaattttatgattatccccactgttactagtttggccatgcttcttgctgaaatagactataaaggtgaaacatggtatcttgctcatcttgttgcctggtcataaccttaattgaaactgaaaatcctgtaatttgaataatccaagagctggaacagcgaagcatccaattacagacgcgtcacggctgcagccttgggggggacggtgaggcggccgcactgtgctctggggttggggtcctattacggagaaagcctcgttttgtaggcagctgcctcgccttctgtttggctgcataattgcgcctttccgttttattttaaagcatcttgaggaatccagagcccactcctgctgacagcagggaaagccgccgcatgtcccatctctaatgagcctccatgatgctctgtggccccacctaggcagcaggctgggctggcatccgctggctctctgagcacagctcaccatgctgggcttcattatggggctccctgaacacccctaggatccccccacgcctgtcctcattgtctcagagggcacagagtggcttcctgaatgccgagcttgttggtaacctttgtgggctggcagtgagcacgcagaaattaattattcatatcaatgggctgaaggagctgttgttcactgaggtgactcccctttggccaccagacccagagttccccagggtctttagacaggcagaggacagcgcagtccttagagacagctgcaacagcagggtggcacgtggccggccccaggctaagtgcagtctgctgatgtgctttgtttgggctacagagggttaaaacaaaattggatccatttaaaaccaggttttacctagcaatctggatttctggattttcttgaaagatgggaagatgggcaatgtgaatgggaggcattagttagagccgacgggccccttcaggctggacgtgattttgccaatggcgtcagctttcctctggcccctttctccacttctgacgtgagaggagtgagtctagtgcagggaacagaggaagactcggagctgggtttgcggctgcctctgctactcactcctgcgtgactctaggcaaatgacacagcccctgtgggccccgctctcctcctctggagcagggggttataacagcttccctacctcgcagatttgtgagaactgagcaagttgatataagggctgagcctggcacatagtaagttctatttaggtgttcagtttctttctttttttttttagtatttattgatcattcttgggtgtttctcggagagggggatttggcagggtcataggacaatagtggagggaaggtcagcagataaacaagtgaacaaaggtctctggttttcctaggcagaggaccctgcggccttccgcagtgtttgtgtccctgggtacttgagattagggattggtgatgactcttaacgagcacgctgccttcaagcatctgtttaacaaagcacatcttgcaccgcccttaatccatttaccctgagtggacacagcacatgtttcagagagcacgggggttgggggtaaggtcacagatcaacaggatcccaaggcagaagattttctcccagtacagaacaaaatggagtctcctatgtccacctctttctacacagacacagcaacaatccgatttctccttcttttccccacatttcccccttttctattcgacaaaaccgccatcgtcatcatggcccgttctcaatgagctgctgggtacacctcccagacggggtggcggccgggcagaggctgcactctgggcactttgggaggccaaggcaggcggctaggaggtggaggttatagtgagccgagatcacgccactgcactccagcctgggcaccattgagcactcagtgaacgagactccgtccgcaatcccggcacctcgggaggccgaggctggcagatcactcgcggctaggagctggagaccagcccggccaacacagcgaaaccccgtctccaccaaaaaaatacgaaaaccagtcaggcatggcagcgcgcgcctgcaatcgcaggcactcggcaggctgaggcaggagaatcaggcagggagcttgcagtgagccgagatggcagcagtacagtccagcttcggctcggcatcagagggagaccgtggagagagagggagagggagagctctttcttttcttttttttttttttgagacagagtcttgctctgtcacccaggctagagtgtagtggggagatctaggctcactgcaatctctgcctcctgggttcaagtgattctcctgcctcagcctcctgagtagttgggactacaggcacacaccatcacgcctacctaatttctgtatgttttgtagaaatggggttttgccatgttgcccagggtggtcttaaacacctggactcaagcaatctgcctgcctccacctcctaaagtgctgggactataggcgtgagccaccccacctggtcaagagcaatacttttttggtctgagtattttatttggagagaaatagaacttggccattgagcttatatacaccgagatagctgccacattacagggaaaaactatgtacaatcaaatatatatatttttttctttgaggtggagtttcgctcttgttgcctaggctggagtgcagtggcacgatcttggctcgctgcaacatccgcctcccaggttcaagcgattctcctgcctcagcctcccgagtagctgggattacaggcatgtgccactacgcctggctaattttgtatttttagtagagatggggtttctccatgttggtcaagctggtctcgaactcctgacgtcaggtgatctacctgcctcagcctcccaaagtgctgggattacaggcatgagccactgcacccggccaggatcagaatttttatattcaaatcttaaatctctcctttatattcctttaaattgctattaactgtagatattcagcattgttagggtaatttaaacttgttaaggaataatttaaatattttgcctaagtcatccctggggtggtggttactcatggagaggaaatatatatatatacacacacatcctagtatcatagattccaaaaactgatgaaagccaaaataaatgttcattttaggttgaagggacctgaagttagcttatctttaggtttaaggtggtggtggggggcggggaagtccaagtcctgtgtaacatttcacatctcaggccgggagcggtggctcatgcctgtaatcccagcactttgggagcccgaggcgggtggatcacaagatcaggagttcgagaccagcctgaccaacatgatgaaacctcttctctactaaaaatacaaaattagccgggcgtggtggcgggcgcctgtaatcccagctactcgggaggctgaggcaggagaatcacttgaacccgggaggcggaggatgcagtgagccgagattgtgccattgcactccagcctgggcgatagggcgagactcggtctcaaaaaacaaaaaacaaaccatttcacatctctccaaaatagaaacagcaccttagactgccttgttttcacagttttgtcgctttggaaccatagagtctgtcatctttgaagaagtgaaatcactgtggggttaagacagtatctttgcacagtttgcgtgcaatctctgagaagctagcacagaaggacttaggagttaagaccgtaacctttggccgggcgtggtgcctcacgcctgtaatcccagcactttcggaggccgaggcgggtgagtcacgaggtcaggagtttgagaccagcctgaccaacatggtgaaaccccgcctctacttaaaaaaatacaaaaattagccgggcatagtggcatgcacctgtaatccaagctactcaggaggctgaggcaggagaatggtgtggatctgggaggcggaggttgcagtgagccgagattgcacccctgcactccagcctgggggacagagcgagactccgtctcaaaaaaaagactgtgaccttcaagctctgcagccttaattcacaccaaatagtacctgcttagtcacctaaactatggccacgtcttcctgctctttggatgccccttagtttgctagttgggtctcaaatcatggtctttaggtgaattaatggccggcacagtgtttgggagaaaaacagaatctgcagcttcacatctcatcatttcctgggctgagctgtctcccaccctgagcatattacaaaattaacaggttttagaagctgaaaagtggaaataaccagctttcgtttctgggctgcagcttgtttagtgccacatcttggagaaagctctgtgcgtggttagatgggttgactctgattgtctgcagctccattcaaggatttgttgggggaatttcacactcctttagctgtttggtaaaagggtgaaaaatttcttaagtccaaattcccatcccagatacagcttctccccaagtatctctttatctctctctctcttttttttttttagacagtgtctcactctgttgcccaggctggagtgaagtggagagattttggctcactgcaacctccaacttctgggctcaagcgattctcctgtctcagcctcccaagtagctgagattacaggcgtccgccaccacacttggctaattttgtacttttagtaaagatggagtttttccatgttgatcaggctggtctcaaactcccgacctcaggtgatctgctggcctcggcctcccaaagtgctgggattacaggcgtgagccaccatgcccggccaatttttgtatttttagtagagacgaggtttcaccatgttggccaggccagtctcgagctcctgacctcaaatgatccgcccgcctcagcctctcagagtgctgggattacaggtgtgaaccactgtgcctggcgtctctttttgttttgttttgttgttgtttttttttctcttttgagacagtgtcatggtctattgcccaggctggagagcagtggcatgatcagggctcactgcagcctcaaactcctgtgctcaagcgagcctcccacttcagcctctcaagtagctgggaccacaggcatgtaccaccacacctggctaatccttataaaacttttgtagagatgaggtcttgctctgttgcccaggctggtctcgaactcccagactcgagagatcttcctgccttggcctcccaaagtactgggactataggcgtgagccaccatgcccagcctctttgtatctcagtttaacactgtttcattcttcttcttgttatagtaatttttttttttttcgagatggggtcttgctcttgtcgcctaggctagagtgcagcggtgcaatctcggctcactgcaacctccacctcccgagttcaagcaattcttgtgcctcagcctcccgagtagctgggattacaggcttgtgccaccacaccaggctaattttttgtatttttagtagagacggggtttcaccatcttggccaggctggtctcaaactcccgacctcaagcaatcagcctgccttggcctctcgaagtgctgggattacaggcatgagccaccgtggccggccttgttacagtaatttacatattgttcccaccttgctagcattgctgaaggcagataccaccttatggcagtaaaggatgcaggttctggggtcagactgcccacgtttgaacctcagctctaccccttactagctgtgaggatttaaaaacgttatttcacgtctctgtgccttggatatcttatctgtaaaatggatgtgttaatagtgtctatttcctggaatgttgtggggattaatgaggaaatctatggtaaaaaaatcacggtgaataatcaatcaataatgactcctatgattcacgctttgttttctaagcacctgccacaggacctggaataatttagataaggactgactgcaagtcagacacctctgcaggaacagcagaagaagatcgatttttggtggctagctccactgaaatggaatcccactgggtcagagcaaaacctggaatccatatttttatttatttttcattatttatttatttatttatttatttattcatttttttgagacggagcctcactctgtcgcccaggctggaaagaagtggagagatttctgctcactgcaacctctgcctcctgggctcaagcaattctcctgcctcagcctcctgagtagctgggactatgggcgtctgccaccacgcctggctaatttttgtattttttagtagagacggggtttcaccatattggacaggctggtctcaaactcctgacctcatgatccgtccgccttggcctcccaaagtgctgggattataggcgtgagccaccacgctcggccaggaatctctgtttttaacaagctcgggagatttttcagcagccagtccagcaccccagagtttggcaggctttgccaagtgcttgatatgaggtggtaaatgtctggcacctttaaaatatagggccctttccgtccatctggccctacaggttgatgttaaaaggatgcaaaaatacggttctaaatgtccttaagaggctaaggttggtctaagcaaagcatggaggaaaaagcccttttgagtttgtgtgtgagtagataggagttgccagttggttgataaagtgataaagtaatccttttgtgttaggagccaggaagcagagagagaggaaacagcccaaagtgatttttggcttgagagcaaacacaatagcagaaagctgagtgacacctggacgatagtgcagagaagctgagtgacacctggacgatagtgcagacaagctgagtgatacgcggacaatagcatggagaaactgagtgacacctggacgatagtgcagagaagctgagtgacacctggacgatagtgcagacaagctgagtgatacgcggacaacagcatggagaaactgagtgacacctggacgatagtgcagagaagctgagtgataacgtggacgatagtgcggagaagctgggtagcagagatggggtttcaccatgttggccaggctggtcttgaactcttgacctcaggtgattcacccacctcggcctcccaaagagttgggattacaggtgtgagccacggcgcccggcttaggtcagaactttctacgcaggtaaaaagtgacagcccccacagtaccaacacagctgggctgagcttccgcctctctagattctgttactttctacctctactttctccctgtctctctaagagatcagccgtcactaatttagtgctttactaatttaggtgtctttgccatgaaagatatgtgttttctttttttaatttgttggaggttctgaaggcactttggcatatgtatctgttttcttcagcagcaaagatcatcgtggagttaagatggcagctttgttgtgattcgtaaatttgctgaatttgtaaataactggggatacctgctggactttgataaatgcaactttttccagtgcttaaaagaattgctgcagaaaatttagagtgattatacctccaaactgctcaatgaaaaaggtcaacaaaacagtataattatctatgtatatgtgtaactcgtatgtgtgtggggtgtccacgtcaccaagtattagaaagttaagagagaaggatgtggacaataaaacaccacccacttcaaagcaggtgcagagagtaaggcattgtatgtctgattttatgaccacgagaggtcagttctgggctaccataaactctatctggaagaaagggattcaggcaccattcaagcaaactttggctgagcatggtggctcactgggaggccgagacaggtgaatcaccttagtccaggagttcgagaccagcctggccaacatggcaaaaccctgtctctattaaaaatacaaaaattagctaggcgtggtggcgcatgcctgtaatcccagctacttgggaggctgaggcaggaaaatggcttgaacccaggaggtggaggttgcggtgagccgagatcacaccactgcactccagcctgaaggacagagtaagacggtctcaaaaaaaaaaagaaagaaacaaacaggttaaaagagaaggatgtgaacaataaaacaccacccacttcaacgcagctgcagagagtaaaacactgtatgtctgattttatgactgtaagttccaggctcccatgaactctatcaattccaagctcccatgaactccatccggaagaaagggattcaggcaccatgaaggcaaactttattggcacctgcattgagccgagcagtgaaccaagggaaagagttcaaaattctgcttcaggagccttcagtgtaactgtggtactaggctagcaaacaggtgttcactacatacatgtatgtacaagagagacccatactaagcacttgccgtctttaactgacttggcaggcacaaagcaggctttttttttttttttttgagacggagtctcacactctcacccaggctggagcgcagtggcatgatctcggctcactgcaagctccacctcccgggttcatgccattctcctgcctcagcctcccgagtagctgggactacaggcgcccgccaccacacccggctaattttttgtatttttagtagagatggggtttcaccgtgttagccaggatggtttcgatctcccgacctcgtgatccgcccgcctcggcctcccaaagtgctgggataagaggcgtgagccactgtgcccggccggcagctccctcttgaacctctcccttacagagtcaacaagggagcagtggtcagcacttctctaccgcgacgttagcagagaactcgaatctcattagtagcaaggacttctctgccacagatgtggctctgagactggttcttcacaggctgacaggggaccgtggcatgcagtgatggtgtgggaatcacccgatcgagacgcagcacatgctgctgctgttcctggagaggagaatgtcaattcctcagctggccaagggcacttcacactggggtgccctgcgttgctgctcctgacacctagttccttcgggtcacaggcagagctgcctcctgtgtgtcagttgcccaggaaggccaggaagaacaagttctagtatccaccatttcctttccacccagggactcatctgggggtcgagcaacttctcttttataaacactcataactcaatgggtctgctacaccctcattcctagacaagagcagggaggccatctctgatatcaatggccccaaagtggttgatctggacaggtgcggtggctccggcctgtaatcccagcactttgggaggccgaagcgggtggatcacctgaggtcgggagtttgagaccatcctggccaacatggtgaaaccccatctctactaaaaatacaaaaattaggctggtgcagtggcaggcgccttgtaatcccagctactcgggaggctgaggcaggagaatcgcttgaacccgggaggcggaggttgcagtgagccgagatcgcacctctgcactccagcctgggcaacagagcgagactctgtctcaaaaacaaaacaacaaacaaacaaaaaacaaagttactgatcttctaagagaggctgtgcaaggaattacaaagtcataaggtctgtgattccaacagtttccttttttcccccacttctctttttttttttttttttgagacggagtttcgctcatgttgcccaggctggagtgtactggcgccatctcggctcactgcaacttccacctcccgagttcaagcaattctcctggctcagcctcctgagtagctgggattacaggcgcctgccaccattcccagctaattttatatttttagcagagatggggtttcgccatgttggccaggctggtctcgaactcctgagctcaggtgatccgcccgcctcagcctcccaaagtgctgggattacaggtgtgagccactgcacacggccaaatatatgcattttaaatacaaatagatattgtaaaattatccttcagaaaagttgatccaatttatattctcaccttacttctttttgagagaatctgttcacatttttttttttgagacacgtctcactgttgcccaggctggagtgccagtggcacaatcacagctcactggcacccttgaactcctgggctcaagcaatccttccaccttagcctgtggagtagtagctgggactataggcacgaaccacaatgcctggcttttttttttgtttgttttgagatggagtctcactctgttgtccaggctggagtgcagtggtgagatctcagctcactgccacctccacctcccgggttcaagcaattctcctgcctcagctcccgagtagctgggattacaggcgcatgccaccacgcccagctaaattttgtattttaagtagagacggggttttaccatgttggccagggtggtctcgaactcctggcctcaggtgatccacccaccttggtctcccaaagtgctgggatgacaagcatgagccaccgcgcccagcctaatttttgtatgtttttgtagagatggagtttcacaaatttcacaaaatatttttggagacatggtgaaacccaatatctggtgagctggtttgcagaccaactcaggctagcctcaaactcctggactcaagcaatccacccaccttggccattcaagatcaacccatctaaccacaagcacagagctttctccaagatgtggcactaaacaagctgcagcccagaaacgaaagctggttatttccacttttcagtttccaaatgcctgtcatcctggctactcaggaggctgagacaggagaaccgcttgagccctggagtccaaggctgcaagtaagctgtcatagtgccactgcactccagcctgggtggcagagcaagaacctgtctctaatattaataataataaattaatgtagtgaatcatgcagattgtctaatattgagctaggcttgtattcctgggataaaccctgtgtgatctaaggggtcaagggatgctcggttgtgcacgcaacaacccagtcacgtggcagttacactataaacgcatcagtgtctaacccatcacagtgatgtgacgtcagtggtcacatgagagctcactgcagcctcaacctctctggctcaagtgatcctcccgagtgtgccaccacacccagctaattttgtttctcttttttttgagacggagtctccttctgtcaccaggctggagggcagtggcgcgatctcagctcactgcaaccgccacctcctgggttcaaataattctcctgcctcagcctcccaagtagctgggactacaggtgcgcgccaccacgcccagctaatttttgtattttttttttcttttttcgagtcggagtcttgctctggcgccaggctggagtgcagtggcgcaatctcagctcactgcaaccgccacctcctggttcaagtgattctcctgccgcagccttctgagtagctgggactacaggcatgcaccaccacatccagctaatttttctatttttagcagagatggggtttcaccatgttggccaggatggtctccgtctcttgatcttgtgatctgcccgcctgggcctcccagagtgctgggattacaggcgtgagccgccgcgcctggccaattttggtattttttgtagagatgaagtcttactatgttgtccaggctggtctcaaactgctgggtcaagcagtcctcctgccttggcctcccaaagttctgggattacagacgtgagccactgcacccagccaatgcattttcaatagaaaagattcaaacgctactgaaatcttggaaatgaagcctgtcatttcctgtcacctctccccccgaccccactcctctctccagaaggagcctacagaacaggctgttacagatgatacattctcaggcctttcacggcatgcttagaagtatttgtatctcatttgtgcactgtttcatttattctcacaaccagagaggtttgtattattagcccccatttgatgtatgagaaaactaaggcttaagaatattgggtaatgtgccaaagggcccagagctcattacagtctcttaataatggggataaaaccgggtatggtggctcaggcctgcaatcccagcactttgggaggctgaggtgggcgggtcacctgaggtcaggagtttgagagctgcctggcttacatggtgaaacctcatgtctactaaaaatacaaaaattagccgggcgtggtggtgcacccgttatcccagctacttgggaggctgaggcaggagaatcactttaacccaggaggcagaggatgcagtgagccgagatcacgcccttgcactccagcctgggtgatagcgcgagactcagtctcaaaaaaaaaaaaaaaaaaaagaaaaagaaaaagaaaagaaaaaaagaggttctgagaaatgtgtagatgatttcactgttgtgcaagcatcatagtatattttacacaaacctaaatacaaaaatcacctggctgtatatttcacacaaacctaaatactaacatacagcccaggtacatagtaggctcaatggtatagcccactatgtgatatagatatgatatatgatatagacagcttactgctcctaggtacgaacctgtatagcaggtcactatactgaatactataggccgttgtaacacaatggaaaatgtttgtgtatctgaacacgtctaagcgtacaaaaggtacaggaaaaaatacaggattataatcttctggaccacctttgtatatatagtcctttcaggtcatatggctcaggactgtagtttgaacccatgtttctcattttttttgtttgtttgttttttgagacagagtctcgctgtgtcgcccatgctggagcgcagtggcgcaatctcggctcactgcaacctctgcctcccgggttcaagcgattctcctgcctcagcctcccgagtagctgggattacaggcgcgcaccaccacgcccggataatgttttgtattttagtagagacggggtttcaccatgccgtccaggctggtctcgaactcccaacctcaggtgatccgcccgcctcgtcctcccaaagtgctgggatgacaggcctgagccaccgcgcccggcccacattaagtctttaaatgccccgctggggactaagatgcccctggtggaatccaggagccctggtggtggcttctgcggggcccaggccgagatgagggagaggccgggaggagtggactgggctggcccgtgggccgggggtcggtggtttctcgtgccctcccctcggctccagggatttcccccgtgaagccggcaccgaggtccggacaggaaagcactttgagccatggatttatgtaaaatccagatgaggagctggagctggtttctcctcccgcgtcaggcggcgccaccggaacgtcctggcgggacacacactcacgccacaccccctggcgggtctctcgccacgcggagagagcgcccgagcccccttcgccccgcgaggttcccagggtgtaggcaggcccggggggcgccatccgccttcctgcgcgagtcacggacacgacccgggccctgaaggcgtctgcatcaccgctcccgccgaaacctcagaaaccgaggccgaacactcgccgggctcctcgcagcggcggcgggcggtgactcaggggttcccgactggattaaccgcgcctggaggactaggcagcccgggcgacttaccgcagcctcatcacgtgaccaggacctgcggcccccgcccccgcagactccgtccccgcgggccccgcccccgcagactccgtccccgcgggccccgcccccgcagactccgtccccgcgggccccgcccccgcagactccgccccccgcgggccccgccccctcaaggccccgcccccacgggggaccgccccgcaggctcctccccgcggaccccgccccccatggactccgcccccacgagccgggccacgccccctgaggactgcgcgggagcctggctggatccgaagccccttccaaggagtctccccaggatcctctgctcacaccggcaagtgaaagaccttttaaaaggaatggggctgggcgcgatggctcacgcctgtcatcccagcactctgggaggccgaggcgggcggatcacctgaggtcgggagttcgagaccagcctggccaacatgatgaaacctcgtcgctactaaaaatacaaaattagccaggcgtggtggtgcatgcctttaatcccacctacttgggaggctgaggcaggagaattgcttgaactcgggaggcggaggttgtagtgaaccgagatcacaccactgtactgtagcctgggggacagagcaagactccatcttaaaaaaaaaaaaaaagtaatggcaaaaacagcaattacttttgcaccaacctaaatagtagggttcgaggagagctgagctgaccactttctcccaagcagtagaagcttccttgttgaaacaagagggccatttgtctccaaggtctctgtttctagccgcagtgtttcctaaccctaaacctaggcctatttcatcaagggtcagcggattaggagtagatggctatggatcaccttccctttcctaacagggtcttcatttcatgcaacatttgctgccagctcatatgtgaagatgtgaaaagggggcagctggggcctttcagaagagggtcaggaatctgagcctctttgtccataggggaaatactctgaatgcaacttcatcatgagtgggcacgtgtgtgtttggggactgttcgctgaagagtataggaaagagacagccgggatcccctttgaatttgcaatttagaatgagtgatctaagatgagtaataagaggttggagattctcttttgaatgtgcgctctggggctctggtatggctgcatctgttataaagaggttcttgggccaggtgcggtgtctcacacctgtaatcccagcactttgggaggccgaagggggtggatcacctgaggtcgggagttggagaccagcctagccaacatggggaaaccccatctatgctaaaaatacaaaaattagctgggcatggtggtgccccaacctgggcaacagagcggctacagagccagactctgtttcgaaaaataaataaataaaaggaggcaaagggattatgtttttctagatggatcttctttctcttaatctagctgctcttgaatagcaaagtatgggaggaacacacttatgaagaatagcgttgctttgactttttaagaaacactagtaagcaggatgggcgcggtggctcacgcctgtaatcccagcactttgggaggccgacgcgggcggatcacgaggtcaggagatcgagagcatcctggctaacacggtgaaaccccatctctactaaacatacaaaaaaattagccgggcgtggtggtgggcgcctgttgtcccagctactcaggaggctgaggcaggagaatggcgtgaacgtgggaggcagaggttgcagtgagccagagatcacgccactgcacaccagcctgggcaacagagcgagactctctcaaaaaaacaaacaaacaagcaaaaatgctagtaagctacctctgcactgtcaatgagacacccccagaaaacaaagcgtgtggttttgctttggtgaccttcacaccacgcacaatatcggggttgccgtcatctcttcggcatcggggggcctgtttcactttttgtcttgtttttaccctccggagagaggtgttgtgtgtgtgtgtacccgtgttatacacgctcacataaaagtcagccagcatgatgataatagctgatactgcgtgagtgctaacgagggaacaggcgctgtgcggggtgtcttcttttcacgatctcgctgggtcttgttaacaatctcagttaaagcacttaccgtcattactgaagagactgaagctcagagaggttcaatacgtcgtgacaccaggccgtgaaccgggtctgttctgtctctagaacccacatcctgacctaaagcattgtgctttgcatccggagcagcagcctcgtggacaccggccccgtgaagctattgctgatgtgaacagtcttgagtgatgcggctgcctgaggggcaccaaagcctccccggctgctcctctgatcattttattcctatcagggtttggggcttgggccctgaatccaaacagaactttccctttacaagtcttcctgtactttcctccccccatcctccttagtttccattgctgaaaggctgatgtcattaacacagcccctcctgaggcaggtgggtgtccctggccaaccccaaggctttctcccagtctctaagctgtagccctgcccagaggaaggaagagccccaggaccttgtcaggagcaattctcagctttttactggggatgttatagatgaggctttatctctggtgtccctggacggtgctgataacccaggtcatgttcctgtctccccgaagtaaccggagacatcttgcaccatgaacaaaccgggatgacgtgcccgggtttccacctggggatccatctttgtgtctgcaccacggaggccccgaataaagtgaggtcatagctcatctaggtgaaacttgttctgcttgatgtaacgggaggaggggagaaaatgaagctggactggccaaagatcaggctgagaaattcctgggcacagtctggagagccactccaattacacctgtccctccattttcatgggggattggccccaggacccctggcagataccagaatcccaggacgcccaagtctcttatataaggtgctgtaatagttacatgtaacctaatcacgtctcccatagactttatttaaaaaaattttttttaatggagacagtgtcttgctatgttgcccaggctggtcttgaactcctggcttcaagcgatcgtccgaaagtgttgggattacaggcgtgagtcaccatgcctgcccccgacccccgtgtactttaacttatctctaggttatttttaatacctaatacattgcaaatgctatgtggttgttatgctgtattatttgtattttttatttttgtggtgtttttttttaattgttttcctcccaaatatttttgatctgtggttggttgaatctgagggtgcccttggatagggatagtgtggcttccagccaggtagagaaggccaactataaaactttgtaaagagctctatggttgcagcacaccaacatggcacatgtatacatatgtaacagacctgcacgttgtgcacatgtaccctaaaatttaaagtataataaaaaaaaaaagaaaaaagagctctattatatgcatacaaaaaaagctggaaaatgctaattggggtggtgtattttatgggtcacattttactcttttattgtctaaaagtttttaaaattctggctttatgacttatatgacagaaaaaaaaaactgaataaacttatagttttaaaaaattggccaggtgctgtggctcacacctgtaatcccaccactttgggcagctgaggtgggtggatcacctgaggtcaggagttcaactgaggtcagcctggccaacatggtgaaaccctgtctctactgaaaatgcaaaaattagccgggcgtggtggcgggcgtctgtaatcctagctacttgggaggctgaggcaggagaattgcttgaacccgggagggggaggctgcggtgagagtccgtctctcccttccacccccaaaaatatcccaccagctacagtgagctgtgattgcaccactgcactccagctggggaacagagcaagatcctgtttcaaaaaaaccagaaaacaaaaaccccaacagcctgtatgttttgtaccttccgtgtggcctcttggtggtctatgacatgggtacagatgagcccctgccagtgtgttaattgcagcgtggcttctgagccagcagcccgggtgatcttcctagccgggccctggctcactgcctctgtttcccccagtcttccctggcacctgcagagccagagagaggttttgttttccagaaccaggcattcgtgaccctgaccactcccgagcaaagttttcacaccttccccggccccctcagaggaatgaaggtctgggaggagatagggcctcgtccttggaaccaggcacctctttttttttttttcgagtcagagtcccgctctgttgcccaggctggagtgcaatggcaccgtctcggctcactgcaacctctgcctcccaggttcaaacgattcttctacctcagcctcccaagtagctgggattggccaggcgcggtagctcacgcctgtaatcccagcactttgggaggctgaggcgggcggatcccaagttcaggagatcataaccatcctggctaacacggtgaaacccacctctattaaaaaaaaaaaaatttgccaggtgtggtggtgggcaactgtagtcccaggtactggagaggctgaggcaggagaatggcgtgaacccgggaggcggagcttgcagtgagccgagatggcatcactacactccagcctgggcaacagagcgagactccatctcaaaaacaaaaacaaaaaaccaagtagctgggatcacaggtgtacaccgccacgcctggttaatattgtatttttagtagagatggggtttcaccatgaggccaggctggtctcgaactcctgatctcaggtgatccacccgcctcagcctcccaaagtgctgggattataggtttgagccactgtgcctggccggaaccaggcagctttgattgcagaatcaggcagaggccaggtgggaagttgccgtctgttggtgtctcaggccaagctctccttgtccagacagaacctcttcctttttggtcctgaaagtcacactaaaaatcagcagcagctcggccttgggcaacgtgccacgtgtaccgacgttggggttagtggtctttgcaggaagtcgaggttgtttgtgggcctggaaggaaatgtggcctgcctgcatgtacagcctcatgtgtggcctctgggagggggagcagacagaacccgcagccccagagactgggaggcttctctgtggcagcttcctcatttctggttagttgtggcagggggcagatacagtctcttttgcaaaagcagctcctttatgtccagaaggcgacagctcagctctcctttagggcccccaaagaactaacccacagcgtggggctgcggccagccgggcgcagcagcagcggcagtgttcctgtctcagctgcctgcagcatggctttgatctgacagtcagcagggtgtatttgcccccaaagccagtggtctgaggagcccagctccagttaggtcttaggtggggacaccatagatactgctctctggggaaaaccaagtcacggtctggtttgggtgagcgctgatcttccctccagtgtgatcccaagctccctgggatgttggctatagggagcaatcaggagccactccccaagactcaggggaccagcctggggtccaggaaagaagacttcccagcaccctccccctctctgctggtggtctggcactcccctcatgtgacaggcatgtggcttttgggaggaaagaatctttcacaatcagacagaaacagcaactgggaaaataactcatgcaggggtttgggcaatgagtgtctagaaggctgtgggccacgagaaggggattagggtgaggtttcatcagagctgtggctaagatccgaggaggctcctagagctcaaggcttcagaatgaccggtcaggagccagagggatggtgtctttctctctccaacctctcagaccaaaaatggggcatggggctgaccctgcccaatttttttcaaacccgcagagacagaggtttgaaatcattcactccagcattaagtggaggtggctccagctcagagcctccagccaaaccctccctgcgccacagcaggagatcacggcctgtttcccagaggctctgaaataggagtgactctccttaaagtgctccttgcaatgctcatccgagcctgggccaggcagggctgggggctgccttgaagaaagagatgcccccgagatccgataccctctggagcgttgcaggatgcgtctgtccaggaggcactgcaggggagccggggttcccggagcatttgggaaggtttctgagcagcacagggtccttccttaggaaggcggatcttggccgggtgcggtggctcacgcctgtcatcccagcactttgggaggccgaggcggatggatcacgaggtcaggagattgagaccatcctggctaacacggtgaaaccccatctctactaaaaatacaaaaaattagccgggcacggtggtgggcgcctgtagtcccagctactcgggaggctgaggcaggagaatggcatgaacccgggaggcggagcttgcggtgagccaggatcgcgccactgcactccagcctgggcgacagagcaagactccgtctcaaaaaaaaaaaaaaaaggaaggttggatctcctgtagcttcctgtggtgccgtcttctcccagggactcgagccttgttcagagcactgacaggatttttcagaaagttctgtgtgtgtggctgctctttggtaagcccagggcaacagagtcatcaacatttagggagggggtgggtgaggcaggatgtagagttaatacccagttttgtcctatgttcctctgagaagttagctaagaaatcttttctaaattaaatttaattaattaatttgttttttgggccagagttttcactcttgtcacccaggctggagtgcagtggtgtgatgtcagctcactgtgacctccacctcctgggttcaagtgattctcctgcctcagcctcccgagtagctgggattacaggcacgtgccaccatgcccagctaatttttgtatttgtagtagaaagagggtttcgccatgttggccaggctggtcttgaactcctgacctcaggtgatccgcctgcctcggcctcccaaagtgccgggattataggcgtgagccaccgcaccttgcctatttttttttttttttttgagacagaatctcgctctgttgctcaggctggagtgcagtgtcgtgatctcggctcactgcaaccttctccttcttggttcaagcgatcctcgtgcctcagccacctgagtacctgggattacaggcacctgctaccatgcctggctaatttttgtatttttagtagagatggggttttgccatgttgcccaggctcgtctcgcactcctgacctcaagtgatccctgacctcaagtgatctctccccacaatcccaacttgccttcccaaagttctgggattacaggcgtgagccaccgcgccggccaataattttttttttttgagacagagtctcgctctgttgcgcaggctggagtgcagtgacacgatctcggctcactgcaacctttgcctcccgggttcacaccattctcctgcctcagcctcctgtgtagctgggactacaggcgcccaccaccacgcccggctaatttgttgtatttttagtagagacggggtttcaccgtgttagccaggatggtctcgatctcctgacctcgtgatccacccgcctcggcctcccacagtgctgggatgacaggcgtgagccactgcccagccaataattttctttaaaatgctccttacgctacttgctgagcctgggtcaggcagggctgggggctgcctttgggagagagatacaccagagactagttaatcactgtagcagtagaaaacacccttaagggccgggcctgatggctcacgcctgtaatcccagcacttggagaggccaaggtgggaggatcctttgaggccaggacttttttttttttttgagacagtctcattctgtcgcccaggctggagtgctgtggcgcgatctccgctcactgcaagctccgccttccgggttcacgccattctcctgcctcagcctcccgagtagctgggactacaggcgcccgccactgcgcccggctaattttttgtatttttagtagagacggggtttcaccgtgttagccaggatggtctcgatctcctgacctcgtgatccgcccgcctcggcctcccaaagtgctgggattacaggcgtgagccaccgcgcctggcctgaggccaggacttcaagagcagcctgggcaacatagtgaggttctgtctgtacaaaattaaaaaaaaaattagggtcgggcgcggtggctcacacctgtaattccagcactttaggaggccgaggtgggtgaatcacctgagtcaggagttcgagaccagtctggccaacatggcgaaaccctgtctctactaaaaatacaaaatttttagggcatggtggcacatgcctgtaatcccagctactaggggggctgaggcaggaggattgcttgaacccgggaggtggaggttgcagtgagctgagaccgcaccactgcactccagcctgggcaacagagcgagactccatcttaaaaaaaaaaaaattagctgggtgtggtggtgcatgcctgtagtcctagctatgcaagaagttgaggcagggggatggcttgagcctgggaggtcgagactgtagtgagctatgattgcaccactacactccagtctgggcgatagagtgagacttgtctctaaaaaataaagaaggctgggcgaagtgtctcacacctgtaatcccagcactttgggaagacgaggcaggcagatcacctgaggtcaggagttgagaccagcatggccaacatggtgaaacccctctctactaaaaatacaaaacaaaacaaaaaaatagctgggcgtggtggcgtgtacctgtaatcttagctacttgggaggctgaggcaagagaattacttgaacccgggaggcggaggttgcagtgagccaagatcgtgccattgcactccagcctgggcgacagagagagactctgtctcaatcaatcaatcaaaatataaataaataaaaaaaaacaaaggaaacacccttgccaccagagatcctccaggtacaaacctcatgttcaaggagaaatcaaaagacccaggagcttgtcagatttcagtagaggagaaagaggatggaaattcatctttgtgtcttccttcctctgccacttcccctggagagtaagctttaagagctgcagtggccaggcgcggggctcacgcctgttatcccagcactttgagaggccaaggtgggcagatcacgaggtcaggagatcaaaaccatcctggctaacacggtgaaaccccgtctctattaaaaatacaaaaaaaaaattagctgggcgtggtggcgggtgcctgtagtcccagttattcaggaggctgaggcaggtgaatcgcttcaacctgggaggcggaggatgcagtgagccgagattgtgccactgcactccacactccagcctgggggacagagggagactctatctcaaacataaaaacacacaaacaaaaagggctgcactgatgtgcttgaattagcgtcagttgccagtactccctggcgtgctggaaaccgagctcttcctgagtgaatgtcgggcggcatctggtcaggatgctttcctgaagcttcaggactggtggccaggtacaattgctctggaccgagccagacccgagtgagaacttggctctgtcactcactagcagtgtgaacttgagcctcttctgtaaagcgggcgtggtgactgtggcttccacatagagaggctgcttgcgaagagtgaaggttacgtgcttaacagggtgcctagaacgtaaatactggcgatgctcgggacacgtcggccgaagggcgttcagcaaactcgccgggagagcgggggagtcctgaatccttgtgggtattgagggggagggggtgtcccagaaaggcttctctataaggtggatctaagaaaagctgctaattctgttgttttcctgaattcatgctgaggccacacgttagattagtagcagtttctatattcgcccccagttcccaaaagaaccttctccacagtcatccattctagctcttcgctccatttccacgtctgcctctgtgcaagtttttgttttgttttgttttttgttttgagatagagtttcgctctttttgctcaggctggagtgcaatggcgcaatctcggctcactacagcctccgcctcctgggttcaagggattctcctgcctcagcctccccagtagctgggattacaggcgcccgccaccacaccccactaattttctatttttagtagagagggggtttcaccatattggtcaggctgctctcaaactcccaacctcaggtgatccacctgcctcagcctcccaaagtgctgggattataggtgccttccaccacgcccagctatttttttgtatttttagtagagacggggtttcaccatgttggccaggctggtcttgaactcgtggcctcgggtgatcctcctgcctcggcctcccaaagtgctggaattacaggtgccttccaccatgcccagctaattttttgtatttttagcagagacgggatttcaccatgttggccaggctggtcttgaactcgtggcctcaggtgatccgcccacctcggcctcccagaatgctgggattacaggtgtgagcccccgtgcccagctcacattctttctagaagcttttagtcatcagctcagtttgaagtggtacctccctcctgccccctccataactcactgtccagaccactgtctgtctttccctctctgtgatttctgggcatgtctgaagtctattatcataagcagcctgggaaaaggaactctggtttatacagtagggctcagggaatattcagtgaaataataagtaacttttctgcagggcgccgtggctcatgcctgtaatcccagcactttgggaggatgaggcaggaggattgcttgagcctacgagttcgagaccagcctgggtaacatagtgagactctggctctacaaaataataataataataacttttctagccctgaaaacccattaaacttcctggaatataggaactgaagggcgggaaacaggaaagtttcccccttcctttatcagctactgcctgggacttacatctcttcgtgtcgaggtgagaacatcaagggacagacagggaaaggcagttcttcagagtcacacagcaagttagtggcagaaccagcagctggattcaggctgtgctcggtcgagcgctctttccctcctgttggagaaaggcagcagagtgttgaggggctcatgtgtggctcctggagcggtcgtgtggcacggtgacaatgaagtgatttaatacatgcagagtcctgacggcagcctgggcgcaggtagcaggtgcaagtgtttgctgcctcgtttctatgttaccctctgttcttcttccacacccctactgctttcaacaggcccctcatttcaggagacagaagaaccctgacactattgaatatgtcagaacaggccaggtgctcacgcctggagtcccagcactttgggaggccaaggcaggtggatcacctgaggtcaggagttcgagaccagcctgaccaacatggagaaaccccgtttctactaaaaatacaaaattgctgggcatggtggcgggcgcctgtagtcccagctactcgggaggctgagacaggagaatcgcttgaacccgggaggtggaggttgcagtgagctgagattgcgccactgcactccagcctgggcaacagagggagactctgtctcaaaaaaaaaaaaaaaaaaaaagaaaagaaaaatgctggaacatccagaacatcgttactaggcgggggtgagaagctggtgagaagctggcaggaagcttggcgggaggctggcgggaagctggcagaccaaccgccgtctgctggggtggctttctggatctttacaaactcgaggcccgagaaccggatcttgatttgacattggttgttttgtttatttctttgttttggtgacgggaacatggaaaggagcctctcccctgggcacaggcccccagcagacctggagtctggtgtcgcactgtatagcgccctcgggccggcgtggtggttaccatggcccagcgcaatctgcagccgcagaagtcgtgcccaagccctgtctgtcaggccctgcagactcgctcaggccagccccttgggagcgtgagggcccagaatccatttctatcatatttctcccatcattgaactgaaagccagattttccatctgtctggttggaggttcatcaaagtcattcctgggagctggtgactcacagcttcgcctgcagcgccgtggggcagaggggttgagcataccgtgagcaaccagcatcttctttctcggaatcccagcagacggcgagagcagacgggacgggcacccacctagaaactgctttcttcccagggaagagctactgtttacctccctccccgaaacataagtttttttgtgtgtgtttttttgagatggagcctcactctcttgcccaggctggagtgcagtggcacgatctcagctcactgcaacctccacttccgccttctgggttcaagcgattctcctgcctcagtctcctgagtaggtgggattacaggcacccaccaccacgcctggctaatttttgtaattttagtagagacggggtttcaccttgttggccaggctggtctcgaactcctgacctcaggtgatccacccgcctcggcctcccaaagtgctgggattacaggcgtgagccaccgtgcctggcctaaaaacaagttttattgcaaatttgggacaggcctcggagaaggactctgagaactgagaccgaagttcccttagtgggctgaaccatttctgggtttctatgccgtttccatgttggagcctgattggatagaaaggagtacagcctccaatactggctgctgaacaagggaaccctgtgcactggggaattttcagttagggttttttgtgagcagttagagaattaattggaacagcaattctcccaccccaaatcccatcctaggggccatttgttctttctttgcatctttccagagagggtggtcattctcgacgcgacgtctcaaccagccaaacagttcttttccagctggtggaggtgggctgggtggaacacctgtactgcctcattccaggctctttgtgaccaggaatatgcttggtcattcattcattcacacttgctcattcattcactgaaactatttgtgcaaggtcctggggttacagtgaataacagatgtggttcctatcctccaagagacctcagtctagcaggagagacaggcattgaacgtttacaagagtcctgagcattcagaagcagggaacgacgcaggccttcctggtctggtgggtcgggaaagctccctggaagacaagatacttaagttaagaccagaagggagagtaggagttacccaggcagagtgggggtagagcgtttttgccagcgatgtcaacctatgcaaaagttccaaggcaggaaaaagtagaagagagcaaggagcagaatgtgccagatgaagctgaaaggggtgcagaggcccggccacaggttccttaggccaccaaaaggatgtgcgggtctctatcccgacagcagtgactcgggagactgaggcgggagaatcacttgaactcggaggcggaggtttcagtgagccgagattgcaccattgcactccagcctgggggacaagaacgagactctgtctaaaaaaaaaaaaaaaaaggaagccatagacaggtcttagtaagagaggaatgacatgctacatgtgttttaggatgtcttagagcaagccttcagttgctgttagacactgggaaactctttcctctaattgatcttcatatctttgatgtcagtctcgtgagcctgggactgctccaaccaacggacccagccaaaacgtggccactgtggccggagtctcacccttcttcactctcctttcgggagaacacgagtcatgtgtgctagtttctcgtgccagctcctggcaccggactgtgtgttcatgagactgagctgaccagctcaggacaaggtgccaagagcttggggaagaggaaattaggagtcacgaggtttcacgatcagaacccgaaagtgctttatggaaaatttgcatgtcctgggtgcagctcagcctaagagaagctggtgcagtgatttcaggggtgtgtgtgcctggcttctgggaggggcagccagaggcaccggcttcccttgtgaaggcagctgggtcagactgccccctccatccacccctacgtttatgaaggcgaaatttagtaggaaggacatccaaagcagtgtgatggggaaagaggaccagctgggggtgagatgggaactcgccatccgccatcctgttttccccaaccaggtagagttctcaacgctcttggcacttacaacagatgttctgtagggcaagtcctgtaggacattttaagatttctggcttctgcctactgaaggctagtagcgacccctagttattgtgacctctttttttttttttttgagacggagtctccctctgtcacccaggctggagtacagtggtgcgatcttggttcactgcaagctccgcctcccaggttcaagcgattctcctgcctcagcctcctgagtagctgggactacaggcgcccgccaccatgcccagatgattttttgtatttttagtagagacggagtttcaccgtgttagccaggatggtctcaaattcctgacctagtgatctgcccgcctcggcctcccaaagtgctgggattacaggcataagccactgcagctggcctattgtgacctctttaaatgctcccacacattgttatttttatttacttatttgtttttttgagacagggtctcgctctgtctcccaggctggggtgttagtggtacgatctcagttcactgcagcctcgatctcaagtgattttccggcttcagcctcttgagtagctgggactacagatgcccgccaccatgtccggctaattttgtgtttttaatagagacagggtttcaccacatgagccaggctggtctggaactcctgacctcaagtgatccgcctgccttggcctcccaaagtgctgggattacaggtgtgagcctctgtgcccggcccaatttgataatattttatttatttatttatttattttgagagggagcctcactctgtcgcacccagattggagtgcggtggcatgatctcggctcactgcaacctccgccacccaggttcaagtgattctcctgcctcagcctcccgagtagctgggattacaggcacccaccaccatgcccggctactttttgtatttttttaaagtagagatggggttacaccatattggccaggctggtctcgaactcctgacctcagctgatccgcccacactggcctcccaaagtgctgggattacaggtgtgagctgccacacccggcccatttgaggatattttagtgaaggttttgtccggcgggatgatcattctccccatgtcactcctgggggcttctgctctctccttcccagacggagctcctcctgactcccccagctgtgttcccaacagcagcctgcagccctgtgtccaagctggagatttttgtccaggcacttgcgggccgcttggctggaagcctctggtggccgaggtgctgctgtgcggccgccagatggcgctggggagcccccactctctgccgcaggacgggcagaggcaggactggactgcagagggaacttgccttgaagaggcctggtccttaaagagacacagcacacacggcccgaccggcagccccagagcagaggctccactgatggcaggcgcccctggctaggctctgaggttcctttgccctcgccttgctgaatggtgagccgctgcctctcggagcccgtctccttgacagcctgccctcggctcctgcagccactcctgggcctgatggggacagggccagcctggtgggtggtgtcagaggtcctggcagagcagcgtaggcctgggatgcgtctgcagaattctggctgaacgagcgaggagcacggccagcttcggggccgtcgtgaccacaggagggcagagggccagcccgtgagctctgaccccagctggacgtgctcttgtttcccttggggctaaggagattggagccactgaactgaatctctgggttttggagacttagagaatccattggactcttctgctggcgtctttctgaatgctgatggggacttggtggtaagtaaatgagtagggggctccaggccctgctgtcgagccctcggacggaccctttgggaaaactctgctgttgacctgtgggtggtgtcatctgagccatgtcaggtgagggccacgtgagctggggcttggcgagagaccctcctaaaacggtggctcggggagtgcataatctaagccagcggctctgcccaggatgctgcccttgctgtggcccctggccatgggaacggggcttcaactcggcccctgggaagtgtgtgggggcgtgtggggagtgtcacagctgcaaggacctgatgtcactgtgctttatcctgcagtgatgcctagggaggcagtgagggggtgaatgcagctccccggggagcaggtccacatcttgccagggcagcaggtcttcccatgactcaagctgacacaaaagtttggtgcagaaatgactaactgggaagggcttccagttcacctctgttgcctgtagatctcactggctgctggaaaagccgggaggctgagcagagggcaggtgagaagagggcaaaagacagactcataggctgagacttcacccttacaggtgacactgtggaggcctggggaattttcttctttccccagactggagggctgaggatgaatcttagaatagtaaatgctggccgcacatggtggctcacgcctgtaatcccagcactttgggaggtggaggcgggcggatcacctgaggttgggagttcgagaccagcctggccaacatggcgaaaccccatttctactaaaaatacaaaaaattggccaggtgtggtggcgggctcctgtaatcctagctactcgggaggctgaggcaggagaatcgcttgaacccaggaggcagaggttgcagtgagccgagatcctgccactgcactccagccaggcaataagagtgaaactccatctcaaaagaaagaaaaaaaagaatagtaaatgctgctttactgtaccaaggaaatgggaatagagcaaagcacggaaaacaggccaccccaggatctgacaggagagtttgtattctgctagtgctcataggaggcctggaggtcgtcttcttgatccacctgggcacataccttcttttttttttttttttttttttttttatttctttctgagacggagtctcactctgtcacccaggctggagtgcagtggcacgatctcggctcactgcaacctccacctcccaggttcaagcgattctcctgcctcagtctcccgagtagctgggattacaggtgcccgccaccacgcccagctaatttttgtatttttagtagagacggggtttcaccatgttggccaggctggtctcgaactcctgacctcaggtgacccgctggcctcggcctcccaaagtgctgggattacaggcgtgagccactgtgcctggccctgggcgcatactgtctacagatgtgaacactgaggctggaaactcttgagattggccggaggcattgaagaagtggggtttggccgggactggcatttgggagattgtcactggactttgttcagcttgtctccagggtcatctggcctgctgtagtagatatggttttcttgggataccagttctctttctactttatcatcagtggccctgggagggttctgaaataacgctgcctgcctccctcgtgtagctccgatttcttcctccctgagtttaacttcattctgtttattcattcattcactaattgccgctcaatgcagagattacacacgggaaccctggattcagacttggttcatttccaagcatcgccatctgctagttagccaatggcttagcctctctgcacctcaatttcttcttctgtgaaatggagataatagtaaattggcttattgtaaggattacgtgaaataacctacgtaaagcagatagagcagtgcctgacacttaagaagcactcagtagaccaggcacggtggctcacatctataatcccagcactttgggagggtgaggcaggaggatcagcttgaacccaggagttcaaggctgcagtgagctgtgagaatgcccactgcactccagactgggtgacagagcaagactctgtctcaaaaaaaaaaaagcactcaataactgttagctgtcattaattttatttgttcaatgtgcattattgaatgccgatctgctgggcgctcggcagaaagctgatctggaggcaccatgtggtcatagctgtgctgggagtctacctgagccttgttcacccactgcgctgagcactgggtctgcccagtgaggaagatgcagtcctggtttttttattttttatttttgagacggagtcttgctctgtccccaggctggagtgcagtggcgtgatctcagctcactgcaagctccacctcccaggttcacaccattctctcgcctcagcctcccgagtagctgggactacaggcgcccgccaccatgcccagctaatgttttgtatatttagtagggacggggtttccccgtgttagccaggatcgtctcgatctcctgacttcgtgatccacccacctcggcctcccagagtactgggattacaggcgtgagcaactgtgcccggctctggcttttttttttttgagagggagtctcactctgttgcccaggctggagtgcagtgacaggatctcggctcactgctgggattacaggcacatgcaccacgcctggctaatttttgtgtttttagtagagacggggtttcaccatgctggccaggatggtctcgaactcccagactcaggctatctgcccatctcggcctcccaaagtgctgggattacaggcatgagccaccgcgcctggccagtcccagcttttaaggacctgatgggccagtgagggtgcaaactctcggttttttggtcatcacagtctatttttggttttggtttttcatttgaatgtagagggccccactccctcccacccactgtgtattcagcctctgcacgcaccggggctccctgcctggcccccgcatgggaacatatttttgtcatcagcggtgacctctgggtgatcaaggaagcagagactcctggggccttcctgtcgtgtgcagtggagctgagctgctaacatgagaagggaggaaatgtggagatacccagttttggttctagggcccgtccccttttttctgtcctggccaagaaccaaggcttctaccttgattggtagaagcaagagttggtcgttggagaggccgtgagtagcacgtgcttgggaattaggagcagggcaaatagccttgaaaatgggatgtaccttcttcccactcagcccctcgtcattaacccagtgctcctggcggtgcacccaaccatgaaatcccctttaagtccagtgatgaggcaggagcaggcaggtcaccctggggttggagagccgcagacagtctgagtgcacaggctggagggagggctgggagggtggagagcactggccccagggactgtctggggaatgcttagaaggggcctggaggaggcagcgtgatagatgggggttcagtgccttggggagcactggctggtccccacccggtccacatttagctgaatcaggaaggtctgtctgccacagctccccgctcctctgacagattggggttgatcgctggggttagagcacttcagggtagcatcacctttggcaaagcccggaggagaaggactctttaactccttccttcccagcgcgtgacgttggatctccccaactcctcagtgccagggatgcggaggtttctgttcccacccaaatcactgtggtgctcaaaggctcacacacttgtctctgtggccaaggttagcatctggccgtggtgttaacatctactggaagccatccaacaaaggcatcaagggaatctcgaagtgactgccctttcctgagacacgttgtctgagacagacgtctggagatggaagagggttgacagggtttcccagagggtggtctctaaccccatggacccgcagagatttctcaggaccttcagcacccggtgatcaccagttagctggccgtggaggcagtatgcgtggtgtttaagagcatgaacaggccgggcgcggtggctcacgcctgtaatcccagcactttgggaggccgaggcgggcggatcacgaggtcaggagatcaagatcatcctggctaacaaggtgaaaccccgtctctactaaaaatacaaaaattagccaggcgtggtggcacgtgcctgtagtcccagctactcgggaggctgaggcaagagaatggcgtgaacccgggaggcggagcttgcagtgagccgagattgtgccactgcactccagcctgggcgacagagcgagactctgtctcaaaaacaaacaaacaaacaaacagaaaaagagcatgaacagagtgccagggttcaagtcccagccctcacttaccctctgagtgggttactcagctgctcagggcctcggttttctgacctggaaaatggagaaaacagagataacagtgacattcacggtgagatcacgctagtgaacgaaacgctaagccgggcacacagtcggtgttctgtgttcgttatcagaagtttcctctgtagagccctcaagatttgtctctccctctaccctctatcgtgttgtggagtggagggtccgagagtgccaggattggacagaatgtagacagaaaaaagcaaactatggcaacgcgaaggaaagcaactgccacattttagcttggaggatgctgaaaatagcttgttcaagcctttgtagataaaaatgtaaaatgtacgcaaatgtatgtgactcacgcagaagcatacatccatagctccctcacagtcagcgccggatgtggccatcaggaaaaccccacagtgtggggagagggcccgagcgttcttgcttgttgttgttttgaggaggggacggtgctgctgcctcctgggctggtggctcctggtggcggcagctcacgcccgtttccacctttcccctgggctgtcttccgagagttccaggtgggaagaagagatgcccttggcccctcatggctcctccggcctcgcggtcctccgagagcctgctcgttcccttcccatgccgaagctctatttctggagcgtctcattggagatgcacgccccctccctgccaagctccaggtgcctgcttggccctcccaatcctgtgtgctagtcagggacggtgggagggtgacagctgcagggaggggcggcaagagacagcgctggtgcctgagccaggaggattggggcggagggagccctggggacgcagggacgggctaataatattgaaaaccacttctgctgcagccacctgtagaggcttccccacccagagcatcatcctgtgcgtctcccaggggctccccagcctgtgatgagtgggtgacccccatctcccctggggcagctgcagaggcctctgcccaagcagcttatggggcttcctctcagcatcctgggggaggagctgcttctccccttaagaactagatgtgtgtgtgtctgtttggagtgatgaggaccgacccccacacccctccagcgttctgcgggtgccgaccacactgcccccggcaaaggccaggctgacttaaccttcctggtaggcctctgtagggctgggctcccagaagttttccccttaagctgcctggggatggggtggggtggagacagctccggtatctgaaatgtcactatctggggtaccgggccccctgggtgggccccactgcttccctttccctgggttcaggaaggggcttcagccccactgccctggacccccctggcctgactcccctcctgtccttccctgctccagggtcgcttggcccaaagaggtctgtggggaagctgccatggctcccacagaatcagcccacaggagacaggcatggggcccccaatctcttcactgcccttgggcgagggggtcttccttagagggaatttcgtctctaaacggtcatttctcaggcctcttgacccgacttcccaccatttctaggtgatgatgcaaacacgatgggctttccaggccgcggctcggggtccccaggaggggtcctggaggggaacgcgtggagcccttggggcttctcctggctccagtttgtcctccgcccaggaggggcacatgtgggactgtcctggccccacagcccccgtgacttcggtcctcccgggtctccacccgcccccctccatgtgtggcgggaacggccgcgctcagaggtcaggggtgtggaaagggacgagcgggggaaggttcgggaggagagaggcgcgtcccgcggcgcgcaggacgttcaccccgtgggtcccgcagcgggtctggctggggaggggcccggccgccgctcccgcccgcgaagccgcgcttggagatcccgggcgggaggtgatgtcacccctgtgggctcccgggccccccacggcacctggtttgcggatcgccaggatcctgctgagcccggcgcgggggggacgagggggacctgggtctgcgccgccgcctggagaccccccgagacccccgcggcccctcctcgcccagcgccggagccccgctgcccccttagcccggccgggggcgtcctgcggagggcggagcctcgagccgattggtccctccccgccccgcccccgcaccaaagccccgcccccgcaccaaagccccgccccaccacgaagccccacccccgccccgccccccgcgaagttgctcatcggttccgggatccgcagctgggctcggcgcggccgctggggccgggagggttcgggagggttttgggggctcccgccccgccctcgcccctgccccggccgccccgcgctcctcccggggacctggttcccggcctcctcgcccctccgcgctcgcaacttcggcctcccccggctcccgcccgctctccctcctttgttgcgcgatgagggtcgggtttcggatctgaccgagccgccgccgcgggatggagccgctcagccaccggggcctgccgcgcctgtcctggatcgacaccctctacagcagtacgtgtgccgggcgggggcgggaccccaggatcgggatcgggaccccaggatggagatcgggaccccaggatcgggatcgggaccccaagatcgggatcgggacccaggcaccgggctggtccggggagcgcgggcgggggcgagatcggggtccggatcggggtcgggttgggaatcgggatcggggtcgggacccaggagccgggctggtctggggggcgcgggcggggggtccccagagaggattcctgcggtccgggggcggggaccgtgggcggaccgagccgagagctgcgtcccccctcccacctgttgtgaacccggcctccgcgagcctcaggggagggaggcccttctgggtgctgcccccgcccctggaccggcagcttctctgtccaggctgaagccgaaaggccgttttgggagcagtcgttggcacccgagtttgccaccccaggggcaccgggtcatgtgtggttcagggcccaggggttcggtgctggggtgggatcgggtgggaggggagacggggggtgcagatatccgcgggggccgtttggatgcgggagctgaaaatcccgggctcagcaatctttcctgccagcctcatcaccacccccaccctcatcatcaccaccaccctcagaagaaaaaaaaaacaaaccttctcgagttctccaccccctcgctcccaaatctctctggatcatgtgattgctcttgcatggccccgggggatgcgtaactgatcacgggtaatggtgtgggggggcttggggcgaaccgagagccgccccccgcccccaccaccgcaccttgctcctgctccgttgctagaaaggcaccgccccttctccccacccttccctgagacacctttcccgaaagctctcagggattaggaagagggtcctcctgggcttacatagtggatttcgcccttcctggcccacgtgagtgggaccctcccactctctcagcacatctcccaggcaggagttgggggaggcacgtggggccacgtggagcctggttcagcctgattctaggcactggatgccatggaacaggagcgttttctttctttttttttttttttgagacggagtctcggctctgtcgcccaggctggagtgcagtggcgcaatctccgctcattgcaacctctgcctcccgggttcaagtgattctcccgcctcagcctcctgagtagctgggattacaggtacccaccaccactctcggctaattttttgtatttttagtagagatggggtttcaccatgaggccaggctggtctcaaactcctgacctcaggtgatccacctgcctcagcctcccaaagtgctgggattacaggcgtgagccaacaagggcatttgtaagggtcatcccagctagagttccttgataagtcatatggggggggtggggggagtagagaagggtgatgccttgagccccaaagccttactctggaggctgtgtggtacccaacattcaacctctgacctcagcatccccttgggtccaggtcattccctgtatcttcttctccacccgcctcctcctccatccatgttccttcctctcctccccccaggagctgtccttgtgatggttcattctgctttggtttctcaacatcaaaggggcaaagccggatcccctgggcataggtcctgtgccaggtgccgccgctccatctgctccttcccctgcagaggccagcgtcgttgggtgaaggtcagggcccatggctgtgtggcatgtgcgtgcacgtgcgtctgcatgaatgggggcacacatctgttcggagcgcagatgcagatcagctcctgacccggaggcaggattagtggccctctcttagctgtgtgcttgcaaacagccgtcataacaatgcctcagattcacgcgtgcttatgttcctgagtgtttctggctctttgcaaaacccagttcttgtttccctatttcccgaagcctggaatcgtatggaaccctgtctctagctttctctgcagcagaagactcctctgagctgatcatttccaagtcttccataccccaccctcttcctcccacgcctggagcaaaaaagcaaaattgcctgaggccaccttgaaaattcctgaccagaggaatgccagaaaagggaattaggccaaggcctcttagggggttctgttgggcagccctgattcaggcagattggcacctgagctgtctaccctcctgctgctgccctggcctctgggcggctcctggggtggcctggatggtgggtgggagggggcactgatgtggccgcagtgtgaggagtccctgcctccctcttcggaacagcttagtggagagctgtagcaggaggcttcccggggaggtgctgtgcagtcatgtttgggctgttagccatcaactttcctcttgacaagagcctaaattaaaacaaatacccgagctgtcatttgcctggcagcaaggttttgtggctcccagaggaagttcctctgcttctcaggaagctgtttgcttacaaggctcacagtcctggggtgacaaatctccacaaatgccagatccatcgggaactgtaaagggggtatacccagggcacagggtggcagtgtgacttagagatgggaatgactcggtgttagaggttccctgccttcctctctctgagcattgttcctggtaacaatgataatagcgtctcctgagcacctactgtatggcaggcactgggatagtcactttctctttctttcttttttcttttttttttttgttttttgttttttgttttgttttgagacggggtctccgtctttgcccaggctggagtgcagtggtgcgatcttggctcactgcaacctccacctcctggattcaagcagttcccctgcctcagcctcctgagtagctgggattatgggcgcctgccaccacaacccagctaagttttgtatttttagtagagatggggtttcaccatattggtcaggctggtctcgaactcctgacctcaggtgatcttcccaccttggcctcccaaagtgctgggattactggcgtgagccactgcgcccggcctgtgctaggcactttctatccattctctccaaatctcacaactctgcaactcttacagagtaggaaagtgaggctcagttagcataaatcatagacctaagatcacataagtaacaaatggctgagctggaattcaggttgtaccctagaataatgaggaggatcccgagtaccacctgggtatgtctgagtttattcaaggtcttgggatgtcacggaatgggggacgccattctctatggtcctctgttgcagagttctccctgaaacggtccagcagggtaaatggcttcaatggctctgaccccaacctggccctgtgcctcttgcaggacctgggggctgggcctggagcccaggcagggacagctgaggctgtctgaacccactgaggctggtggctctctgctcctaaggtgccagcctgccagccagcccctcccctcacacacttcttttttttttttgacacggagtctcgctctttcacccaggctggagctggagtgcagtggcactatctcagctcgctgcaagctccacctcccaggttcacgccattctcctgcctcagcctcccgagtagctgggactgcaggcgcccgccaccacgcccggctaattttttgtgtttttagtagagacggggtttcaccgtgttggccaggatggtctcgatctcctgacctcgtgatccacccgcctcggcctcccaaagtgctgggattacaggcgtgagccaccgcgcccggccctgaacacacttcctgcctttggggttggcagttcattctttctggttttgacaggaggagtgtgcccacttccatcacaggtttggtggtcatttgatgagggttgggcagcaaaccctccatctctcctatggtagaagtcctgaagggctgcggtaagtgtgatttgtctgcctcaaggagaagagttggatcccagctgccaggggccctggggctgatgggagcagagtcctttccctgtggagtgacagatggtttcagacatcccccagttcttgtgtctgcgccactcatttgcctgtattaatgtagcaatgtcagtttcacccctcagtaccttacctttctctccctggggttgctatgatgctctctctgaggctctcttttttttgagacagagtctcgctctctcgcccaggctggagtgcggcggtgcgatctcggctcactgcaacctccgcctccccggttcaagcgattctcctgcctcagcctcctgagtagctgggattacaggtgcccgccaccacacccggctaatttttatatttttagtagagacggggtttcaccatgttggccaggctggcctccaactcctgacctcaggtgatccacccgcctcggcttcccaaagtgctgggatgacaggcgtgagcccctgcgcccggccatgttttcttggtcataatgcctctaggtctttaatcaccctttctgctaaacacgtatcatcttctctttgttatttttttattttatttttttatttttattttcccaatcccatgggattagattggattaaatgggagcggagtagcccaaaatgggggtggaggtgtgctctgacactttcttggtccctgggattctccaagcagatctggatcaagacatacgtgtgccccaggcaggttgatcatctggcacctcttcaactggaaaatctttatatgtgtgtttaggacttacttagaggagaggcagaggctgtatttaaagcctctccctttgccacttcggcctccatttggtcccaagtaatttagtcctggtgtcaaacataccttccctgctgagccaagcaagagcctgcagtggcttggccgtcatggaaggcagaacgtgaccatctgttgttactagagcctgctttttggagctcacttctcttaccccaagcaacatttccaagggcgatttcattctcttgtgatattttcatgccctttatagattcagtgccccatctatgggccaggaaagtatttggagcagtggagatgtaagcctgtctccaggtgagcatgagcctacctcagtttctcatctgagccccacattctctacaccagggaccaagccactggtctgacagcctgtgtgcgtttgatcagagcagttcagttctcggggccgcatcagacccctccgtgtgtgctagtgagcgcctgctggcagatgcttgcttgttttcggaatagcccagtaatttattcctttttgtcaacaccggcccataatcttcatggctgctggagtctcagaggtggggctggcagaagaattaagtcatctactcagagaaacttaggtttctgtggttgtgattgttggctactgttgttcttcgggaaaaggaaggaaatttgtggggaattggctggaagatgctgttaggaggatggaagatggggaatggcggggaggctctgcctcactcttgcgagtaggatggaagacttgttctctgtctgaggtatgatctgctttctgggacaattccggtaccttccttcgtagagggagggcatgatggctctcgtgggtgttgtgtggattaattcatatttataaagtgctttgaaggtgaggagagctattgagcagctcagctgtccagctcattgcgctcctcatccgggaaagcctcgagggactgggagaggccggcacaggacttaggaaggggcagggaatgtggcaggaggaccggcaggaacagggtatcagaccagctctgaggcagcgcctcccacagcggctcccgcacaggccctccataggtgttggttgtctgagtacgggtgggaaaaagaaaactcgagttcttggctccttgagctcctccccgcagcagaaacccctgttagctgaaacctgtcagctggcccgtccatgcgtttccggctgtgtggatttggtcattgtactcgctcgtagtggagtcagagacccccaaagggagtctcgcgcttttgccagggtttatgattggaggacttcactgccagcgttggcggcagctgtttggctgagcttgagccctttgggcgcaaacctagggcaggcggcttcaagacaaccctgcgcccactgcccctgccaggcccttggtggtggcgggtgttggtgatgtgtggggggtgggctgaggtgatgtgttgagtggactgaggtgatgtgttgggtgggctgaggtgatggggggggtggactgaggtgatgtgttgggtgggctgaggtgatgtgttgggtgggctgaggtgatgtgttgggtgggctgaggtgatgtgttgagtggactgaggtgatgtgttgcgttgactgaggtgatgtgttgggtggactgaggtgatgtgtggggggtggactgaggtgatgtgtggggggtggactgaggtgatgtgttgggtgggctgagatgatggggggggtggactgaggtgatgtgttgggtggactgaggtgatgtgttgggtgggctgaggtgatgtgttgggtggactgaggtgatgtgttgggtggactgaggtgatgtgttgggtgggctgaggtgatggggggggtggattacctgctctgttctatattcttggcacttttctccaagtgactgtttgtaccagggggagagttctgcagctcacccatctctggggctgtgataggggaggctgtttgtgacatgtgaccttggcttgtccccacatgtgagaaagtccattgctgctgtggggagtagcttgcttttcttttcttttttttttgagatggagtcttgctctgtcacccaggctggagtgcagtggggcaatctcggctccactgcaacctccacctcctgggttcaagcgattctcctgcctcagcctcctgagtagctgggattacaggcatgtgccaccacacccagctaatttttgtatttttagtagagacggggtttcaccatgttggccaggatggtctcgatctcgtgacctcgtgatccacccatctcggcctcccaaagtgctgggatgacaggtgtgagccaccgtgcccggcccaggagtagcttgcatttcttagggcaagatatggtcagttggggacatgacgctgctgggagcagcgggaatgttccactggtccctgaagcttgaggagaacctgacccagagaccttgtgaagggggaaggagaaagaaatcaggccaataggcaggctacggaaggcacccccgtatggaggctgaagataatgcccaatcccacccctgcctgggcatttggcaaagagccctttgaggcgggaccatctgaggccgtggccacttgtggatggagcagcgggttctctgtccccgggtcgagacctgactggggcctctcgcccagttttttgtccaggctttatcctgtgtcctcctcctgcccttccttcctccccacacacactagaccgaaagatgaatctgggtttactggctgtatggaaaatgtcagagtcagcctgggcttcagtagatagagccagatgtggtcggctctgtggtgacctgattgattaatcgggtgccactcccctctttcttcatttttttgagacagattttcactctcgttgcccaggctggagtgcagtggtgcgatctcggctcactgcaacctccgcctcccgggttcaagcagttctcctgcctcagcctcccgagtagctgggattacaggtgctgccaccacgcccggctaattttgtatttttagtagagaagggatttctccatgttgatcaggctggtctcgaactcctgacctcaggtgatccgcccacctcggcctcccaaagtgctgggattacaggcgtgagccaccgtgcctggcctcactcacctccttcttgtccctgccctcacctctgatgccttggtgtgcctctaggtcacaggtggacatggcacacgtgattgggcatcttgcctaaggctagcagggtctccaggaagtcttgggtggctgggaggcctcaggtaaaccagagccaaggaagctcagagtccttgtcactccgggcagcttggctgctggactccccggggcatcggtggagctggtgctgcctagagaagcctggtattgagcagggatctgtgggcttactcggggctgttggggaaggatgtggccatcattaccttcgtgggattgaagggctgcttctgtgagtgttctgggctaaccccttcctcctgggcagcggctcctggtcagcagcaaaggtttaatggatcgagattacggggaccaaagacgccgtgtaattaagccagttatttctctggctgggaacatctactcctcacagccgcaattgacttcgtcacttgtggttaccccgttcgcgttacctcgggcctaaacagcccatacgtcatctttttgagggagtctctcccttggaggcaaagttttaggagaaagatccctctgggagttgtagagtcggcgtggcagtgtgtgctattgaaggtgaagttttaggagagagacccctctgggagttgtggggtcagcgtggcagtgtgtgctatgcaagagtgccccctgcagttgttctgtgcaatggcgcccacgggagcctctttgggaactgtgtctgggttctgtagagggacatagatagaaacctcatccttgggtctcccaggatcctggggtcccgtgaaaagaaagtccatcagtcctgatggattcatagaaactagtttttaatttggtttagaaagaatggaagagacaggccaggcacggtggctcacgcctgtaatcccagcactttgggaggccgaggtgggtggatcacctgaggtcaggagttggagaccagcctgaccaacatgatgaaaccccgtttctactaaaatacaaaaattagccaggcatggtggcaggcacctagaatcccagctactcgggaggctgaggtaggagaattgcttgaatccgggaggcggaggttgtagtgacctgagatcacgctgttgcactccagcctgggcgacagaatgagactccatctcaaaataaataaataaatacataaacaaactaaattaattaattcaaggtcgcagactacaagccagggactgtgcgctcggttggccctgctgtaaactgtgttctttctcccgcactcttacccttcacagcggtgctggtgggggctccttgacgctggtatttcactgaggttgatggatctgggttcatttctctagctagaaagacagttgtgaagactgcgtcttgcccccaagcccccgtgatatgaggagacagccctctgccccaggcatcctggaagcactgggagcatccaccaactgggctgcctcttcctaggggcatgagcctaaggaggtctcctcatgggcacttggagcccacgtgcctgcattgctgtgttcctggaattattggcaagaagtgctgattgttaacatacacaaacacaccccccccccacacacacacacacaaacacaaacacaaacacacccccccatacaaacacaaacacagagaaagggagagtgagaatagactttggcggttgggatggagcagggccagtgcccagtttctagagcgaggccaggggcgaggacgcggggatttggcagagcccaagcgtgctggccctgctctccagccttttaaaatccacctccacatttcaaaaggaaaataaagagagccctcagccataaatcaggccactgagcatcgaggtcctttgccgaggcccagggcctgctgggctgcagagccagctgctgtgtttgaactctcccgcgcgcagcatgttaatgacggggcagaccctccagacccaggctcacacccacgacggccctcgagcccagagagtcccccacggagaggtcagcccctggggaaggcctgtgtctggggggcttacaccttagcggagccccctttggctgggacttcaaatcaagccagacccttctgtagctctggattctggccagatgaaaggtaacccctgacacagatcttttgagcccatttcccaataggaataaaagtaacaaagcaattgattggacacctcacgggtgcaagagtagagcgagcgttctcacattcgtgatctcatttcatcttcacagtaaacctatgaaaggttgttaccctgattttaaggataagaagggggattggccattgttcttggcctctgctggtgacttctgccatggggggcaccctgagggggacgcaccaggtcttctctgccctcctctgctcaccctcttcctgcgtggcggaagctcaggcatcatctggctttgtgagtgcctctgtctagacaaaacccacgtcctccctccctcctctttcccctgcagggccagctttggtgttaatggagcagaaagccttggtagttactttgcgagtgcgtcacggggagggtcatgagagaccagctggcgtccacccagccgcgtggaacagccaccttgacttggtcgaggccagcaagcgtcttgcagaccccgtggcagctcctgacccacgttcccccttgggaggcctggatgagctggggcaccaagtgccatctttgggtgtagaatcttcagaaaccaaaggcaggagctgattcggtctcctgctccctgggaagaaaggatggaacgcacattggctgtcaggagagctgctgcttctagccggaggaccttgctgcagctggtcagctgccagcacagccaggcccttgttgtgggtgcctgccgtgtctgtcctcaagcccctccctgagtgaaggacactgttccctttccaactgcctgtggctgtgctagaccattttctctcctttgcccagaaaccttcagtgggttcagtggggcattgcctttcccaccacattcagtccagactgggggaacctcttgttatccattccagtttcccagcacactgcccattctctagccagtaaggcctctcaccatcctgcaaagctctgtgctccaaggatctaaccagcttcaagcctcagctcagctaccaccatctccaggaagtcctccaggcctgattcgagcactggccttagtgagatccctggctcagagtccctaatgctgattgctccggctcacatcgcttagcactttcttatctttttttttgagacagagtctcgctcttgtcgcccaggctggagtgcaatggtgcaatctccacaacctctgcagtgctcactgcaacttccacctcccgggttccagtgattctcctgcctcagcctcccgagtagctgggattacaggtgtgcgccaccatgcccggctaattttgtatttttagtagagacgggatttctctatattggtcaggctggtctcgaactcccgacctcaggttatctgcccacctcggcctcccaaagtgctgggattacaggcgtgcgccaccacgcccggctaatttttgtatttttagtagagacggggtttcaccatgttggccaggctgctttgaactcctgacctcaagtgatctgtccgcctcggcctcccaaagtgctgggattacaggcgtgagcgacccgcccggccgatatcgtgttgttttatagtgtttacctgcacagtgtttcatgccagttgtcatttcttctctgccagactctcaactccttagaggcacgagggagaataacaaaggcttccgtgataggatgccagacattgtcctctctgctttgctaacagtatctcatttagcctccggcaacctgctgagttcttagccatttttatcctgtttcatgcttccccaagacttcccagaggtcacacaacacatctgtcttgacgcctcagcctgtgttctttgccagaagcgcccaatgccagggcctggggcatgagacctcaggttggggcccaggcctctgcatgtctgaaaagctcctcggcttactccctccgctcgggggaccagcctttcaccatggtggttctcccttccccgcaacacccagctaggcaccgagcaggtggaaccctgggaaatgctgctttgtgattggttggagtcaggggtggctatgaagatgctgctttgtgattggttggagttgggggtggctatgaagagacgaagtgctctagggctctgggtgtctggatccagcactggggatgccccggagagtcctggagcagggaggatccaagcaggaggtggagctgggtgttaggagggcagaagggccatcagaaggggatactggagacatccaactggtggcctctctctccgcccagccagagctcaaggctttgcctcaccccgagaagataaatcactggggtatcacggggtcccccagcccccgtgccatgatggacatgcacattttgatttggcaggtccggagctcagattctgcatttcctttgtttgcttgtttgttgtttttgagacagagtctggctctgtcacccaggctggagtgcagtggcgcgatctcagctctcactgcagcctctgcctcccagttcaagcgattctcctgcctcagcctcccaagtagctgggactacaggcgcgtgccaccatgcccagctaatgtttctgtatttttagtagagacagggttacaccatgttggccaggctggtctcaaactcctgacctcaggtgatccgcccgcctcggcctcccaaagtgctgggattacaggcgtgagcccctgcgcccggcctggattctgcatttctagcaagtcccaggtgaggcccgcgctgcccacactggatgggaaggaccaggcgcctgcagcatctgccctccaagccttcgtagctccctccttcctgcaggataaactctaaactccttagcacaacgtgggagccttctcagagactgggtccaacccatctccagccgcagcctcccctcctggccccactgccacacccccgggcctccggccacactgagcctctcccggtttcccaggatacaacactcgcccattcatagtgtggtgccttttgcacgtgctgttcctctgcttggggatgctgttggtctttctcagccaggtgaagaggacgctgaatgtcacctgcttgagtatcaggaccggggactgggcactggacctagactcttggccctggagagaagccctgcatggggccgcagcctgcccccgtccctgctcacagaaaagctcagccttgcagccgcgtggagtcagacgacttgcctgtcctgctttgaacgtgtggtgttcctaccacctttgagtaaaaatagagctgagaatgaccgaagtgaaactccaccttgggctctgggagagcagaggtgggaccacgctggggagggtgggtgcggacactccgggggcgggggctgaggccatctgcgtgggctctgggagagcggaggtggggaccgcgctggggagggtgggtgcggacactccggggggtgggagctgaggtcatctgcgtgggctctggggagggggccctgtgagccgggccaagctgccaggcactgggggtctacgccctggactcagagagaccatggcaccctcaaggctgctctcacttgaaaattttcgttttggggctggacatggtggcccacgcctgtaatcccagtactttgggaggctgaggcaggaggatcacctgaggtcatgagttcgagaccagcttgcctaacatggtgaaaccccgtctctactaaaatatacaaaaattagctgggcgtggtggtggatgcctgtaatcccagctactcgggaggctgaggcaggagaatcacttgaacccgggaggcggaggttgcagtgagctgagatcacaccattgcactccagcctgggcaacaagagcacaacttcgtctcagaaaaaagaaaaaaagaaagttttcactctgggctgtggaactatttcaggacttcctgaggggtttcctctggagcttcctgagtttcctcctggacattttgtctccaggtcccagcgccaggcaggggtggctcccggaagggctgtgggtgccaccctggctgactgcagccctctcttgcacctcctcccggccatccacccgcaggaggtcttcccccagcactggcttgtgaggagctccctctgcccgggagaaaatggctcctccgggtcacaggctcccctccagggactgaggggcatttttggattgtgggaaggcgctccagggcccggttctgtggccccaggcctgttgctcggctgggtggaggcacctctgcaggccgggagcttggtctttgaacacctgcttagcctatgacctccagcaagttatttatgctctagtgagctgtgtttttctcacctttagaatgggaacaatcttaccaaccacactgaaagcactgctgagtttttcagcaaataaaaataaggatgccccgttaaattagaattttagatgaacaatgaataatttttaaatataagtatatcccatatggctgggcatattgggaggccaggaggatcacttgaggccaggagctcgagaccagcctgggcaacatagagagaacttgtctgtaataaaaatacaaaaaattagctgggagtggtggcagacacctgtagtcccagctcctacggaggctgaggtgggaggatggcttgagctggggaagtcgaggcttcagtgagctgagatcatgcctctgcactccagcctgggcaacagagtgagaccctgtctcaaaaaaagaaaagtaagtatatcccatacaaaacttaggacatagtagactgaaagctagtctgttgctcacccgacgttcatgttcactgggcgtcttgcattttatctgtagaccgaaagcttgtctgttgctcacctgacgttcatgttcactgggagtcttgcagtttatctggggtccctgagtctggattcagtgctgtgtgtgacactttgccagggtcccacctagatgctccgacatccatgttcactgggcgtcttgcagtttatctggggtccctgcgtctggattcagtgctgtgtgtgacactttgccagggtcccacctagatgctccgacatccatgttcactgggcgtcttgcagtttatctggggtccctgcgtctggattcagtgctgtgtgtgacactttgccagggtccgtcctacctagatcctccgacatccatgttcactgggcgtcttgcagtttatctggggcccctgcgtctggattcagtgctgtgtgtgacactttgccagggtcccacctggatgctccgacatccatgttcactgggcgtcttgcagtttatctggggtccctgcgtctggattcagtgctgtgtgtgacactttgccagggtcccacctagatgctccgacatccatgttcactgggcgtcttgcagtttatctggggcccctgcgtctggattcagtgctgtgtgtgacacttcgccagggtcccacctagatgctccgacatccatgttcactgggcgtcttgcagtttatctggggtccctgcgtctggattcagtgctgtgtgtgacactttgccagggtcccacctagatgctccgacatccatgttcactgggcgtcttgcagtttatctggggcccctgcgtctggattcagtgctgtgtgtgacactttgccagggtcccacctagatgctccgacatccatgttcactgggcgtcttgcagtttatctggggtccctgcgtctggattcagtgctgtgtgtgacactttgccagggtcccacctggatgctccgacatccatgttcactgggcgtcttgcagtttatctggggtccctgcgtctggattcagtgctgtgtgtgacactttgccagggtcccacctggatgctccgacatccatgttcactgggcgtcttgcagtttatctggggcccctgcgtctggattcagtgctgtgtgtgacacttcgccagggtcccacctggatgcgtcttgctcatcttgtgacttgcttctctcttttgtgccaccccctggctcctagaggccaagctgaagaaaagtttctatggaattgtcacagaaacattgagattttgcttttacagggtcgatacagagtcgacacaaaaaatcacgatgcgattgatgcagagtggccagtgataatagctaacgttagcctagcgcttgctgtgtgtcctacactgttgcaggcactttgtctgtattaactcccttattcttcacaaagtctatgaagaagatacttatcatctccagtttacaggagagaacagagaggcacaaattaatggagcaaaagattaatgttcatgttcttttttttgagattgagtctcgctctgtcgcccaggctggagtgcaatggcaggatctcggctcactgcaacctccaccttctgggttcaagggattcttttgcctcagcctcctgagtagctgggactacaggcacccagcaccaagcccagctaatttttgtatttttattagagacggggtttcaccatgttggccaggctggcctcaaactcctgacctcgtgatccacctgcctcagcctcccaaagtgctgggatgacaggtgtgagccactgtgcttggcctagcctttcaaagtgctgggatgacaggtgtgagccggggtgcttggcctagcctttcaaagtgctgggatgacaggtgtgagccactgtgcttggcctagcctttcaaagtgctgggatgagaggtgtgagccacatccattagggcccgtcaggaagcagatgccacactcaggctgaggagtgcggggagagctatgacggaaatgtgggcagggtgagggcagggtctgtgtcctagacctggaggcagaggccatgtggtgagggcttctgggcaggagcgtgcacagcccgggtggcccacagtggggagctgggggtaccacatcccagcctcatgcccttgtcttcctctcatctcctgctggggtggaagagaggatggagaagcagggagaggggatccggaggggcccacgccaggaaaccaggctgtgtctaggtgcagctgttcttgccgagtctctcctgtctgcaaagtgagggtgataaacgcctgtcccacgtatgtcctggggctgttgtaaaaatcagctgagaagctggatgctggcgacgtgtgttcacggcgctgttctctgccagagtaagggataattgttgctgttgataaacactcactgggtcctcaccacgaactgagtcttttcacatcctcagttctgctgggagtctctaacctctggaggatgtgtcggcaaaggaaagagaaattgcaacattgcagagcctggattcgaacccagcgtccccatgtaaagtccgtgcagcactgggagagtcacttaatgagcctccgcagtgaaatgcatctcccgggctggtttggggctcccaggggaatgggtgctatgattaccattagctagtggtgtagcgggtgggagaggacctaacaggtgccttcggcccggctgtaaaaggagtgacttctggccgggcgctgtggctcacacctgtcatcccagcactgtgggaggtcgaggcgggtggatcacctgaggtcaggagtttgagaccagcctggccaacatggtgaaaccctgtctctactaaaaatacaaaaattagctgggtgtggtggtacacgcctgtaatcctagctactagagaagttgaggcaggagaattgtttgaaccctggaggcggagattgcaatgagccaagatcatgccagtgcactccagcctgggctacagagtgagacctcatctcaaaaaaaaaaaaaaaaatagtgactttgaccgggcacggtggctcacacctgttatcctagcactttgggaggcagagatgggaggattgctcgagactaagagttcaagaccagtccgggcaacatatcaagaccctgtctctacaaaaaaaattttaaaaaattagccaggtgtggtggaatgcccctagagtctaagctacttgggaggctgaggtgggaggatcatgtgagcccaggagtttgagcttacagtgagctgtgatcacattctgcactctggcctgggcaaaggaatgagaccttgtcttaaaaaaaaaaaagactggacttgtgggtgacggggatttccaacaaaaccttcccaggataggtgctgggaaggagatgagactcagaaaaaaaaaaaagactggacttgtgggtgacggggatttccgacaaaaccttcccaggataggtgctgggaaggagatgagactcagacaccccagccttgtatccctgagaagggatggtgtccttggaacgggaatccacatagatatttagcaggcagggcggtccagcgacacctgcccgcttccctcagaaggcaccgtctgcagcactcgtacaggtggcggggccagagagcaaggctcgatggagtgacgttgcctccaccgcacgggcgtcccaccttgggagatttccgtatcgctgaagttccctttgtggagcgtggcctctgtgaaaagtgttaataattcacggtagaataggttctcagatgcgccacgtctgtcctcccccacttcttcaacagagaatggcaacacctccattaacctgaatgtgagctcctcgggggtggccctggctgagtcatctgcgccgcctccctccccagagcctcgtacgcgctcggcgtctggctgtcgtgtgaactcagctccacagggcagacatttggtctgtttgctgctccgtcgtacccctggcacctggaacagtgcctgaaccatgagaagtgtttggtgagtgaatgaatgaatgaaaaatgaatgaacggacattcactgggattcagttctccttagagtcagagagacgtaggtgtcaatgctggttgcatgaagctgttacatctttgagcctgtttcctcatctgaatttggggtgtaattcctactgactgtacagttgcagagctgacatttcatgaactttgcttaaataatgtgtgagtgcctggcccataagaggctgtgttagtccttttgtgtgtgtgtgtgtgtgtgtgtgtggtttttttttgttattgttttttgtttttgagacagagtcttgctctgtcgcctaggctggagtgcagtggtgtaatctcagctcactgcagcctccacctcctgggttcaagcaattcttgaaccttgtaccagagaggagaggtacagcggccctagaccccagggctctgctcctattggtgtaagtgtttcctcctgcgccctacctccctgtctccaggcagggcctgctgtgggtccctctcctctcagccccaagggacctgttccctccagaaggcacctccccaagcggcggcagcgtcacgtgtgaggcctgcagttcagggccagcatccctcatccctcgccgagatcaggccctggaggggctcccacaggtctgactcaaaggcacaggtccctgggcctccctcctcagcatcgtggacccacgaccaaggacgtggaagggattctgaagattaatggtcgtaagtgtcactggcttttactgagtgcttcctgtgtgtgagtactgcgttcctacttctcctgtgtgtgagtaccgcatacttcccttgtgcgtgagtaccgcattcctgcttctcctgtgtgtgagtaccgcattcttacttctcctgtgtgtgagtaccgcatacttcccttgtgcgtgagtaccgcattcttacttctcatgtgtgtgagtaccgcattcttacttctcccgtgtgtgagtaccgcattcctacttctcccgtgtgtgagtaccgcattcctacttctcctgtgtgtgagtaccgcatacttcccttgtgcgtgagtactgcattcttacttcccttgtgtgtgagtaccgcattcttacctctcccgtgtgtgagtaccgcattcctacttctcccgtgtgtgagtaccgcattcttacttctcctgtgtgtgagtaccgcatacttcccttgtgcgtgagtactgcattcttacttcccttgtgtgtgagtaccgcattcttacctctcccgtgtgtgagtaccgcattcctacttctcccgtgtgtgagtaccgcattcttacttctcctgtatgtgagtaccgcattcttctcttgtgtatgagtactgcattcctacttctcttggactcctgagagttccatgactaagacagtagtttaatatagttggtttcctttgtcatcctgcatagtttagttttacgcatttcaaaacattcttcagagaaaggtcccttggcttcaccaggctgctgtgggtccaaggcacgaaagcatgaagagtctctgctcatcgccagaggactgtgagtcccaaacaggctccctgtagtctgaacaggcttcagccttctctgggtaatcctaggctgtggttacaacggtggctttggctgcactgggaggcaggagatctgggtttttattctacctccgccactcccatgccagccctctgtgtcctcagctgtgaaatgtaagggttggactagccctacgcacttttgattccttttttttttttaagacagagtcttgctctgtcacccaggctggagtgcagtggcacggtcttggctcattgcaacttccaactcccaggttcaagcaattctcctacctcagcctcccgagtagctgggactacaggtgcccaccatcacgcctggctaatttttgtatttttagtacagacaaggtttcatcatgttggccaagctggtcttgaactcctgacctcaggcgatctgcctgtctcggcctcccaaagtgctgggattacaggtgtgagccaccgcacccagccattttctgtgttatatgtgaaatgtagcaatatgcaaaacagcacatacaatgtctgggtttggtttactaaagactaacgagacggctgggcgcggtggttcacgcctgtaatcccagcagtctgggaggccgaggcggctggattgcctgagtccaggagtttgagaccagcctgggcaacatggcgaaactccatctctactttaaaaaaaataaataaatacaaatttaaaaaaagaataaaaagaagaagaattacattgtaagcatgttcctgtgagctgcccttttctggttaaatttatgtttttaggttcatcttcgctcctgcctgtagctctaaactgtgcaccgtcaaagctgcctggaattccattgcaggaataaatggcggcttactcaggggtggtcacgctccttccacctgttggaagagaatccatagtggaaaatcatttcatgctgcaacgcgacacacatacgtacatctgcacacacacatatacccatgcacgcttgaaatgagcctcataaagtaatacctgcccttattaggcgagataatccttttcaatccattctagaaggtgacctaccaaactgcacgatcccttcctaggctgacctgcagcatgaatgatacggggctgagtgcaccccatcgtgggtctgcctgggtgcgcctgaggttctgtgcctggcaggcaggctcaggtcatggtcctgctgatcccaccaggctgtccgcacgcattggcgtgagagcggtgtgcctgccggttcctttccttcatctgccgggattgttggcttccccctgttccgctgggcgtgttccagcagcggctcttcccttgtagttgctgcttctcatggcctgtggcctgagggaccagccccctaggcatgttagaactgtgtgcactgaggtcgggcgcggtggctcacgcctgtaatcccagcactttgggaggccgaggcaggcagatcacatgaggtcaggagttcgagaccagcctggccaacatggtgagaccctgtctctattaaaaatataaaaattagccgggcgtggtggcgcacacctgtaatcccagctatttgggaggctgaggcaggagaattacttgaacccgggaggtggaggttgcagtgagctaaggttgcacctttgcactccagcctgggcgacagagtgagacttcatctcaaaaaaaaaaaaaaaaaaagtaatgtgcgctgtagcacgactgacttagtagcaagagagggtagtgtctgagaccagactgcccgggttccaagctttgccactcagcagctgtgtgaccttgggccagtcatctgacctatctgagcttcggtttcctcatccgtaaaattgagataatattagtgcctgcctcctggcgcggtgtgaggctgcggtgagttaacttatcgtatgtgtgtgtggactgttgttattactgagcctgcctgtgcgtcagagcctgacattgatctaattctttgctggtatccctggacacagtggctgtgttgaaatgagctcaaaaccctcggctaaaaggaggttggaggtggacggaagagccacttctcaggctgcctgtattcagatcccagcctcaccattaagtaactacgtgactatgagcaagttagtccatctccctgtgcctcagtttactcctctatgaaatggggatagtagtggaactcactattcaccaagtaattgttaagaggattacataagataatgcacataaagctttttttttttctttttgagacagagtctctctctgtcacccaggctggagtgcagtggcacgatctccactcactgcaacctccgcctcccgggttcaggtgattctcctgcctcaacctcccaagtagctgggattgtaggtgtgcgccaccacgtctggctaatttttgtatttttagtagagacgagttttcaccacgttggccaggctggtcttgaactcctggcgtcaggtgatccttccacctcggcctcccgaagtgctggcattgcaggcgtgagccaccacagcatttagctctgccgtctacccggctacccagccaggaactcaggagaggccttttttttttcttcacatgaaaagaggtttattttctcactggacactgtcgcccatgtgaagggagcagccacctggccccaggttccctctcaacaaaggctcagtcctcagaatggctcctcatgagccccctgcagccggaggcctaggctcttccccacagcatgtgccccttagatacccgtctgccctctggtgtaggctggtgggcatgggtgtctgaatttgggtccccacagcacccccattgaggatcacagtgttggagttgaacctggggccacctgggtaccaggacactgtgctccacggtgagcacctctcctgtccctcgatggccagcaggatctggtcacccacctacctgccaccctatccttttttttttttttttttttgagacggaatttcgctcttttgcccaggctggagtgcaatggcgcaatctcggctcactgcaacctccgcctcctggattttcctgcctcagcctcccgagtagctgggattacaggcacctgccaccatgcctggctaatttttgtagttttagtagagacagggttttactatgttggttaggctggtctcaaactcctgaccttgtgatctgcccgcctcggcctcccaaagtgctgggattgcaggtgtgagccactgcggccggcctagatgtctttttatcgttgagttgtaagatttttaaaatatagtctagatatgttttcttcccctctgcacattgtcttttcactttcttgatggggtcctttgaagcaaagaagtgttcattgatgacgtgcggttcccccgtgctctctgttgcttgtgcttctggtgtcgtatgtaagaatcctttgccaagtccaagaccatgaagatctacccccaggttttcttctacatgttgtttagctttagctgttacatttaggtctttgatccatttagagttattttttgaatatggtagaaagtaaaagttcaacttttacatgtggcaatctggttgtcccagcaccatttggtgaaaagattcttctttccccatgaagggtcttggtgcccttgttgacaatccgtcgaccatagatatgtgggttcctttctggactcactcaacgtgactccgtggatctgtgtgtctggaaagatgcccccagcctgacagtttaccttctttgcccatctgctccagtcatcctggaggctcccatagtacacattgctgggacatcccagagctgaacaccatctctcaagtggcctcagagctaatcacttcccacaggcatcgaggcgaccacagagagggcccagtgtgactggctggcccccagggcgcccgggaagggatctgcagatccctcctcctggcacagcgtcctggcaggaggcacggtcccagagcaggccctgtttgtgctgaggccccgccaggattgggtggatgccttggtgagggccaggtaggagggaacaaatgcagggtgggaagtggctgctggaatggggaagggagcggggcctgcaggagggaagcattcttggcactagtggcatcgtcaccaggacaccggccttgggagggcgagcactacatccatgggtaggcgccggagccctgaggacacggcattgccaagctcttgtcctgtggcttccttccctgtgtccgcagtgtgtggggggtgggcgggcaggcaggacgaggtgacccccatcctttctgtgtgctcgttccatgaaattgggggatgtggatgcttgaacgggctctcagctagtgtgccttccgtgcagaggaggtaacactccccagggcagccagacacccttgtggagtgggatggaaagctgggaggaaggggctggccggcaccatggagatattttggtttgcaggaggattctgggctttatgagcactttaatgcaaccagggcaggcagcaccacgggacgggaactgtaagctgcacctgttgaattctgaaggtccgggctgcccgtgggccccgggaagtgggggtgcccagcttgtggggtgcaggcggggaggggaccgtgtggtggtggagacgccatggtacagcctgtctcccgatcccccaggtcccctgaggccttagagatgaatctcccagaagtggcagccgcggcagggacaccaggatcatgaaggacctgggaggtgaacccgctgctcagttcctggccctcgtcccttagacccagtcctcggagcagaactgggggaagctgagatttctgtgggctgcgtgcccacctcctccctcttcgttggtcctcccacgcgcccgcccccgagtgggagcagagccatgtgagctgagttggagctgctcgctgccgagaattgcatcagccccgcctggcaggctggagcgggagcctgttgctatggtgaccaccaggcttcaaaccagtgagaaggatgagatggttgccgggcgaggttttctcaccatgtgatgcgtgtgacaggctgacaggttcggtagacctggacccagccctcccgtaggtgtgcctggacccccagccctcccgcaggtgtgcctggacccccagccctcccgcaggtgtgcctggacccccagccctcccgtaggtgtgcctggacccccagccctcccgcaggtgtgcctggacccccagccctcccgcaggtgtgcctgggtccccagccctcccgtaggtgtgcctggacccccagccctcccgcaggtgtgcctgggtccccagccctcccgcaggtgtgcctggacccccagccctcccgcaggtgtgcctgggtccccagccctccccgcaggtgtgcctggacccccagccctcccgtaggtgtgcctggacccccagccctcccgcaggtgtgcctggacccccagccctcccgcaggtgtgcctggacccccagccctcccgcaggtgtgcctggatccccagccctcccgcaggtgtgccatctgctggggggcatgatgggcactgtcccaaaagccatctgggcattggccaggctggggggtatgactgagggacacagggggccacgccaggcccatgtagtgtcagggggccttccttggtccttctgcctagttgtgggggaaggggtatggtggggatttgaccaagtgcacctgatgatggggcaagaaaggggtccagactggtccccatctcccagaacagagggcggctctggatcacagctgattaaacctgcccaggctgtgtcaaaaattttttttttaacggagtttcactcttgttgctcaggctggagtgcaatggtgcaatctcggctcattggttcaggcgattctcctgcctcagcccaagtagctgggactacaggcgtgcaccaccatgcctggctaattttgtattgtcagtagagacaggtttcactgtgttggccaggctggtctcaaactcctgacctcatgtgatccacccaccttggcctcccaaagtgctgggattacaggcatgacccaccgcgcccggcctgtgtcagaattttttttgttaaccacgtgacaaagctcatcatcttgctaaagataacagagcgcttggccaagccagtgcaatgcctgggttcagatctcctctctcatcttttgcctacaacgggaaaggaggtaaaaagtctgtgttccaggtgtgctgagcacttgttgtgtgccgggagttgtagtagacactgtcctgtctttttttttttttgagacagagtttcactcttgttctccaggctggagtgcagtggcgcgatctcggctcactgtaacttccacctcctggactcaagtgattcttctgcttcagcctcccgagtagctgagattacaggcacgcaccaccacgcccggctaattttttgtatttttagtagagatggggtttccccatgttgaccaggctggtctcaaactcctgacctcaggtgatccacccacctcagcctcccaaagtgctgggattacaggcatcagccaccagcccagcctgtcctgtctttttttttttttttttgagacagagtctcgctctgtagcccaggctggagcgcagtggcgcgatctcggctcactgcaagctctaggttcacgccattctcctgcctcagcctcccgagtagatgggactacaggcacctgccaccacacctagctaacttttttgtatttttagtagagacggggtttccccgtgttaaccaggatggtctcgatttcctgacctcgtgatccacctgctttggcctcccaaagtgctgggactacaggtgctcaccaccacgcctggctaacttttttgtatttttagtagaggcggggtttccccgtgttagccaggatggtctcgatctcctgacctcgtgatccacctgcttcggcctctcaaagtgctgggactacaggcgctcatcaccacgcccggctaacttttttgtatttttagtagagacggagtttcctcgtgttagccgggatggatgtcctgtctttctattgtatcctctccctcacttggggaggaggcagtgatgttcctgttttgcagaagagccggatcgggcagccagagagttgaagtgacctgcccaaaaagggttcaacctaaatccttgggcttcctgtccagggctctgtaggatgtcagccatccccagaatcaggcattctcaggatgtcctgtgaagaaacacacttctccatcccctgctggaaaaaccatgacaatctctccgcagggaagaacgcggctttgaggtggggagtggctgaccgaggccctttgtggtttctaaatggcagaatgagagaggtgggggcgttgagggtgtcacgcccaggaagcagttggggagggcagggctggacactgaccaagcctagcctgggtgcaggaactgagcttgggatttttgcttggggccctctagggattaggatgaattgtcagatgagttctcagcagacagggctttagggaactggtccagggaaataagacgtagagccagaggggaaccagggcctctgtgagagcctggcagtcatgagatctgacttgctgagcttctgaggtgtggtaataggaactaatcctctcttcggtgtgctttagatgtttactcgtttcatcctcacagaaaccctgtgaacttgggtgctactgttactccatgttgaaggtaaaacagaggcacagagaggttatgtgacttgcccaaggtcacacagctggtaaggggtggagcctgtgattcagacccagtcagtctggctgcagagcatgagctctgaatcaaatgttctcctgcctccattcttaccttttagaaagatgacagcaagttgcatacgtgacctcctcacccccaggagtgtgtgtgtgcacatgtgtatatatatgcacacatacgcgcaccagtagctcagcaagggagggaggctcaggaatgggctcgtgggcctctgtgtgttgatggctgggtttgcagaacctagggagtccggcgtctgtgtgcgtgatgctcctcccttcgtccctccctgctcgcgtggttcccagtgggtggggtgccctgttgcctctggtttagagccgtgcaggatgttaccacagaccgtgtaccaggagtgttcacccaaacttgtgaagggccctggactcccaggaaggagctcagatctaggactgggagtggacggcggccgccggaggagtgagagggggcagtgcgcttgccatgcccggggcccgtcctcctgggcctctctcggcgcttgggcaacctgtgtattgcccacacgtgtgccgctgcttgcagctcctggccaccaccctcctctttgtgtctggacgaatctgactgctctgagcacctcttcagagtggaatcatacaggacagtgtctaccgcaactcccagcacacagcaagtgctcagcacacccggaacacagacttcttacctcctttcccattgtgggcaaaagatgagagaggagatctgagtgcagacatcgcgctggcttggccaagtgctctgttatctttagcaagatgaagagctttgtcaggtgggtaacaaaaaaaattctgacacaggccgggcgcggtggctcacgtctgtaatctcagcgctttgagaagtgtgtcagcccttgagaagacaccgggcaagctggccttcctctcggtgtctctcccaggccgggactatggggagaaatcataacaacagggacaacagcagtgacaacgtcagtgacgacaataacagccactaacgttataccacgtgccaggccctgttcttagaacttcgcctggactaactcattcaactgtcacaaaagctgcatgggatgatgttgttatgttattatcttcatttgacaaatgaggacactaaagcacagagagatgaagcaacttgccccaggacacacagctaaaactgggagtggaattcggagagcctggctcctggcatttggagctgacaggtgcccggcaacccctacctatggccgagctgagctcgtcttgtgccagggagttggcggcaaaacagaaatgagctctgggccgggcacagtgcctcacgcctgtaaccccagcactttgagaggctaaggtgggtagatcacctgaggtcaggagttcgagaccagctggccaacatggtgaaaccccatctctactaaaaatacaaaaattagctgggtgtggtggtgcatgcctgtaatcccacctactcgggaggctgagacaggagaatctcttgaacccgggaggtggaagttgctgagatcacaccaccgcactccagcctgggtgacagagtgagattctgtctcaaaaaaaaaaaaaaaaactaaaaccagaaatgaattctggaggtgggatcttcctttgtaattcagaaggtgactcccaacccctcttcagaagctgggtgggctccaggcctggttcagccccctggcctcctgtcgatacccatgggggggtctctgtccctggtattactcctttcctgtctactttttttttaaatttagattttattctatttttttaaattatggcaaaataggccgggcgctaggtagctcacgcctgtaatcccagcactttgggaggccgaggtgggtggaccacgaggtcaggagatcgagaccatcccggctaacacggtgaaaccccgtctctactaaaaatacaaaaaaatttagccaggcatggtggcaggcacctgtcgtcccagctacttgggaggctgaggcaggagaatggcgtgaacccaggaggcggagcttgcagtgagccgagatggcgccactgcactccagcctgggtgacagagtgagactctgtctcaaaaaaaacaaaaacaaaaacaaaaaacaaaagaaaatcatggcaaaatacacatgcctaaaattttccatccagtgtacgcatcagtggcccgaggcacgttcacactctggtgcggccatcagcaccgtcatctccggaactctcacctggctaaactgagactccgcatctgtgaaaccagcgcaccagggaccggcttcgtggaagacactttttccacggaccggggaagggtggggagcgctttcgggatggaactgcgatccctcgcacgcgcagatcacgacagggctcacgctcctacgagaacctaatgccgctgctgctcggatgggaagtggggttcagggggtgacgcttgctcacccaccactcacctccggctgtgcatcctggttcccaacaggccacggactggtgccggtccatgcccgggggggctggggacccctgtattgaacaacagctccccgtttctccagcccccagctcctggccaccaccctcctactttctgacttgatgaatctaactgctctaagcacctcatccgagtggaatcatgtggtatttgcctttctgtgaccagcttctttcacgtagcctaatgcccccaaggttcatcgatgtcagaattggcctgtgtcggaatataagccgaataatatccgttttatgtaaaggccgcgttttgtgtatccattcatccacccatagacacttgaggtgtttctgttttttggcaagtgtcaataatgctcttaggaatgcgggtatttccccgacaacctttgggcttacttcactcatcagcagcaagcaggccatccttgaagcttaccgtggggtgggcccattgaccagcctggggagagtgggtgggtcattgaccagcctggggccatcatgctggctgggaaggcgtggccctcaggtgccagcttctacccaacactaagccgttggtgctcctggcacttacttacttgctggaagacattccaccttgctttcccgtctttccccagaagagggtgctgggtttctgcttctctcctgaatgggaaaagggcggctgcagcttgccatgaggctggcgtgggtggggttaggagaaaggactgtcaggtgctgtgttgggaagtgtgtgtggagcttccgtgaggctggggttggccttctgagcatacatggaagggctgagtgggagcagggtgttagggtagccggtcatgccgtagaaccaaattaatgctgaaggccgggcgtggtagctcacactaatcccggcactttgggaggctgaggcgggtgggtcacctgaggtcaggagtttgagaccagcctggccaacattgggaaatcccatctctactaaaaatataaaaattagctgagtgtggtagtgggtgactgtaatcccagctactcaggaggctgaggcaggagactcacttgaactcaggaggcagaggttgcagtgagccaagattgtgccactgcactccaggctgggcgacagagtgagactctgtgtcaaaaaaaaaaaaaacaaccaaaaccccccacaaattactgctgaaatcctcatcacttaacacaagcaagctgctgcttgctcacagtggtcctggtagacggggggctctgctccccgtggtcatgccgggacccagcctgatggagactgcaccatttggaatatgtggcctccaagggtcacagagggaggagaaagggagaaagagctgtgtgtaatttttcactgttcagccgtgaaatgatacttgtcatgtccacttacagtttgttagccaggactgagcacctggccctgcccagggactgccaagtggccagacagtacggccttccatgtgcccagaaagacaggaggatggggatattgctgggcactggtcgtgttgaccacatagtggcaggtggcttatgtgaaggatgaaggcccttgagcctgctctgtggccagggcagtggtgtcatggtggcagtggtggcagtggcggcagtggtgtcatgtagcaatggtggcagtggtggcagtggtggcctggtggcagtggtgtcgtgtggcagtggtggcctggtggcagtggtggcatggtggcagtggtggcctggtggcagtggtgtcatgtggcagtggtggcagtggtgtcgtgtggcaatggtggcagtagtggcagtggtggcatggtggcagtggtgtcgtgtggcagtggtggcctggtggcagtggtggcatgtggcagtggtggcatgtggcagtggtggcagtggtgtcatgtggcagtggtggcatggtggcaggtgtctgggcactgaagggacttgggtgtaactgacttctaggggaagtggcagaatcatggtcatcttcatgtgccccgcactgtgctgagctgtttacagacgtcatctcatggaatccccacaacaatcctatcattccgtttcacctttggggaagccagagctcaggaccacagcctccaagtgatggctgtgcttgctggtaggagggtgcttatggcagcagagaggccgggggctgaatggagtgtgggggccagaggtggtggggccacaaggatgtgatgtgtgtgtgtgtgtgtgtgtgtgtgtgtgtgtgtgtctccatgtgcctgcgtggatagaaacaagcagagacaagctggctgggcttttgcccttccccagctccgcgcacacctagctttgcaccactctggaggaatggtgacgtcgaatgtccaaggaagaggctaacctgggcacgtcctcttacctgccctccttgaatgacacaagacattggaagtggaagtcacagtcaccggtgctctggagctgggagtggggagaaggaggtgacttttgaggcactctgtgacagcccagttcaacagtagaattatgtttaaggcccaggaaggctctgggtggagagccagcattttgagccgaaggccagtgaacgtggccacccagcagcactgggcagaggtgcggctgcttctgcaggtgtatgtgtgaaggggtgcaagtggacgccttgggcgacttctgcggacaggggcaggagcccggagctgcgtggctctgggattgaagggcaccctggggtggaaggcaggggtcgtgcatcctggtcctggctgctgccaccctgcagggctgctttgagagtcttgctggcctctctggacctggcattacttgtctgttctctgaattgcctcttcctacttctcagcactagattgtcatttaatttttcataaataccctaaggacttacaaagccatagatgggaggggggctccgaggaggccatcccaggcaggtggtgagcaccgttggattgaaaggtcctcccaggtcatcgcctcctggccacccgccttctgcagctctggggctgagtggcatttcccacagggaaagacaggaggaagagcagagccttaaatcaaatcagcccaggattattacttgttatcaattcttgaggaggttcggaggggaagcaggaagtaggctgaagctgttaactctaataagggttagaactcctatgggatttgtcagaaggacttcctggcccccagaccctaaataattgaattggttgttatgggaagagatgaggaggattattaggagatcgtatcactcagccagcagttactgagcattggctctgcgtgagtcctgtcctgggcgccacaaataacaggcagtgagcagaagagggccaccacctcgcggggaagacagaatataccgataacccaaacgaactcagacttgctttctttgtagaggatttattttctttctttttttcctttatttttatttatttattttttttgagacagagtctcactctgtcacccaggctggagtgccgtggcaccatctggcctactgcaacctccacctcctgggttcaagtgattctcctgccacagcctcccgagtagctggaattacaggggcccgccacacacccagctaatttttgtatttttagcagagatagggtttcaccatgttggtctcaaactcctgacctcaggtgatctgcccgccccggcctcccaaagtgctgggattacaggcagaagccactgcacccagccctaatttttgtatttttagtagagacggggcttcaccatgttgaccaggctggtctcgaactcctgacctcaggtgatccacccacctcagcctcccaaagtgctgggattgcaggcgtgagccactgagcctggcccctgcccctttttttttttttgcctgattgactgaacgcgttattgtttgtgaaatgctctttttatctggtatctcttgtcactccacaggggcagccctgtgaactgcgcagggcagctgtgtcttgcccattttacagataaggaagtggcggcacctagagattaggtctggacgcgggacccagatctgcctcctggccccatgcccacctcgttgaatcccgttgcctttccatgggcgactcgtaacggagctgggggtgctggagtctgtgcccgcccctgcatctggtgtgtgatagcttaggagatgtttgttgagtggctgttgcttgcgtacacatgccgtcagctttcgtcgtatcatggcaaggttatacggcccgtctgcaatatgattcctctatgttcggtgggcacataactgtctttcctacagagagatgaggaattttagttccctctgccaaggtggggggattttgtcaaatcgcaggaaacaatggccttggtgcaaagagtagctttaatctgtggctcagctgtttctcagccaggtggccttggatgagactcagaagcctcagttttcccccgtgtcaaagggggccattcatagctactttgacaacctccctgggctgtggggatgaaatgagatcctggccgtgggctcaccgtgtaaaacactgcgcagataatactcagcatgtcccatccatccccaagagctggagactggtgaagccacatgcgcttctctgcccagggctgctggccaccctgacaccctgggcctcagcctctgcccttgatgtccaagaactatgattcctttgtctcaggctgtggagccctgagcttctccaggcggccacttctccaggcggctacggtctctgcctccctcttccaaggatcttggaggtggatgattggatttcatctccatggcaaccagagaggccataacacccgcccatggtggggcctcgagtctgttcccagcagtggaggcagagccggagcaaacaactcctgcaacagcagctgtcccccaggaatgagctgtcccccaggagcgagctgtcccccaggagcgagctgccccccaggagcgagctgccccccaggaatgagctgccccccaggagcgagctgtcccccaggaatgagctgtcccccaggagcgagctgccccccaggagcgagctgtcccccaggaatgagctgtcccccaggagcgagctgccccccaggagtgagctgtcccccaggaatgagctgtcccccaggagcgagctgccccccaggagcgagctgtcccccaggagcgagctgtcccccaggaatgagctgtcccccaggagcgagctgccccccaggagcgagctgtcccccaggaatgagctgtcccccaggagcgagctgccccccaggagcgagctgtcccccaggaatgagctgtcccccaggagcgagctgccccccaggagcgagctgtcccccaggaatgagctgtcccccaggagcgagctgccccccaggagcgagctgccccccaggaatgagctgtcccccaggagcgagctgtccccaggaatgagctgtcccccaggagcgagctgtcccccaggagtgagcttcctcccaggagtgagctgccccacagcctctgcccggcctccagttgccgctttgctgggctaatgaggggctccaggcctcggggtgagggtggcgctgtctgtgctcccagtggctgctacaggccaggccgagggtcctgagtgaatgagacaggggccgacccccacccacccctgcctgtctgtggttcacaatcagagcaaagccctttccgtccgtcttgtcttctcttccccagcgaatcccacagtccccaagactgaggacaagccctgcctcttccgggcagccttccctgtgctggctgaattgatcacgcgcctggctgatggcttcataggctgcttcagagtattttttttttttttttgagatggagtttcgctcttatcgcccaggctggagtgcaatggtgtgatctcagctcactgcaacatccgcctcccgggttcaagcgattctcctgcctcagccccccgagtagctgggattacagacatctgtcaccatacccggctaatttttatatttttagtagagacggggtttctctatgttggccaggctggtctcgaactctcgacttcaggtgatccgcctgcctcggcctcccaaagtgctgggatgacaggcgtgagccactgtgcccagcaagagtcttagttccatttggttgtaaagacgctcacttcagtgtccctgtctgaacctggcggctcttggccttcctatacattagagtcacctggggagcttttaacaggcctgatgcccaggccattccataccaattcagtagcaatccctggggtaggagccagagagcttcccaactccccagggattccagtgtgcagtgaagattggaacagttatcttaggattcaagtcatgaactggccgggcgcagtggctcacacctgtaatcccagcactttgggaggccgaggcaggtggatcacctgaggtcaggagtttgagaccatcctggctaacatggtgaaaccctacctctactaaaaatacaaaattatccgggcgtggtggcgggcacctgtaatcccagctactcaggagactgaggcaggagaattgcttgaaccggggaggtggaggttgcagtgagccaagattgtgccattgtactctagcgtgggagacagagcaagactctgtctccaaaaaaaaaaagaatttaagtcgtaactagtccaccagcctgtgctgaatggaggctgactgatgaacagcagagttagctgacaaagcttgctgtagtcttaactcactgcaaattgccaaagccctggtttgttttttaagggctgggaggtccctaagggttcttggtactcaggaaggagagcaggggaataatgataatagctgccgttttgttagcgccagctttgggtgccttgcatagcatatatttcctcattgtaacctcgcaaaagcttcatgaggtatagatcttgtttttatcctcattttagagatgagaaaactgaggctctgaatggctaagtagcttgcccaaggtcacatggctaaggtcacattcccgaagtgctaatctcaggaatggaacccgagtgtgattccaaagcctctgcccttgaccactgagctgtcctggctccccaacctctgctccatcaatcaaagaatggggggccctgagaaggaggtggcttgtcccgtgggaaagatgctggtttccaggattcctccccttggagccaggccctgactgaggggctcccgatggtattaaatatctcctggatcagctggggtcacctggaccctgaaggtgtctactttcccgttgcctacgacacccactcggcttcagctgagctttcccaaggacccttctgccctgatactgtgcccagttctttaacctacatcatgttatttaatgtcattttcacaaccaccctgtgacatggtatcgttatcctcatcttgtttctttgagacagtctcactctgtcacccaggctggagtgctgtggtgcgatctcagctcactgcaacctctgcctcccagtgcaatagaagactggccgggcgcggtggctcacacttgtcatctcagcactttgggaagccgaggtgggcggatcacttgaggtcaggagttcgagaccagcctggccaacatggtgaaaccccatctctactaaaaatacaaaaattagccgggcatggtggcgggtgcctgtgatcccagctacttgggaggctgagacaggagaattgcttgaacctgggaggcggaggttgcagtgagctgagatcccaccactgcactccagcctgggtgacagattgagacttcgtctccaaaaataaataaatcaataaaataaagtgcagtagaagacagtgtccttattgttgtaggtgaggtggtagattttgtatctgagccaccatccctgctgaaattgccccggacaggctgatctggtacaggtggcacctgggaagtggcagcctcgcttccgctggccagttccctggttcagggttgccggcctcccagatccacacctgtggtccagactctgctgtctggctgcccgttggatcttctgacagggatggccatgagtcttctcagtccagacatgtctccacctggacttagggtctgttcccccggaaccagctcccccttcctgtccatcgctcagccctccaagcccagaggaccctgctgtggccgcattttcagtcaactctcccatcgccagactttgcccttggttcccaccatggtcacctttgacaaagcacggaggggcggtttgccccgttccacatcatctcatgcaccacagtcagcttcgttttcctgaagtcacctctgaaatcaccttgccattttggcatccgtggctcccagcgtgcgtgaaatctgactattcaggatagtgttccaggccctctgcagtctgacccctccagagctcggcttcagtggtaccagtctgttcatcagggccaacctcctgcgtcctgcccccattctgcacgctgataccctgccgcaaatggaccttttccttcctcacgctctgtgactggttgtttcttccatatgaacccctcagggcagcccacacacttcgtgtttggtatttgtatgagtcctacatatgataacattttaagagcaaaggttgtggagttggatgacctgtgtccatctggtttcccacctgactgccgtgaaatcttgggcgagtaacttaactccctgcgctttcatttcctccattgtaaatgagtcataatggtacggaggcagaaatttaaaaacaaatatgtatgtatttactccaagaaaagtaacaggcaaggcaagggttaaaaagaaaaaaaaaacaggccgggcacggtggctcacgcctgtaatcccagcattttgggaggccgaggcgggtggatcacgaggtcaggagatggagaccatcttggctaacacggtgaaaccctgtctctactaaaaatacaaaaaaattagccgggcatgatggcaggcacctgtagtcccagctactcgggaggctgaggcaggagaatggcttgaacccgggaggcggagcttgcagtgagccgagatggcgccactgcactccagcctgggcgacagagcgagactccatctcaaaaaacaaaaaacaaaggaacaaaaaaaacctctttttttttctgcctagcaagctcactttaaggagttataagataacgctgtttaagaagccaaggctaaagaaatgggctccacacacccgccttttagagcaaggttgaaggaaaaaagaaagagaaattcctttactgttactcctttccctggcttcctaagcataactgtgtttacaaatgtctggatttagccagtccttgtttttcttttgacacagctacaagccacaagttatgcactatatgattaactgcttttgttttacttttgtgaagtctgcttataaaaaccccattctgtctttattcaatgctaagctttttaaatgcaaatccactgagctagtgcatacctaaaataaacagtccttcccttctccatatcggtctctccggtcctcagtttcctgcaacagtacaacttagattttaaatttttaagaagtttttcaggcagagtgtggtggctcatgcctataatcccagcactttgggaggccaaagtggaggactctttgaggccaggagttcaagaccagcccggcccacatagcaagaccctgtgtctacaaaaactttttcgaatcagccaggcatggttgtgcatgcctgtggtctcagctacttgggaggctgaggcagggggatcatctgagcccaggagtttgaggctgcaatgagctatgtttgtgccactgcactccagcctgggcaacagagcgagactctgtctctaaaaaaaacaaaaaacaaaaatcaaaaaacaaaaaaaagcttttcaagtgcaccagtcttaagcatagagcttggtgaatatttccatatgtctgcttgtgtaactaacacccagatcaagatatggaacatcttcagtgtcctggaaagttgcttcctgccccttcccagccaacactccctgtccccgtcgtccacccccagaaagccactgccatggacttctatcaccatccatttgtttcgcctgttcttgagctttgtatttaggctggtgcaaaagtagttgagagctggacgtggtgggtcacacctgtaatcccagcactttgggaggctgaggcgggtggatcacctgaggtcaggagcttgagaccaacctggccaacatgctgaaaccccatctctactaaaaaaaaaaaaaaattagccgggtgttggtggtgggcacctgtaatcccagctactcaggaggctgaggcaggagaattgcttgaacccaggaggcggaggttgcagtgagccgaaattgtgccactgctctccagcctgggtgacagagtgagaccccgtctcaaaaaaaaaaaaaaagtaattgtggtttttaccattatatattacctttgctccaacctaaagtaaatagcctcctgcggtgcaggcatacctcgctttacggcactcctgtgatgcgggcgtaccttgctttacggcactcatgtgcaggcgtacctcgctttacggcacctccatgcttagttgagcttcaaagatgctgcgttttttttcaccagttggaagtgtgtggccacctcgcattctctctgtgttacgtgttggtggttctcacgatctttcagacttttttattgttatgacacctgttacagtgatctgtgatcagcgatcctccatgttagcattgtcattgttttgggcaccacagaccggacccggcaaccttcatctatgaacgttgtgtgttctggctgttccgcccaccagcctttcccagcctctctcctctccccgctccagcctccctattccctgagacacaaaaatatccaagttagtccagtgagtaaccctacagtggcctcgaggtgtgcgtctgtcactttaaatcaaaagctagaaatggttcagtttagcccgggctcggtggctcacgcctgtaatcccagcactttgggaggccgaggcgggcagatcacgaggtcaggagttcaagaccagcctggccaacatggtgaaaccccatcgctactaaaaatagagaaattagccgggcgtggtggcgggcgcctgtaattccagctactcaggagtctgaggtgggagactcacttgaacctgggaggcagaggttgcagtgagctgagattgtgccgctgcactccagcctgggtgatagagactgtctagaaaagaaagaaagagggagagagagaaggaagagagaaagagagagagagagagaaaaaagaaatgatttagtgtagtgaggaaggcttgttgaaagccaagataggctggaagcggagcctctcctaccagttagccaaattgtgaacacacaggaaaagtgttttaaggaaattcaaagtgcttctccagtgaacacaagaatgataagggaaacagccccactgctgatatggagaaagtttgagtggtcggataaagatcaaaccagccacaacgttcccctgagccggagcccaatccagagcaaggccctcgcactctgcaagtctgtgaaggctgagagaggtgaggaagctgcagaggaaagtttgaagctggcagagatttgttcatgaggggtcaggaaagaagccgctttcataacagaaaaaggcaaagtgaagcagcaagtacggatggagaagctgcggccagttgtgcagaagatgtagcaaagactgtaaaggaaggtcaccgcactaaacatcagatttttggccaggcgcggtggctcacgcctgtaatcccagcactgtgggaggccgaggtgggtggatcacttgaggtcaggagttcaagatcagcctggcctacatggtgaaaccctgtctttactaaaaatacaaaaatcagccaggcctggtggtgcacatctgtaatcccagctactcaggaggctgaggcaagagaatcacttgaacctgggaggtggagcttgcagtgagctgagatcgcgccattgcactccagcctgggcaacagagccagactctatttcaaacaacaacaacaaaaccaaacaaaacaaaaacaaaacagatcagattttcaatgtagacaaaacagccttctattggaagaagacatatgtaggactttcatcctagaaaagggatccgtgcctggcttcgaagtttcaaaggacagaaggacaggctgactctagtgttaggggccagtgcaggggtgactttaaaccagtgctcactgaccattctgaatatcccagggactttaggagtaatgctcaaacaatggtattcttcacagaaatagaaaaaaaaaaatgctaaaatttatatggaaccaaaacaaaaataacaaaactggaagaatcacattacctgactttatttgtttattttttttgagacagagccttgctctgtcacccaggctggagtgcagtggcccaatcttgcctcactgcaacctccgcctcccgggttcaagtgaatctcctgcctcagccccccgaatagctgggattacaggcacctgccaccaagcccagctgatttttgtatttttagtagagacaggctttcaccatgttgaccaggctggtctcaaactcctgacctccggtgatctgcctgctccagcctcccacagtgctgggattacaggtgtgagacaccgcacctggcctctctgaagacttttgatgcagctttggtggaataatggtcagggctgggctccctcagctgctcttccctctctcattcccatcctcaattcttgggcagaaaataagtttatcacttaacagtcagcctctgtatcacccttgcgacaggctggagggtgtcgctccagcctgggcaacaagagtgaaactctgtctcaaaaaaaaaaaaaaaagacaaaaagaaaaagaataaaaaataaagttagcaatattcagcaatgatgtggccggcaagagcctgcagaggatcatgggccaggtcacccatcctcactgagtcctgcacggctctcggctcagctcacgaggctctcaggagcaagtccctgcctcctctccagcacggccctctccccctctgctcactctgtgttctagccctcctggctatttatagtcccctccaggggccctgctgtttcccactgggtgccactgccaagcctcctctcaccgcctgaaactctgctcctgtcccccacccgcctggcaggcacccacacagctttcaagatccaattaataacagtaataatagcagctgagatggattgggtgcttcctatgtgctaagtgccgtatgcgtgtcatccagtttaacccccgcagcggcccgtgcacttgatcctgtgtcgtcccccgtttcacacggatttgctaaacccgtatccatttagtagcagccaccctgtgccaggcactcctcggaggcacagagaggttaggaagtgccagagcgtgggctggaacctccgctgccggaccgcagggtccctgctctcagccacagcgatgaactgtcttccttagcgtggcaccaaagcctccccagccacctcccctccccgagtgttgcccacaccctccggtccgccttgccgggcctttgaggcctctgtcgtagcatctcggagatttgattgctgattggactcgcttcctctctgggctgtgaggatatcatttggaaatgtgttcattgtaagcagcagaaaacccaatatatagggacttgtatttcccatgagcaggaaatgagacaggctcttcctagtgtggctcagctgaacagcatgagggaaatggctctgttcttttatttatttaatttaatttaattaattaatttttatttttttgagagggagtcttgctctgttgccccggctggagtgcagtgctacaatctcagctcactgcaacctctgcctcctgggttcaagtgatctcctgcctcagcctcctgcgtagctgggattacaggtgtgtgcaaccatacctggctaatttttgtatttttagtacagacggggtttcatcatgttgagcaggctggtctcaaacttctgacctcaggtgatccacctgcctcagcctcccaaagtgctgggattacaggcgtgagtcaccacccggctaatttttgtagtttctgtagagatggggtttcaccatcttgcccaggctggtctcgaactcctgacctcaggtgatctgcccgccttggcctcccaaattgctgggatgacaggcatgagccacgcgcccggcctctgttctttcttgacctgttcctggtggcagcagtaaagccaccgtaactccaatcatcacccatgagttcaaggcaaaatgtctctttgtaatcatcaaagtcagggccttgccagaggtcccagcatgcttcacttgggtctcagtggccagaatggtgtagggcagccgttcctggtaatgagagaggcagagaaagcgggtatcttgcctgggactggtctgttgccacttcctagaaaacgagggtagagtaagcaaggaagaagggaagacgggtgtcgggtgtctgccagtgccctagagcgcagagaccgtacattaattttttcaaaatttccagaatcggaaggctctaatgattttgtgttgtagccttccagtcttttttctatgcacgtatgtttttacttttttcagacattgtaacatactttaattattgttattaatctctttttgcacttgataagatgctattcatcatccatatagtttttaatgctatatagcagcccatcttgtagaaaaaccataattgactcaaccagtctcataattcaggttgtttttaatatttcacacttacagacagccctgtgacttacaactttatttttatgttcatttataactagtatcatagatcataatcttattacgctgggtataaactgtaccaaccactaaaccttttgataccagttaccagattgactctagaaaagttgggccaactttttttttttttttcgagacggagttttgctcttgctgccaaggctggagagcaatgttgtgatcttggctcaccgcaacctccacctcccaggttcaagcgattatcctgcctcagccttcccaagtagctgggattataggcatgtgctaccacgcctggctaattttgtattttagtagagatggggtttctccgtgtgggtcagcctggtctcgaactcctgacctcaggtgatccgtccacttcggcctcccaaagacctggggttacaggcgtgagccactgtgcccagccaaagttgtgccagttataggcagcctccaagagtttctgtgagtacctatgccctgacagctctggatattgttattattatcttaaaatccttgccaatttgacacgaacagtgaaaactatatagaactttacattttctttcattacaaatgaggttaacattctttttaatgcattttgaatatttgtagttctcttttaaattttctgttcatttcccttacacatttagaaagttgaggttttcatcttttctcattggcttgtaaaagtgctttattggccaggtgtggtggctcacgcctgtaatcccagcactttgggaggccgaggtgggtggatcacaaggtcaggagttggagaccatcccggctaacacggtgaaaccccgtctttactaaaaatacaacaattagccaggcatggtggtgcatgcctataatcccagctactcgggaggctgagacgggagaatcgcttgaacctggcaggtggaggttgcagtgagctgagatcgtgccaatgcattccagcctgggtgacagagcgagactccatctcaaaaaaaaaaaaaaaaaaagtgctttcggtattcaagtattatcataatatgtagaatacaggaaagttcctgggagagggcacagatgaggcagatttgagggcaaaacaggatttcaccaggtggacaaggggtaaggagaggtatatatatatgtgtatgtgtgtgtgtgcgtgtctttgtgtgtgtgtgtgttcatagagacagagtctccttatgttggccaggctggtctcaaactcctgggctcaagtgatcctcctgccttggaggatgccccacatcatagtgatgggatgacaggcgtgagccaccgcgcccagcaaggagggttttctaggcacgggagcagtgtgtgcaaagaggggggagctgtgtgcgtggcaggcactgcatttggtgtgcaaagaggggggagctgtgcgcgtggcaggcactgcatttggtgtgcaaagaggggggagctgtgcgcgtggcaggcactgcatttggtgtgcaaagaggggggagctgtgcgcgtggcaggcactgcatttggtgtgcaaagggggggagctgtgcgcgtggcaggcactgcatttggtgtgcaaagggggggagctgtgcgcgtggcaggcactgcatttggtgtgcaaagaggggggagctctgcgcgtggcaggcactgcatttggtgtgcaaaggggggagctgtgcgcgtggcaggcactgcatttggtgtgcaaagggggagctgtgtgcgtgtcaggcactgcatttggtgtgcaaaggggggagctgtgtgcgtgtcaggcactgcatttggtgtgcaaaggggggagctgtgtgcgtggcaggcactgcatttggtgtgcaaagagggggagctgtgcgcgtggcaggcactgcatttggtgtgcaaaggggggagctgtgcgcgtggcaggcactgcatttggtgtgcaaagaggggggagctgtgcgcgtggcaggcactgcatttggtgtgcaaaggggggagctgtgtgcgtgtcaggcactgcatttggtgtgcaaaggggggagctgtgtgcgtgtcaggcactgcatttggtgtgcaaaggggggagctgtgtgcgtggcaggcactgcatttggtgtgcaaaggggggagctgtgtgcgtggcaggcactgcatttggtgtgcaaagaggggggagctgtgtgcgtggcaggcactgcatttggtgtgcaaaggggggagctgtgcgcgtggcaggcactgcatttggtgtgcaaagaggggggagctgtgcgcgtggcaggcactgcatttggtgtgcaaaggggcgagctgtgtgcgtggcaggcactgcatttggtgtgcaaaggggagagctgtgtgcgtgtcaggcgctgcatttgtggcttaatgctgccattagagattgccatgaacttgatggcttagaacagcagaaatcgatgctctcgcagtctgaagaccagaagtctgaaatcaaagtcccagcccctccccaggctgccggggcagagttcccacttactcccctctttcagtgtctggtggctccaggcattccttggttggtggcagccccagtccaaaccttgcctctgtcttctcttctgtctgtgttttccccctttctctttccatagggacacagcattggatttaggacccaccggttaatcgacaatgatctcatcttgagacccttcatttattcacatctacaaagaatgttttccaaataaggtcacattcccaggtcccaggaattagaatctggacataccttgtgggggggccactactgaacccaccgcagggagctagaaggagtccgatgtcacagggcaggagaataggaccctggagaggtggagcaggtgcagaccacaaagggccttgagctgaggagcggggctgtgtccctaagtgaatggggggcaacacggtctgatttgtgacccggctgctgtggggagggtgctggaattgtccttgtaagagttggtgagggtggggaggagcggggatgcctcacagtgcaggagatgaggggcgggaatgtggaggcatctagaatggctcccaggttccctacgtgtgtggtctttgggaaaaggctgcgtttgaggctcctaaaggtggagatgcccaggagtctgcagacctgacttcttccgggagcaggaacacaattcgggagaggaaggtgatgcgaggttgatggaagctggcgagtaccagtccctgccaccaccaccattttatcatgaacaattgtaagcacacagaaaagttgaaagaattcacagtgaacacccattcacctgctgtctaacgttcccagtgatgatttttatgcgcttgctttatcacacagctgtccatctttccatccctctgaacatcatcattccatcttggtttttttgttgttggttggttggttgtttcgagacagagtctcactctgtcacccaggctggcgtgcaatggtgcaatctcagctcatcacaacccccacctcccgggttcaagcagttctcctgcctcagcctcccaagttgctgggattacaggcacccgccatcgcacccagctaatttttgtatttttagtagagagggggtttcaccatgttggccaggctgttcttgaactcctaacctcgtgatccacctgcctcggcctcccaaagtgctgggattacaggtgtgagccaccgcgttcagcccatcttattttttatgtatttcggagtaagttgcagagagttgtacacttcactccagcatgtcactcactggagcccaacatttgctgaagtgcatgaatctttttttgttcttgtttttgtttttgtttttttgagacggagtcttgatctgtcgcccagtctggagtgcagtgtcgcgatctcagctcactgcaagccccgcctcctgggtccacaccattcttctgcctcagcctcctaagtagctgggacaacaggcgccaaccaccacgcctggctaatttttttgtagccagtatggcttcaccatattggccagtatggtcttgatctcctgacctcagatgatccgcccgcctcggcctcccacagtgctgggattacaggcgtgagcccctgtgcctggccctgtcatctaggttttaagcccctcgtgcattaggtatttgtcctaatgctctccctccccttgccctccaccctccaacaggccccagtgtgtgacgttcccctccatgggaacagcaatttttaagggatgggtagagaaagaagatttcaccaaggagcctgagaaggacggtgacagtcagaggaaaagcaccgaagcggggacgtcagggaagatcacctgggtcagttaccttaggtttgactgcagataatagaaaaaccaagtaacagaggctcaaattgcatttggcactttttctttcttttatgtaaaaacgccccgaggtagaccttcctggggtgggctccactgtgccctcagtgacctggactcccagcttgtgaaaacgtcccgaggtagaccttcctggggtgggctccactgtgccctcagtgacctggactcccagcttgtgaaaacgtcccgaggtagaccttcctggggtgggctccactgtgccctcagtgacctggactcccagctttctgctcagctgtcttcagtggtggcttctatcctcagctcacctcatggttcaggatggctgctggggctccagccatcccatcaactctccaaaccagcaacagaaggaggaacaagggcagtgtggatagtgtacctttcggctaaatcagtctcttccagcagcttcctgcaagttccacacatatccctgtaacatcttgttgtctagaacgtaatcatatggctcacaccatcaggaaaggtgtctttgaactagctgctgggtgcactgccgctccgaatacagtaggatttctgttagtcggcggggaaatggatattggctgccagcagcctttgccttgtctgccttttcttcttttttgagatctggtgcccaagccgctgtctgctcagcatacccacctgtggccgtcggagactgaagcctgtgctcagtaggtccccatcttcctcccccagggttcctgccttctccgaggattggtttccccatcttttctgtaccccttttcctggttggagtctcctgggctctcatggttttgtgggggcagaaatgaaaggggaaggccctggaaatgttcgcaggccgagccctttcgccgcccctgggcctccgcccaccagcaccctgtcctcaggccccctgcgttcagctccatggtcagccccccttaaccaggagggatatggaaggggacttctttggagtgagattcagagggaaagggagggcatttgagacctgggttctgatcctgtgatcttcggcaattgtatgtaaattgggaaaaataagaactgcctccccgcggaacatccaggctggaaggagcaggggatggcagggcccgtggtcctctgctctgatcaggatgaactgtgcatgtggggagactggcagagaccttccctaccgtcccttcccccccgttgatcttggacgatctcccaagtgtgtggggtccattcctgcgacccctgggaattggtcagtgtacaggagagtctgcttggccggctggaatctaaactgtgggcaaagccgcggtccactattgcttattttccctggactccaggcaccaacagggcagcctggagcctcctggagaggaggagggaggagggaggggccggcgggaggctgccttccatcccctcctgtgcttctccagagtgagggggtgtcaccaaacggccaggcccttcacggacccagactcaggccagctgggtgccgctgtgcctcttcctcctccccctggaaggaccagagtcatttcacatcccttcagccacagacacaagtgtcatggtctccagggcactgggccttatgtcctaggtgcgtggcctacacacatctcagtgggagggcatcctgggtcctgcccaggtacgtggcgtacacgcgtctcagtgatggggcatccctgggtcctgcccgggtgtgtggtgtacactcatctcagtgatggggcatccctgggtcctgtggttcttcatacacaaccctgtctagggaaaaaactagtccatgtcccctggcagctgaatggggcattggctcagggacgaggagaggcagccgacagaagcaggtgcagcgagcctaggggaagcgctcggctgccaaaaggccagattgggcagagtgtggccacggccaggcgtcccggtgacctgttgacaccattctccagctgctggttgcctgtgggctggtgtgttgtgacagaggagggaagagctggggcccccgtggagaacttggctggctgggacttggctgaagcctcagacctgagacagacggtgcgatcctctgctcattcattcgctccacgcactttccccgagagcctgccacaggtggggttgtgggtgctggcgtacagtgatgactcagatgctcacctcctgccccaggggctcaaggacaaaggggcaggattcactaaggtgccagggggccaggtgccatggggagggtgacctggaggaaaggatgtctgggcagatggcagggcaggctcagccagcctcccccatcacactgtgcgagatccgaagatgcctggccagggagtcccgcccggaagatacccggggaggtttaacaagcggacgccgccactgggcagtccagtgcgtaggaggctcctgctggccccaaggctgccggcacggtgatcttcgtgtctccaggacgccctgcggtgccagctcccgctggcccgcacgagtgctgaagcttacccctgctctgcgatgagtgtgagaggggtgtccaccccccgctggcggccccagcccaaggaggtccaccacagccctcgggagcaacactgccacgttctccgttgccagtcgtggtgggtcagagctggggagcaaacaggccaaggggcaggggccggtttgtgggagggtccctcctatagccatgctggtggggctggacgcaggggcctttccgaggccgccctcgtaacccttttggaaaatgtgaagccctgagctgctgacctgcacaccccgctcgctgcactggctcagcctcccctcccaaggtgggtgggctccgtgcctgggctctggagcccaagtggtgctggcagccctggggggttaatgcggctcaacttcccggtcgcctttccttccctcctcctttgaaggaagcccacactggggtgatagaaataagcaccggctccgaggagtctgctgtgagcccctgtccctgccaggcctgggcacagcctcctcgcccacgccctgctgccttgggctccgtcctccgtgcggggccttgttctgagggctgagggctcccctcccacactccagaacctgccctggacccctggagggagtgggctcagtacaaatggtacccaaggaggagggccacaggaagtgacatcgaccggccccccccacctccttattccctataaaaagcaaaatggtgactcagagaggagagttggaagcgtcctgcctcttgctcccactgttaatttttacacttggaattaggcagaaggcaaagaaaacagcagcttgaaatacgcggctgacatgctcttcatcgggtagcaacagcagagccgctcctccccgcctcccagcagccccggagcgggcagggcccggtgcctgctggctctcccccgcccctcaccaggcccaggcccccgcacagcccccgcccgggccaggcgtggatggtgcggccggggccatggctgccgggggccgccgccggcgcccactacgctaccagtccctggcagctctggtggaggattctcagtggcctttcttgttccttgtctcagacttcagctacgggacggacgagtacgacggagaggggaatgaggagcagaaggggcccccggagggctcagagaccatgccgtacatcgatgagtcgcccaccatgtccccgcagctcagcgcccgcagccagggcgggggggatggcgtctccccgactccacctgagggactggctcctggggtaggtacaccggcttttctttctgggtttggggaggggtgacgggaaggcctgggcatcgtgggccaggccctgcttgggttggtctcgagagattgggactggagacgtttggacctggccgttcttggtgcctcgtcatctcgtcctggccctggacccctctcaggctcgggcttccctccccacctgctttgccaacgctgccgcccctgtctctccccgtctactagccgtctgctccccaggcctcccagacccctccgtgcctctttcagctttcccctgttagcctgtctcctccagaggacccaggagaggaccaggctctcctcccctctgcacccaggccaggcagtggctgcatgcgtggcccgtgggctccaggtgttcagatgctgctcccgcaaagccagcctgggcctggtgctccctgtgggtgcaatgagctgcccgctccagccctcctctgttcactctggaagggaacaaactctgatggcatccacctctccttgttgacagagacaagagttctgctccagagagaagcattgtagaaggaatattaagtatgtgctctgagacaggccagggatagaaactgtggagggtttgcggtccttgtcattaacgtgttcctggcgacagggactgacgctgtctgagcgcagctcgtgtgtgcctgtcggagacacatgaacgagcaaaacagaggttctgggggttgtttgcctggagctggtgggggagaagaatccaagccggtcctctgtggggggtgtgtgttgcaggaggcggtgggagtgccccatccttgcttggtcctgctcgtccgggtgtgttttgtagggggtctccgtcctgccttctgacgtccccagaggagcagtcgctgagatgccacgggctgcctcttcttcctccaggggctagtgcccccccaccccagctgaggccgcctgaaccctcccattcttgagaaccccctgctccttccagcccccccggccaccctccaccccccacagagctctcacccctcttcacacaccggggtggctgttatagcctttggcaacaagggccttggcaacgggcttcccacttgggggaagccacattgctgccatggcaacagaggccgaggccgagtttagcggcagtccaggcgtgcacctgtgggaagggctggcggggggcaggtgggaggcaagggggccggcgagggggttggtcagtgtgttgttgacctgccctaagacgggaggcgggttagagacaagcgtctcggacctgcgggggcagggtttttgccctggttctcctggaggcattgggctcagggtacaaatagtaacccaaggaggcagagcaggtgttcagggacctgaacgggggccaaccaggggagagcaaggaggagaagactctcgctcccatctctgccttcagctctcaaaccacagcagggctcagagccccgcccggggggactcagctctcaccccactgtgagcagctgcaggaagatgctgcggaatcccggtgtggggccagggtctttgccgctgcctgtccccgcgccacctccctctttgctccctgtccctgtgccctgtccttgtcgcgtgaccaccatgactggtttccgtgtccgtcgattttccgattcctttggtgctggcaggtgccttctctcgggagacagatcacgggcgtcacgcacagatgcccccgcctggcgctccggggcttcggggcagaacttgacttggtggctgtgcgtcttgcttggtggctcacgagggactcacttggcttgaggaccttgaaatccagagatgctagagtgactgccccctaaagtgcttgtggcccccagggttgatgtttacaccatcgactagaagccacgcaaggcaggagtagggagcacttgtccagcctggggatcgtccgggcaaaggtcccatccgcggcacctgccttccctcctcagggagcgtttctgccctttctgctgggtcaccggccccacctagtggactctgcagggattgctgtttacacggggtgcctggagggagctgacgcctcttcctgagtacttggggatgttttggttaaaaacactattaataaaagaccgaggtttctgcggcttggctgtgcttatttggccaaacaggtcccctcccctaccaggcttcctgctggggccttgggaacaggggggacttctggaccaaatcagacaattgttgtagatattcagatatctggcttctggcaccgccttatcgctgggccttccacgcccaaatatgcagccaacgggaagcccaaggttgagtctttgtgttagtcagtgttctctagagaaacaaaaccaacagggtgtgtgcgttatctgtatctatatctacatacgaagaaaagtattagaaggaattgattcaggtgattatggaggcttagaggtcctaatctctgcagtcaatagctggagacccaggacagccaatattggttccagtccaagtccaaaggcctgagagctaggagagccagggatgtaaattccagctcataagccagtggactcgaggctcaggaagagccagtgtttcagtccgagtctggaggctggaggaggccaacatcccagctcacgctcaggtagtcaggcgagaggagcttcctcttattctgcctttttgttaattcaggtgttcagtggattggatgaggcccacctacactggggaggagtctttttactcagtccaccaatacacatatcaacctcatcccaaatgcctcacaaatatgtccggattaatgtttggacaagtatctggacaccttgtggcctagtcaggttggcctagaaaatgaagtgtcatactattattccttcagccacccaggatggaaagcagataagctttgcgcagatgaaaatctattactctcaggctgggcgcggtggctcacgcctggaatcccagcactctgggagactgaggcagccagattacctgaggtcaggagtttgagactagcctggccaacatggtgaaaccctgtctctactaaaaatacaaaaattagccgggcgtggtggcacatgcctgtaatcccagctactcaggaggctgaggcgggagaatcacttgaacctgggaggtggaagttgcagcgagccgagatcttgccactgcgctccagcctgggtgacaaagcgagactccatctcaagaaaataaaagaaaatctactctttagctgtgagacattgggcaagtgtcctcataccgctgagcctcagtctccttgtctctagatagctctaactcccctgaaaggtagtggggaggaggccccactgtgagcagctctcagaccacagcagggctcagagccctgccttggggactcagctcccatcccactgtgagcagctctcagaccacagcaaggctcagagccctgcctgggggactcagctcccatcccactgtgagcagctctcagaccacagcagggctcagagccctgccttggggactcagctcccatcccactgtgagcagctctcagaccacagcagggctcagagccctgcctggggggactcagctcccatcccactgtgagcagctgcaggaagatgctgcggaatttcagcatgaggggaggcctgcagcattaggcctggctcaccaaagtgcacagcccttggccaccagggcccacaagacttttctcgccaggtttagagggctggggagccaacagcattaccactgcaaagaccaagtctgatcaatatctgctgcaccatgaccgaacctgcttttgcaatcaacctcctttctgccacatggggtggccccgggtgaagccgggtctctgcggtgttggcaggacatgctcctctctccccagcacgcccttccacagccttgcactctgcctttgtcttcttttgtgtccccaagacatggatcccacagaggtattagggtgaaacctgaagccctgccccataaaccctgcccaagtccaggctgagcagggcagcacggcagggccaggcccacagaccacgggtggctccattcagcggagactgcccagtttcactctgagaagaaagggccaggactcatctcagctgacaagtgggggtgtaggttcctaaggcaggaccatggtcttacagaaaacccgcctccccacaggccacagactcctctgtctgcttgcctcttgggaagcttagtaaaaaggggctacaaggcagagagaagaactgggttttgtccccactctaccactgtctcactgtgtggcctgaggggtgtcactcatgactccccaccagagctgcagtttgctcatctgtagtgtgaagacactgagaatttcctccctcctgacctcacagggctcaaacctcacagctgttgtgaggtttctgtgagatggtgtttggcagaatgctttgtcaatgtaaaatcgaaacaggggattagactccagcctgcaggagaacccaaagataagggtggaggcgaattgaaatcctcaccattggccgggtgcggtggctcacgcctgtcatcccagcactttgggaggccgaggtgggtggatcacctgagatcagtagttcaagaccatcctggccagcatggtgaaaccccgtctctactaaaaacatacacaaaaaattagctgggtgtggtggcaggtgcctataatcccagctacttgggagactgaggcaggagaattgctagaacccagtgggggcagaggttgcagtgagctgagatcacgccattgcactccagcagccagggggacagagtgagatgccatctcaaaagaaaaagaaaaaaaggaaaaaaaaaatcatcatcattgtccctatcatcctcttcctcctcctccccctcatcacagctgcttagagaggcttgtgctgaacctttcacgtgttggtttcatttaagagccccaacaactctatgaggtaggtgctataaccatctccacattacaggtgcgaaaactggggctcggagaggtgacgtaatttgcctaagattagctgggcatggtagttcactcccataatcccatctacaaggggaactgaggcaggaggatcgcttgagcccaggagttggaggctgagaggtgctaggatcacgcctgcgaataggcattgtaccccgcctgggtgacagagcaagactccatctcttaataatagctattaatattattgtttgtccaagaccatgcagccagtggggcagcgtgttattgaaacttgggtttctatgatgccagagcctgcacagcgctgtcaggtcccgctcacacgccctcccttgtgaagctttcacacccaccccgccgctgatcctactgcagtttgggaggtgtgcacggtcacttgtggggtgcatccgccctgtgagatcaggaccttaatccctgatcatctctgtggaccccagtggaagcttcttggcacctaggggttctcaactggtatttgtggaatggaaccaagtagttctgggatgttcagtcaggaggaagggaggagcaaggaaggctcaggcaataacgctgggaagaactcaggctcagggataacgctgggaggaactcaggctcagggataacgctgggaagaactcaggctcagggataacgctgggaggaactcaggctcagggataacgctgggaggaactcaggctcagggataacgctgggaggaactcaggctcagggataacgctgggaggaactcaggctcagggataacgctggggaggaactcaggctcagggataaagctggggaggaactcaggctcagggataacgctgggaggaactcaggctcagggataacgctgggaggaactcaggctcagggataacgctgggaggaactcaggctcagggataacgctgggagaactcaggctcagggataacgctgggagaactcaggctcagggataacgctgggaggaactcaggctcagggataacgctgggaggactcaggctcagggataacgctgggaggaactcaggctcagggataacgctgggaggaactcaggctcagggataacgctggggggaactcaggctcagggataacgctggggaggactcaggctcagggataacgctggggaggactcaggctcagggataacgctgggaagaactcaggctcagggataacgctgggaggaactcaggctcagggataacgctgggagaactcaggctcagggataacgctgggagaactcaggctcagggataacgctgggaggaactcaggctcagggataacgctgggaggactcaggctcagggataacgctgggaggaactcaggctcagggataacgctgggaggaactcaggctcagggataacgctggggggaactcaggctcagggataacgctggggaggactcaggctcagggataacgctggggaggactcaggctcagggataacgctgggaagaactcaggctcagggataacgctgggaggaactcaggctcagcgataacgctggggagaactcaggctcagggataacgctgggaggaactcaggctcagggataacgctgggaggaactcaggctcagggataacgctgggaggaactcaggctcagggttaacgctgggaggactcaggctcagggataacgctgggaggaactcaggctcagggataacgctgggaggaactcaggctcagggataatgctgggaggactcaggctcagggataacgctggggagaactcaggctcagggataacgctggggaggactcaggctcagggataacgctgggaggaactcaggctcagggttaacgctggggagaactcaggctcagggataacgctggggaggaactcaggctcagggataacgctgggaggaactcaggctcagggataacgctggggggaactcaggctcagggataacgctggggaggactcaggctcagggataacgctgggaaggactcaggctcagggataacgctgggaggaactcaggctcagcgataacgctggggagaactcaggctcagggataacgctgggaggaactcaggctcagggataacgctggggagaactcaggctcagggataacgctgggaggaactcaggctcagggataacgctgggaggaactcaggctcagggttaacgctgggagggactcaggctcaggcaataacgctgggagggactcaggctcagggataacgctgggaggactcaggctcagggataacgctggggagaactcaggctcagggataacgctgggaggaactcaggctcagggttaacgctggggagaactcaggctcagggataacgctggggaggaactcgggctcagggataacgctgggaggaactcgggctcagggataacgctgggaggaactcgggctcagggataacgctgggaggaactcgggctcagggataatgctgggaggaactcgggctcagggataacgctgggaggaactcgggttcagggataatgctgggaggaactccggctcagggataacgctggggaggactcaggctcagggataacgctgggaggaactcaggctcagggataacgctgggaggaactcaggctcagggataacgctgggaggaactcaggctcagggataacgctgggaggaactcaggctcagggataacgctgggaggaactcaggctcagggataacgctggggaggactcaggctcagggataacgctgggaggaactcaggctcagggataacgctggggaggaactcaggctcagggataacgctgggaggaactcaggctcagggataacgctgggaggaactcaggctcagggataacgctgggaggaactcaggctcagggataacgctgggaggaactcaggctcagggataacgctgggaggaactcaggctcagggataacgctgggaggaactgcagcctcttcttccctttcttggtctcttcagaaggcttagggcttgggattcgaggttgctggtaggtgcgtgaagaggcggcatggcagccaggaactcctgagatggtgcctgctccactccctcctgactgctccggacctgggttgtgtggttcagggactcctcgagtttcagcctccgccccccagcagccggcccctgcatttctccccttcctggatcttgggtccctgctgcaaagagaaggacacgagctggaccctcccgtgtgccaggtgctgtgctaggagcccaggggctgccctgccacccaagtcctccagccatggggctgcccccgtttagtagatgaagacactgaggctcagggtggctcctgggcttgtcccagttgggaaggaggtaagtcggaagtaggtagactagtgccttggttgtgaccctgggtcccgtcatcgctggctcccgtcctctctggccctcctacattcacacctggctgggatcttgctcacctctgcatactgttaatcttccctgatgaaccacacctggctggcctggctcatcccacagctctcacgccctgtctgggatctccgtcttctggctagctagcagccctagagttgatgccgtaattacccccattctatagatgaggaaacggaggcacagggagactagatgacatgcccaggtcacacagttggcaagaggcagagctggggctcacatccagagtgcaggggagttttctttctgttttagtttatttgtttcactgtataaacagtgttgtgtaccggcttctcctcaacattagctttattttattttatgtaatttatttatttgagatggcgtctccctctgtcacccaggctggagtccagtggcgcaatctcggctcattgcagcctccgcctcctgggttcaagtgattctcctgcctcagcctcccaagtagctgggattacaggccaccacatccggctaattttgtatttttagtagagatggggtttcatcatgttggccaggctggtcttgaactcccaacctcaggtgatccgcccgcctcggcctcccaaagtgctgggattacaggcgtgagccacctcgcccagcctatgtattttatttttttgagacagagtctccttctgtcacccaggctggagtgcagtggtgtgatctcggctcactgcagcttccgcctcccggggttcaagtgattcttctgcctcagcctccctagtagcggggattacaggcacccgccagtacgcctggctaattttttgtatttttagtagagacggggtttcaccacgttggccaggctggtcttgatctcctgacctcaggtgatctgcccgcctcggcctcccaaagtgctgggattacaggcgtgagccactgcatctggccaacattagctttatgtagttgaactatgtatatgattttggagtgacctgtactagaacagagaggaggcagagggaggagcaaggtgatctggaaggtgacgaatccagtcccatctgtggctgcagttagtggctgcaactgccctggcacttgccctttggtgtcagttcccattggctgaagagctactgagcttcatacagtctggaggtggggcttgagtttctgccaggaaagctgggagagccagggagaagccaagaggcgggagaaagtgcttcaagccgaggacctgccgttgttaaaggcctggaagtgagaacgtgccaggccctttgagaggttactgtcaacagtgagatgggtgagtcatcagctggggccccacggctcttgtttgggctggcttggtggcttcctgctgggcatagagtgagcagtgttttagaaagagtcatctgatgtcagcaggagggatgcaggatgaatgtcctgtcacacctgtcctgaaatcctccagcaccttcccttcgcctatggggccccccttccctttgcacagctgtcaaggccttgtgtgacctgacccctggaccccctgcctacctctgtggcctcaggaccaactccgtgctagaattgtgaactctcacgagagagagattttgtcggttttgtaacaaaacttgctcattgcagtctctggtgccgagaactgtgcctggcacacagtaggtgctcagtaaatattagctgaatgaatgcatgaaccagccagactaaactcatgtcattgtgcctcacatagtctctctcctgtctgttccccagccccaccagcatctctaaccactgctttttttttttgagacggagtctctctctgtcacccaggctggagtgcagtggcgcgatctcggctcactgcaacctccgcctcctgggttcaagcgattctcctgcctcagcctcctgagtagctgggactacaggcgtccaccaccacgcctagctaatttttgtatttttagtagagacggggtttcaccgtgttagccaggatggtctcaaactcctgacctcaggtgatctgcctgcctcagcctcccaaagtgctgggattacaggtgtgagccactgcgcccggccataatttttttttttttttttgagacagagtcttgctctgtcgcccagactagagtgcagtggtgtgatctcagctcactgcaaccactgcctcccggattcaaggaattcttgtgcctcatcctccagagtagctgggattacaggcctgtgccacccctcctggttaatttttgtatttttagtagagacagggttttaccacgtagaccaggctggtcacgaactcctgaactcaagtgatctacctgcctcggcctcccaaagtgcgggattaaaggcgtgagccactgcgcccagcctaattttttttttttttttgagacagggtctttctctgtggcccagtctggaacacagtagcacaaacacagttcattgcagcctcaatatcctgacccaagcaatcctcctgcctcagcctcccaagaagccgggaccacaagagcatgccaccacactcagctaattattttttaaaatttttatagagatgaggtcttgccatgttgcccagctggtctcaaactcctgggcttgagtgatcctcctgcctcggcctcccgaactgttgggatttcaggcgtaagccactgcacccggcctatatgtatagtttattcgtggacacaaataaggaaaaatgtataactaactcttagaggctccctctgtcagagggaaccagaggagactttctctttctttattatgtgtgtctacagagttagaattgttagtgatgtaacaggaaaataaagaagttaaaatagaagtgccacgattgggaacgtagagtgggctctgagggcaccagcgggcacatctgacgcagccaacggggagtcacgggaggctccctggaggaggtgacgtttaaagtcgaatctaaaaataagcagtgggccaggtgccgtgtctcacacctgtaatcccagccctttgggaggccgaggcgggtggatcacctgaggtcaggggttcgagaccagcctggccaacatgatgaaaccccatctctactaaaaatacaaaaattagccgggcctggtggcgggttcctgtaatcccagctacttgggaggctgaggcgaaagaatgggttgaaccgaggaggcggaggttgcagtgagctgagatcatgccactgcactccagcctgggtgacagagcgagactccgtctcaaaaaaaaaaaaaaaaaaaaaaaaaatcgcaataggtgtttccatgttatcccttccagaaaagtggcacctcagctgcagagttctgacactgctcccctccccagtacggccttgcccctcccttgacactgccttgggagtcagtcaccaggtcaatctgtccctgagactgtcagctccgcgagggtaggcacggggttccctgtccatggctgcattccgatgctagcacactgcctggtgcacagcaggcggctaacaaatgcttgctgattgggtcaggcggttaacaactgcttgctgattgggtcaggcgttaacaaatgcttgctgattgggtcaggtggttaacaaatgcttgctgattgggtcaggcgttaacaaatgcttgctgattgggtcaggcgttaacaaatgcttgctgattgggtcagggaaggagggaatggagggtgggtgtgggggaagactgtggggagtcaaccattggagactgagatttagacttgatggtgtcagaaatctcagtggctgcgaaagatttcaaacagtagctaggtgtggtgtgtgcttatgcccctcaccctccatgatgctgttcagcccacttctccaagttcatcttctgtcctctagcaagcagcgcttcttaacctgccttccttcctctcttccttccttccttcctccctccctccctccctcaagacagagtctggctctgttgcccaggctggagtgcagtggtgcgatcatagctcattgcagcctccaactcttgagctcaaacgatcctcccacctcagcctcctgagtacctgagatttcaggtgcgccactgcaaccgggttgctgaagctgcttaaccctttcctttcgggccttctcttctttgcctggaaacccttccctatttccagatgctactcagaagccactgtcctgtgaagctttcactctcaggcagcgttagtgccactgtcctccatccccagggtggctggtaaacgagaacactgcctcgtgtgttcacacgtcctcaccccagacggatcgagagcctgagaacggcaagggccccgtctcccagcctcgtatgtgtgccatgccaggccttttctgggtatgaatgaatgaatgaacagacagatggacagacaagatcaggagccaaagtggggaagtacgtgtggtcgtgtgggtgtaagaggctctaaagcttggtggggtggtggctttggcaaaggaaaagaagaaccgaaggacttggtaaaagggatgtgggggttgagggaaggaagactcgtaagatggcggccgcactaacagaagtggaaacccggaaggggaagctgtttcagaaggaggaagggtcctttggtccagatgtgtggagtggaagggccgtggctgggcttccaagtgaggagacccagtggccggggcaggtgctagacctagagcccagcaagacaccagggctgcagctggcagcgggccaccactggcctggaagggagaagggctgcttctctgggggaagggagcagagggctgaggctgggcccaagcaagtgactccacatttacaggaggcgggagaatgaagggccagcctacaccagagagtggtcggggcagtgcctgcatcaacagggcagctgagggcttggagaaactctagactgcagaggccaaagagtcggagagggaggcctctggctttggaataaaccgtttgggggggcctttgaagcaggctgcttctatggagaacattaggagccaggccgaggcagatggagtgtggagctcaggtccagggctggctcagggcatttgtcagggaaggggagggaagctgtggggactggtgagtcacttcccctccaggggggcaccgagggcctgtgagtggagtctgtgtctgatggaggggcactctcattactcactggaatttccagccaccggggacagggtggagtagagaggccctggatactcagggagtcacttgtgtggggttcagggattttgggaagaagtgggcgtcagtctcaccatgccgtgtagaggtgtggggaacggggacgaggatatcctggcagacttccaagggcacctcatgtcctcttgagtggaggaaggaacacagcaggggcctgtggggttttaggcccttcttcgtgtcacctgcaggtctgactcatgtgggcagcccatgccatgcacttggagcccgccgggcgggagacagaagaacccgtggtaccaggccctgagctggcatacttgtgccctggggaatgccaggcctggtcgttcccaagccctcgccacagcctcacccgcccgcaccaaatgaggaattgtggctgaaagggcccttcagatgcgccctggctatttataacccacccaggcagggacaggggaaaaccaggggctggaaggagatgggtggggtgggggtgtgcctctgttgaaccctggtggcacagttccctgatcaaaggctgttagccctggggcccctcaagggctcaccccgcaatcccctgctctgtatttcagctctgcaacaggatggagcctctctccagggagggcagcttctctgctgccaatggaattgcatgagccccacctagagcccagagcttctgaagaattctggggggagtggggggctgtggcctgaactcgggccacaggtgtggttcatttagacggcaccatgttgttttaaaatgttaattatttgccatcgttttaaaatcaggagcattcctgttaataagccagattttagcttattttgaacagagatcaggcagccatgagcttgcgtttcctccagcagccatcggctggagtgagtggtggtttcaccctgccctacctggctcgcttcaccggctggcctcacccgcaggcctcacccgcaccctcatgggtgccgtttgcaacctttgctccatcgttgggttgtaaaagagcttttcccagggcctcctctggactcctcctcccatggaaggaggtgtatgtgcatctgggaactagggccagggggaccagaatgtggcctcactccctgcacagttgggggttctgcaaccattggagaagccaggggaagctggctgggagtgggcagggccggagatggtgcctgtcctgggttctgtgtgcactccccttgcaggatggctccctgcggtggggtggctgggggggctgcttggaggaggtgggggtgctggtctcagcagtgcctgtgagtaggtgggaggctgctcagaggaggtgggggtcctggtctctgcagcgcctgtgagtaggggggctggtctgtgagtgggggggctgctcagaggaggtgggggtgctggtgtcagtagcgtccgtgagtggggggactgctcggaggaggggggctgcttggaggagggggatcctggtccctgtgagtgggacgcccaccgctcctgtgcaggacagtggtggcgccgcgctcctgcctgggggcaggtcaggcctgtctgttgcaaagcctgactcctccagcggcggcgggacgcggctgtggcttctgggcgggccggggcctcccctccggaagggggctccggcgcatggggactccggggtggctctgggggtcgcccctgctcgccgggctcctggctcggccgcgcgcggggaatgaagatgcgtctgggaagcggcctccccgctccaccccaccccggcccggccgcggcctcctcgctcctcctccgccgcagaagcctccgccagccgcggccccgcaaccccagaggacgggcggctccacctcgcgacgcgcgtttcctgtgtgttcggagcgagcgcgagcccgagccccggagcccgggaagggcgggccctgcggggccgggcgggacacggaggagggcgctgggctgctgtgcggcgggttcgcctccgccacgggccgggcacggcgtcaggggctgcccgggccttgctccccctttcgccgggcgaggacgcgcgaggcggcggcggcggcggcggagcgggctggactaggtccgggatgcagtcccgggtcgggagccccaggccgggcgcgcgggtgtagacctgccccccctcccgcccgcctcctccctcctccctcctcccgccgccgctgcgtggaccccgcttcctgtctgccctccgcgggctccggctgccatggaggaggaagaggaggcgataggcttgctggacaaggttctggaggacgaagatgtgtttctcctggaggagtgcgagctgggaaccccgaccagccccggctcagggtcccccttcctggtggctgtgaaggtgggagcgtgacacgccctgggcgctggggggggccgggccggcgctgccgaaggtgcgcgggagaaatggctgatgcgggcgcagagcgcgcggccgggtggaagccctcggcggagggtcccggccccggcagctgttcccgggggagaggggcgggcctgcctccccgaccggtgtcctcggggcagtggtggccgccccctccaggccagcccagctcagggctccggcggctgtgccaggagtcacctggcgcgcctgtcagcccgagcctcgccgcctccctggagcgggtgggcaggaatcccccgtttccacggcaaccgcaagagaggggccaccctcttcccagccaggagacagggacttggtgtctccgagctgaggcaagagggtgtttgcaaagggcaagagccagaggtcactgagcttccttgaaggaaaagcactgggtcagctgaaggggggagggaacagctggcttggaggctgcagccaggtgggcaggtgcccttcccgaggcgggacaggcagggagcatctgctgggccctggcccacccgctctggggctgacggcgttctctgcagcagtgacccgtcctgtaggagaggttggctcccggtggaactggagggcagtggtggccagaatcccttgaggagcggggcggccccggaaccacgccggctctgtgagtctggcccggcacaccacagcggtcttcctttttctctcctggacacacctctcagagcttccacctcagccttttgctcagctgctctctggttctgtgtcgagaagggaggcccagtgaggatgcgtttcggggagtttgcagactgctaggcgaggctgcctaaccgagtgcccatcggcggggcctagaaggcatgtgcagccagcattgctggggacgggaggctgtccctgaacctctctgggcctccctgcccctcacagaagatggggatcacagtcctgccccacccactctacagtgtggctctgaggaggagccaatggaggtaaaaatagatgcagaaccacgggagatggctgatgtgtgagtatgggtggagcggtggctgcaggcctgggtggggagtggagctgtagggaggctggcagtggctggcaccccaccctgtcttctctgatctggtgctggcgtagggccgtgggggtaagtcacgtctccccgtgggctcagggaggcctctgcacttagggtctgaccagcctccccactaggaacagggtgggaaagtctgctcctgagccaggagtcaggctgggagtagcaatgctgggatgggaggtgtgtggccctcatgggcctcctctgggaagcccccagcacagatgtgggcccactcagaggctgcctcctggacctccccttctgctggaccccggcgtatgcctcagctaagcccgtatttcattctgctcagatgctcagaactctagacatttgcctccgcaattatatcccattctcctggaggaccaggaccatgtcatattcattgctgaacactgcacagtgcttggtgtggggctggtgcctgtgagagtctgcacaatgtgtgaggcccgctggggcccacgaagggtgcaccaggttcccagcctcgctccatctcagaggtgtcctgctgtgtacggcggtggcccacggatgccaagagagcctgagcacgtgtcacacctgaaaacgctgctcctcctgggtccccgtgagcaccgggatggtgtcttcccctctactttgctgccagcatgggggaaggagacctttctcgaatgccggggagttccaggctccctgctccatcctgaacacctctagaattcctccctcctctaccggcattggcctcagagggagaagacaagcaggtggccacagagcggtgggaagaaagctcctggattcattcaacaaacactctcaggttaggtgctcttcagagcaccctgcctggcactgtagagatgacaagaggaacaaggcgtgatcttccctcacaaggcgttcagagcaaggggcaggtacagggagtaggaatagagtacggaagtaggcagggtgggccagatgcggtggcacacgcctgtattcccagcactttgggaggctgaggtgggcggatcacctgaggtcaggagttcgagatcagcctgaccaatatagtgaaaccacatctctactaaaaatacaaaaattagccgggcgtagtggtgggcgtctgtaatcccagctactcaggaggctgaggcaggagaatcgcttgaacctgggaggcagaggttgcagcgagccaagatcatgccactgcattccagcctgggcgacagggtgagactcagtctcaaaaaaaaaaaaaaaaaaaagactgtgagaagagtactgataaaagggcaccaaattcaggggagaagggaccacttctagtggagttggggatggcctggatgcgtgcatgtgtgtgtgtgtgcaggccaagggtcatttctggatgatacactcctgtcctgggctgcagaggttcttggcacacccttccctggcagctagtaggaatccaaggcaattctctttgctattactttactttaggggtacttaccttaagcagcagttgcgttgtgagcatgtgcccaagtgccaggcccataaatcaatcctgtttccagtgtcatttccaagacgcttcatcttcctggggggcagaggtaaagttggctgcagttttctccaaagctatagctggagtttgctgcatatctcagcccagacttacctttgaagagttattgatctgtaaaactggtaatgcaaataaaatactgatagcagcgtcatgttgcatttgtaaaatggcttacacttgccaaaaatgtttcatgccattctatttaaagataggtagggttgtgacgggggcgttgtagaaggtgctattttaaggaacttatttgtcaggaataaaaacccttttgtaatgcagattaaccctttaggtatcattctgtgccatttttttttttcttttgagacagagtctcactctgtcacccaggctggagtgcgatggcacaatcatggctctctgtggcctccacctcccagactcaatcagtcctcccacctcagcctccccctcactacaggcacatgccaccacgttgggctaatttttatatttttgtagagacagggtttcaccatgttgcccatgctagtctgtaactcctgggctcaagcaatctgcccctcttggcctcccaaagtgctgggattacaggagtgagccactgagcccagcccaattctgtgccagtttttaatggatcatctgaaacatctctatttctgtttcacctgcccaggtctcttgtgcctgcacatcatgcctgtatcccccatttggatgtttttctaagtgcgggccccacgtggtgatttgagaaatgatcggtggcacctcgatctatattttgcattttaatggttaagtatatattttaatatatattagaaaaaatatgacctgtacatttttcttacgatttcaaatacgtgtagggtaagactgctttttacaagtcagttcttgggcgcagtggctcatgcctgtaatcccagcactttgggagactgggcgcggtggatcatgaggtcaggagttcaagaccagcctggccaacatggtgaaaccctgtctctactaaaaacacaaaaagtatctgggcgtggtggcgtgcacctgtaatcccaactactcaggaggctgaagcaggagaatcacttgaacccgggagatggaggttgcagtgagccaagatcctgccactgcactccagcctgggtgacacagtgagactctgtctcaaaaaaaaaaaaaaaaaaaaaaagttactgtaaagaacaatattgagtaaagaatagtgcaggtggtggtatgtgagtatggcaaaattttaagggtgggatatgaacaaccaaagtttcaaaacattgcctgtgccctatggtgcctgcctaagacctcagacagcaatagggagcccagaatacggggatccacccttcaggagagaggggccactggaatttggtctttgtcccccagcagttgacccgtcttctctgttctaaattctgccaaggaagcagctgaaagagacttcctcagcgcctagcgctgggagaggagagggtctctcgatgcctctacactgcctcagctgtcctgagactgagatgggccagttgtcctgaggttgatgcttggtgtgggtataagccccaggcacggccacccccacccccaggcccagtggcatctactctgagcagatcctgctgggtactcctggcagccagctgtggcccgtgaactgacttctaccgtctgtgaagcctcagaccctcgctgcatgccctatagccttgagtcgcagccagagagccagccctgcttgttgtcttggaggccagtgctactggagagattgtgtctttgcttggcctggaaccagatgtttggaggctttatttagcctctcaactctgtggaggaccaggcctgagctggccacgccttatctctagacattgttcctaccagagtgacctgacgtctttggtttggcggcttcaagctgccacactgtcagcctagcagattgtgcaggatgctgaggataaacgaacccaccaggactgcatttcacaagttctggctgggaggaagtgaggacaggcagcttcccggtgctggagacaggtaggcagcgtggcagaggctgtgggacctggaactctttagagaactcgctccggagcattctaggcacgtgggcacctctccttcaccttcgtattcccagtgcctggctcccggtgggaatgggtgagtgagtggtgagcctggtttttgatgagacaagagacgccctgcaaagactgaagaaacaatgtgaatttcctcatggctctaaactgggaattgtggagtctgaggaaagctggaaaagatgggagatggaacaggccttcctttggtggtgactgagcaacgggtctcctgttagccaagtgcaccgaggctaatttcccatccgtacgctctccaacgcctttgctccaatctcagccaaaactgcagcgtgaacggggcccagagcaggactcttggggctgactgttgcctcttgagggagggtcttcctgagttgtcttcccatcagaaccagcctttcaagagtggactatgaatggaagtcttgaggggaggatcttgcagaaatgggcgattacagggcttccagggtctatgctcgtgccaggggggatgaagcttgtttgtggctggggctgcaaatccctttcttccccccatcctagtccaaccagctctacagttacagctcacggtgtggcatttgctaaaccctcaggcaaaaccttggttggcagggaacaggagggagtgctagcccccagcacaggggatgagttcccatttgtcaaggctgggaagcagcaggaagacccctgagggtctgacctggaggggctggagctgggggctgttccaggctctgatcttgtcccccggggctacgtgtgctggaggctgtgcaggcctctggcagtcccgactctcggtgcctcaggaagatgataacacctgccaggttttgagactccggtgaattgaaccacaaagatagctaagctcagttcctggaatttgtgaagccgccaataagtaactattgcccttgcctgaagcgtggggtctgtcttgcttttctaatgctgctgaaacaaatcgccacaaacttaagggcttaaaaccacacaaatttattctcttatacagaaatctaaaaaggatctcggcccggctccatggctcacacctgtaatcccagcactttgggaggccgaggcgggcgcatcacctgaggtcaggagtttgagacgagcctggccaacatggtgaaaccccatctctactaaaaatacaaaaattagtgggtgtgatggtggacgcctgtaatcccaggtactcgggaggctgaggcaggagaatcgcttgaacctgggaggcagaggttgcagtgagctgagatcatgccattgcactccagccctgggcgacagagggagactttgtctcaataagtaaatacataaataaatagattaattaaaataaaaaggatctccagggctgcattgcttctggaagctctagggcaagcttttccagcctgcggccatacggcccaggactgctttgaatgtggcccgacacaaatttgtaaactcttaaaacattatatatttttcttttagttcatctgctgtcgttagtgttattgtattttatgtgtggcccaagacagtcgtcttcttccagtgtggctcaggggagccaaaagatcggaagcccctgctctaggggagtgagttcattttattgccatttccagcttccaaaggctctctgcattccttagctcgtggccccatcctctgtcttcaaacctaccagtgtagcatcttccaagcagtccctcaccactaccctgtctccccggccctctcactccccttctgtggccacgatgcctcagggaaagatggcattttaggcagcaggtaaagaacgaaccgaaagctagagacctttgaagatgaggaggctggttctcctgcgtgtgggggagactgagcgatgtcctggctgtgggaaagactggaagggtagggacgggcatccgggccactgcaggtggctcataaaggatatggtgggccccatgtcccagtctagggccgaatctttacttgttttttaaatgtctttccggcagggtgcggtggctcacacctgtaatcccagcactttgggaggccaaggcgggcggatcacgaggtcaggagatcgagaccatcctggctaacacggtgaaatcccggctctactaaaaatacaaaaagttagctgggcgtggtggcgggagcctgtagtcccagctactcgggaggctgaggcaggagaatggcgtgaacccgggaggcggagcttgcagtgagccgagatcgcgccactgcactctagcctgggcgacagagcgagactccgtctctaaaaaaaaaaaaaaaagaaaaaataaatgtctttcccactagagtctaagccacttgagaacaggggccactgtctgtttcccatggtatctatagggcctggtggacattcagtaaatatttattgaatgaataaataaatggacacatagcccagtggaatccccaagtactcgcgttttgcggtattcatactcggtccttggcaagcatcgggcaaggtggcactcttaggagttgaatccagctctggtgtgtgggacaggcaggaggagaggaagagagggaggaaaagtcggttcgagaacccaggtggaaaatagattgagggaagcaaaacgagatgttacaggaggaatatgggtgattgtcttttccttttatatttctgcatgttttgtatattttttataataatatctgacttttatcccctatgaaagtgtcgcttaaaataaaaggaaaggggaaaggggggccgggcgcggtggctcacgcctgtaatcccagcactttgggaggctgaggcggacggatcacctgaggtcaggagttctataccagcctggccaacatggtgaaaccccatctctactaaaaatacaaaaaaaattagtctggcataatggctgggcatggtggctcacacctgtaatcccagcactttgggaggctgaggtgggtggatcacctgaggtcaggagttctatatcagcctggccaacatggtgaaaccccatctctactaaaaatacaaaaattatctgggcatggtggcaggtgcctgtaatcccagctactcgggaggctgaggcaggggaatcactggaacccgggaggcggaggttgcagtgagccgagattgtgccactttacttcagcctaggtgacagagcgagacttcgtctcaaaaaaaaaataaaggtcgggggggaagggcagggaagcagaccgtccacgcagggttttggcctccttgctcatgagctgttggctgtgctttgcgtttgtgcaggtggaagcagggaaaggcctggagatgaggaagctggttctctcggggttcttggccagcgaagagatctacattaaccagctggaagccctgttgctggtgagtacagtccctgctctggggccttccggtccccccgcccgtgttgggtgatgtcatgctctgaagctgcttttggagttggagaggaaaggggaccgtacccgtccctccctgtggacagagtctgcagctggtctgcttctggctgggcatcgggcagcccgggtcattgccagaaagggcctgtgcctctcagctccagctctcaaaaggcaggagaagcacacccggcttagagatggcaaacacacctgtcacccacgaccctggcatagggcatcgtgaacccatcatggtgctctgcctgcctgggcgggggccgagcgccttctccacgctgtgctctgggcagtcattcccaatcaatccagttaagaagtctctgccgtcttgtgtccaagtccttctacctccctgggtgagggaaccgttagtgccatcctgaggccccgtgtcaggaaatatgaggtgggaggctgtgttctttttttttttttttttttttttaagacggagctttgctcttgtcacccaggctggagtgcagtggtgcgatctcggctcactgcaacctctgcctcccgggttcaagtgattctcctgcctcagcctcccgagtggctggaattgcacgtgcacgccaccagtcctggctaatttttgtatttagtagagacaggattttatcatgttggccaggctggtttccaactcctgacctcaggtgatctgcccgccttggcctcccaaagtgctgggattacaggcatgagccactgcgcccggcctgtctgtgttcttttgagaagcggcacagctctgaggcatcaggccaagctcagccctcggtaacatgcctcagttcccctcccagatggaggcatcgttgtgagagtctgattgggaggggaatatgaaaatgttttcggaagataaaagtactacacagatgtgaggtggttttgccttggaagaaagtgctccttagatgtgtctggatgttatgcagagtgatcgtggcgtgtcaatctttcttttgggtattttgcagcctgagacataaggtaattgtcagaaaagggagacgcagaagtgtggatctgtggaagctcattcttaacaagaattctaagatgcacatttaagtacttgccatgacgtgaggtgttgtcacacgtcaaccctgagatgctgtcagtgtcccaggggacttgacatttatgttacccaggaatgactgtgtaaatgtgcaggtgcaggccgggcgccgtggctcagtgcctgtaatcccagcactttgggagccccaggtgggcagatcacttgaggacaggagttcgagaccagcctggccaatgtggtgaaaccttgtctctgctagaaatgcaaaaaaaagccaggcgtggtggtgcatacctgtaatcccagttactcaggaggctgaggcatgagaattgcttgaatctgggggcgaaggtcgtagtgagctgagagtgcgccactgtactccagactggacgacggaagtgaaattcctcaaaaaaaaaggctgggtgcagtggctgacacctgtaatcccagcactttgggaggccgaggtgggtggatcacctgaggtcaggagttcgagaccagcctggccaacatggtgaagccccatctctactaaaaatacaaaaaattagctgggcgtggtggcgggcccctgtaatcccagctactcaggaggctgaggcaggagaatcgcttgaacccgggaggtggaggttgcagtgagccgagtttgcaccattgcactccagccggggcaacaagagtgaaactctgaatgtgcagctgttttgccacacgccaggctgagtacgtcccatctctccaggagtttatctgtgtgtacggagctgttttccaagtgaggggcagtgtggcaggtagctgagggtcctggtctggggccagagctagggcaagacttggccctgccattaagagcaggcgtattgcactgtttctcaaactgtgcctctcagcccatcagtgctttgggttgtgaaatcagtacagtgggttgtgaaaccagtacagtgggttgaaccagcatttttaaaccaatgaaaaaatgtcagcatgcatcatacacgggaaagataagtgagggaactttcggtttgttgtctgtctgtgtgcctgtatatatatgtaattgccgggcccatggtgtcttacacctgttgtgggtttgaaaactgctggctttggccgggcgccgtgtctcaagcctgtaatcccagcactttgggaggctgaggtgggcggatcacaaggtcaggagatccagaccatccttggccaacacggtgaaaccccgtctctactaaaaaagtacaaaaaaaattagccgggcgtggtggcgagcacctgtagtcccagccactcgggaggctgaggcaggagaatggcgtcaacctgggaggcggagcttgcagtgagcagagattgcgccactgcactccagcctgggcgacacagtgagactccatcacaaaaaaaaaaaaaaagaaaagaaaactgctggctttgggcaagccctacataaattccttgagcctccatttctggatctgaagatgagagggatgccattctttctctctctttccatggggttgagaagatcgggagatgctttcgggacctcatacagcgttgagttacttaagacactcaactgttagtggaagaaaggaggacaggcaaagagacaacccgtcagacattcgtgaaacacgtcttccaaaccgtgaattgctgtccaaaaaggaacatagttgtcattactaacagggtgtgtatttgaaaggagttcagacagaggatctagactgcctggccgtactggctccaggctttcagcaggtgaatgagctatcgtgcctcagtttttccatctgcaaactgggtatacaaatagtatgcttttcatggggtcgttgtgaggattaaaggaatttatacacagagttctttttttttttttttttttgagacggagtcttgctctgttgcccaggctggagtgcagtggcacaatctcggctcattataacctccgcctcctgggttcaagccattctcctgtgtcagcttcccaagtagctgagattacaggcacccaccaccacgcccagctaatttttgtatttttagtagagatgagatttcaccatgttggccaggctggtcttgaactcctgacctcaagtgatccgcccgcctcggcctcccaaagtgctgggattacagatgtgagccactgtgtccggcacataaagctcttagaacacagcctgagtgttcgttgacactgttaatttctctattgctgggagaggagacaggttagggcttcgtggtttctgccacaacacacccgttccctgaaggagggagtggcgcctgtccccatcagacacggagcccttagatcccacctgccacccacgagcctcttcctctgggccaagaccaagagcccctccctgctctgcctttctaacagctcatgccccaaaggcagaatctgtggggcaggggcccccttcctgatatgcctggcgcaggttccccccttccccagctgtctcctcccggggcaggttccccccttccccggctctctcctccccgggcaggttccccccttccccagctctctcccggggcaggtttccccccttccccagctgtctcctcctggggcaggttcccccattccccagctctctcctggggcaggtttccccccttccccagctctctcctcccggggcaggttcccccacttcccccagctctctccacccggggcaggttccccccttccccagctctctcctcccggggcaggttcccccccttccccagctctctcctcccggggcgggttccccaccttcccccagctctctcctcctgggcccctgcttggctctttcttgagcagagaccagagggagcaaaggaagaactcgctgggaggccaggtctgtggtaggagggctcaggaagaggagtaggaccctccacagccacagcctcagaagaaaacctcagagtgaaagaatcacacccttcctcctctcctccctgagctgggaacccctgcaccctccccacccctcagctaggaggaagctaaaccttctgctcttcggggtggcctcgcaaaggtgccagcttgaaggagaagaaattcgttccctccatgctcgctttcccactcctgaccccattcccaccgctctgccccagcctgtttgctttcatctgaacacttcctgatatgcaaagggctgggtgtgtgtacctaaaaccatgtgcacacacggggcagacgagcctccacacagaagcctccgtcctggcctctggggtgcttgtgggggtcatcttctggggccctcctgcttcctggtgggctctgattacaggaaaagcctgggagcctgggccgaagtagggggtgaaggaaaaaagatgaagccaactgcattgaaattctggatctccttgacactgggaactgagcttgggaactgtgtcttgctacgctggggccacagggtgaggccactccccagagcccctcccaccgctggccacgactggccctcctggggtggactcctggccacgctgcatcgcaggctctttatctataaaacaggtgaatgaggccttcctccctgggctccagtgacgagtgactcgggtggcatggcagcaagcatgccaggccttctggggcaggaggtggaggaagtgggtacatttctttcccttatttcgaaaggccggtcgctgggggacagagctgacaaacggctatgtgaagtcccactggcaagtgagaaccggcccaggcccgtcttcctgagaagcagctggtatgggagccagggttgaagtcactcacgggtcctctccgagaactcgagtggtgaaatggagagccggggcctgcccttgtccctgcagcaggactggggaggagggggtgcctgagtggtgtgctagcgctttggcagaatggctgtgccgtgccgaagctcagtgtgggtcaccttgcctttcagtccaccctcctgcccctgagcccatacgcaggacttcaccagagacaaataacggcctcgagggtcctggccagccaagggcacacacccagccctgtcccctccccgcgagtgaaatcaggagtaacagccaaggtccccatcgtgtcatgagaaccatctgatgccccaagcgcaggccccgtccttgtgactggctgtgggtgagcgtccatttcttccccttttgcagacggggtgggaagttgaggaggaagcataaccattgtgttttgtcttcgtgtgggtggcagatgagcgcgtcgcggcttctgagaaatcccgtctccttggccttcctgggactgctgaccttcctgcttcccttatttccccctcagtggggactgcgccaaggcggggacaagaattcttgggtatggggattctgtggcgactctgcgggctcctccgtggggtcctgcgttgaggtgaaaaggataaactcttacgacgatgtcaatcctgaagctagttccatgtccctcatggagggtggggagtccccaaagctttcagctcacccacctgggcttggggggacactcttcccttgctcctgcctcccggtgccttctgtttccctgtctggcatgcctctctacgcccccactcctccacctgctcagctctccaaggacctggtatgtgtgcctcctccatgcagccctccaggctactccagcacaaccttggaaccatgtggttggtgcttacagtcagtcgcatcgtccatagtcatttcatctgtgttggcccattttgcccaactggattataaaggtctcagccaggcatggtggctcaacacctgtcatcccagcacttcaagaggccgaggcacgtggatcacttgaagtcaggagtttgagaccagcctgaccaatatggtgaaaccccatatctacaaaaactacaaaaactagctgggcggggtggtggacacctgtaattccagctactcaggaggctgaggcaggagaatcgcttgaacctgggaggcggaggttgcagtgagccgagattgcactattgcactccagcctgggtgacagagtgagactctgtctcaaaaaaaaaaaaaaaaaattgcagtctgggaccatgatcgtgtacgcactgacgggaatgccagtaggtagcgcatggctgtattatcccagtttcacacatgaggctgctggtgacacgaagcccagggatgctgagtgatgtgcgcacagcagagctgcgactcaagcccaccctgcctggcctgcaccaggtggaaccccatgcgcttgcctagcaaggaccagacaccgaggggccgttggttctaggacggcgagggtcagaaggagaggcctgaccggacgcagaggggccgttggttctaggacggtgagggtcagaaggaggggcctgaccggacaccgaggggccattgattctagcacagcgagggtcagaaggagagtcctgactggacactgaggggccgttgtttctagcgcggcgagggtcagaaggagggtcctgctttgtcctgcatggattgttggatctgggctttttagagctcggaggatgaaggagccagaaggcagagcaccatctgggtgtctgagtagatgagacgacttcttccagtgaacatgggttctgtctccatcagagtgaggcgatatatctgagtagatgagacttcatcagaatgaggtgatgtgaggctggagtgaggctgggctgggagtttgccgtggttggctggagctggtggtcgtcgttcagagggagctggcgctggctttggtgttcccttcagtgcagcattttcagcagtggagtcacccattctctgctagaatgcttctcttgtcggaaagctcactacttaatcctatgggggacagctctagtgagcccgaatctgaccccataacttttccccactgttcctgggtctgcagagcaacgtagattaagtctaagcctcgtttttgtttttggagacagagtctggctctgtcacccaggctggagtgcagtggcgcaatcttggctcactgcaacctctgcctcctgagttcaagagattctcctgcctcagcctcctgagtagctgggattacaggtgtgcaccaccacgcccagctaatttttgtagttttagtagagacggggtttcaccatgttggtcagacttgtctcgaactcctggcctcaggtgatctacctgcctcggcctcccaaagtgctaggatgacaggtgtgagccaccgtgaccagccaagtctaagcctctttccacgtggccttcaggtaggtgaagaacatcaacagaatccgacatggctggccgggcgcggtggctcacgcccgtaatcccagcactttgggaggccgaggtgggtggatcacgaggtcaggagatcaagaccatcctggctaacacagtgaaaccccgtctctactaaaaatacaaaaaaaattagccaggcgtggtggcgggcgcctgtagtccctgttacttgggaggctgaggcaggagaatggcgtgaacccgggaggcggagccgagatcgcaccactgcactccagcctgggcgacagagcgagactccgtctccaaaaaaaaaagaattcgacgtggctgctctccctctggccaccctgcccttccctgccacaccttccctgtatggcaggttatcaggccctgtgtcctgcagggcctttgcagtacagcctggtcatctttggtttttttttttctgattattcatattcattcattgtaggtgatttataaaatgcagagaaccacactgaggaaatgcctgcacgtcccgttatcccacggtcccactgctaggctggaaggtgatggcatcagctcccggccagtgctgggggttggtctgtgttatctgccacctcaccgtctacactggcaggccctggagcatcttggtatagacaggcaggcattgagaaagagtctgagactggagacccctgccatgcgcagtgggaaggaccatcacggtcgcttagcaatgtctgccacgggggtgggctgcagtgggggacacgtgaacgcccatgcctctccctgtgccaagtgacgggaacttggaacatcagtgaggccaagactggtcttgagtaacttcgggtccctaccttctgagtcctagaaccacattctgtttcttggaaggaaacagctataggcttgagttccctgtcaaccctcccttccactgaagtgtgacaaggagcttatgactcggggcacaggctatcgtggaagaaagacgcggatcctgttaacccagtacaggctgctgctgagctcagctgcgtggtaggggagtgagcccaggcaccacccctcgggcctggcacagctgccaggccaggttcctgctgtcgagtgtgcggcttgttggggcctgtggcagtggctccttgatacaaagctcgtttcagtgccctgcctttggcagccttgtctgggcaggacttgggcagcgggaagggctaacgatcggccccggggcctgccgacactctggtttgtttacccccgacctctgctctttcttcctctgtttctcccagcccatgaaacccctgaaggccaccgccaccacctcccagcccgtgctcaccatccagcagatcgagaccatcttctacaagatccaggacatctatgagatccacaaggagttctatgacaacctgtgccccaaggtgcaacagtgggacagccaggtcaccatgggccacctcttccagaagctggtgagtctgccagggatggagggtcctcacgcagggcctcagtggagcccatagtgttgcaggagcctcaggagaggaccgggcagccctctcggactccttgaaggcctgagacctctccgagtccgggaggaaggcctgggcctgtgtgttatggggtgcctggggccggggccttgactctaggcctcccctggtgcagccctgggagcttctggggtggtggagacaggctgtgtggataggtccttccaggggtggtggagatgggctgtgtggatgggcacttctgtgggagcaccatctctctcccggagggtgctccttctccctcccggagggtgctccgtctttcccggacggtgctccctctctctcccggagggtgctctgaggaaccagccctggaatgaaggcttcttgctgggcttcagtctcctgtccctcagtgaacagaggggcacatgccgggttaggggcatgaggactgctcccctgagacctcgggtctgtaaaaggaagcagttgggcacactggccgatgatcctctcctgaggtcccaagagcaggaagcactgaagcccagccctgctcaccactgcagggtcgggagcggcaggagtgggtgggttaacatgcagacctcgtgttgggaaacgttcacagaagtcttctggttccctgtgcttctgtgacaccctctcccccagctctgccccatctctggctgtgtcccctggaggacccccaggtcagactcatggagctccctccccacctctgctacgtaacgtctgaccgcccagcaggcaagagggagactgggagtccaggccgcggttcttctctgggtgtgagtggccagaggaccttctcctccttcctgccctgttctctgggtgtgagaggctggaggcctcctcccctcccctgccgtgttctggctgaatggacagggctctgcctttctcacgctggagaagactctccctctcctgcctggacactcctaggacctctagctgagtgtgttcagagctgagctccctgcctccggcgtcacctgctccgcttcctgtctttacctcaccgagtgcttcagactctttctggctgcaccccctcccccacctgtcctgtggactccactttttggccgttgctcacagccgccttttcctcttcttggccacccatggccctcacctggacagctgcgtatcctcctgtgtggctcctgcctccaggcccactcacctcccacccccacctctccttagaggggagagagtcactgaaacctcgacggccccttcagcggatccccacggccctcggatgaaggtcaggctccgaggaatggctcgagagaccctttgcacactgacccgtgtccagccccagccttggcagcttcctccccgcacctctgtgctcctgacactggactttctgttctcagttcccagggcaggcactttcttaactcttggtacttgaggccccgtgtgcctgaaacgtccttccccctctcgtctggcctcccctggtcagttcccagcttagaagggacctcctccaagaaggctttccaagtcgccaaatgcaggccttgtgccagtcctcgtagtgagcactagtaactgcctgactcccccaaaccacaagttccaggaggacggactgcatttcctttttttgttgagacggagtctcactcctgtcgcccaggctggagtgcagtggcgtgatctcggctcactgcaacctcctcctcgcgggttcaagtgattctcctgcctcagcatcccgagtagctgggattacaggcgcccaccatcacacccggctaatttttgtatttttagtagagacggggtttcgccatgtcggccaggctggtctcgaactcctgacctcaggtgatccgcccgcctcggcctcccgaagtgctgggattacaggcgtgagccaccgcgcccggcctgcatttccttcttcttagactcccagaaccagcccagtggtcactgcttgaatgagtgaatgcaccgtgaccttgaccactgggcctcgggagaactcggaagggcatggagggagacgttgcagggcctgagatttctgtcctgagagtcctgtttctccagcacagcttctagagccgtgtcacaaagtgggcttgaatcccagcgctgccagattaaacctgcaactgggcaacttacccaaccgctctgaatcagcttcctcatctgtaaaaaacaggatagtaacagtatttacctcattgggtgattttgaggagttaatatctgaaaactgcatggggctgagtgtggtggctgacgcctgtaatcccagcactttgggaggctgaggctggaagatcacttgaggcttagagttcaagaccagcctgggcaacatagcaagaccctatctctacaaagaaatagaataggcctgactgagcgtggtggctcacgcctgtaatcccagcactttgggaggccggggtgggtggatcgtgaggtcaggagttcgagaccagcctggcctacatggtggaaccccatctctactaaaaatacaaaaaaattagcagggtgtggtggaatgcacctgtagtcccagctactcagggggctgaggcgggagaatcgcttgaacctgggaggcagaggttgcagtgagccaaaaccacaccattgcactccagcctggatgacagactgagactctgtctcaaaaaaaaaaaaaaaaaaaaatggctgggcacagtggctcacgcttataatcccagcaacactttgggaggccaaggtgggcggatcacctgaggtcaggagttcaagaccagcttggccaacatggtgaaaccccgtttctactaaaaatacaaaaattagccgggcatgataacacgcacctgtgatcccagctactactcgggaggctgaggtgggagaatcgcttgaactcgggaggcagaggttgtagtgagccgagatcgtgccactccactccagcctgggcgacaagagcaagactctgtctcaaaaaaagaaatagaatacaataaagtaaaagaaaaagtgcttggaacagggcctggaacatcataaattaataagtactcaataactggtcattatcatcagtgccattattattattattattattattattattattattattattaaattgggaagaggcaccctggaaggtatccttccaagggaatgccacactctggttctagcatacccccccctgctccctccggttcagggatggtgaacacctgtcatcactgcctgctcacctgagctgagtggcctggggggcatcctctcctcatccctcaggagggtagaggagagcaaacctagggttgctggaaacgctgtcacagtttatctttgtcacttggacctggctgtccccggttctggtcttggctccacaggcctggccgtgaatctgctacccaccactttccctccccagcatcgtgaaccgatgcctgaggcccctggggctgcagatttgggagggcccggggggagccgggtcaggtctggcatccggaggtggtttattttcagccgaagactctgggtatttgattattcgttactgagagaagggaattagcgtctctgctgtttgttttatgagatcactccagtgccaggctgctgtttccaggcaacctgcacttcccagttaatgaacctgccaagccaggcctcgggccctaccgcctggggtgactgtggcagcggcagtccctgagattaccgtgaccctggacgcaggcctccgcacggctggctcctgcccctggctcctgggagggtggtgtgccaacccgggcctccaggctttctccttcttgtgggaaagggggcaagaggagccttttcctggaagaatatcggtgatctgactttggcttaggcagcgactgtctagtatgcctcgtgtagcgtgggcattgatgggccgggcctcagtactccctggaaaaggaaataaactccctcccgtccggccccgcccccttttaaggtcaggccccaccccctttaaaactcaggccccgccctcttttaaaagtccggccctgcccccttttaaagtcctgcccttctgcagctgagacctgaatgcctctggccttggcgtcacgccgggcgtccccactcgcgctcccctctggcttttccagatgccccccgctcccctgccccaccagcttcctcaaagggctctgcctctgtactgggaggctccaggctcagccgatgctgcggccagcctgcccccacccctacccccaccccagcctctctgggtccttggggagcatgaggatcctgcagaaagcagagtggtccggggtgggggtccacagcagcccacttcccccagcaccttggtgggaagcagaggcccctgaggaagccaggcagcagctgtatcccccttgctgctgtattgaaaaacatttaaaccagaaactccaaagaataacagcagaaccttctaatgaagaaaatacagcgtcacacatgaaggtggagtctcccctccctcctccctcttgaagcagctactggcatgaatttggtggatagccttccagactgcagtttgtgtgtttactacatatctgtatctattttgggttggcctgtactttaaaaaaaaaaaaaggtcttgctatgttgtccaggctggacttgaactcgggctcaagtgatcctcccacctcagtctcccaagtagcgagggctataggtgtgtgtaccacagctcccagctgcatgtactttaaaaatgtgtctaagccaggcgtggtggctcacgcccgtaatcccagcactttgggaggcggaggcgggtggatcacctgaggtcaggagttcaagaccagcctgaccaatatgacgaaaccctgtctctactaaaaatacaaaaactagccgggtgtggtggtgcgtgcctgtagtcccagttagtcaggaggctgaggcaggagaatcacttgaacccaggaggcggagtttgcagtgagccaagatcgtgccagtgcactccggcctggttgacagagcgagactccatctcaaaaaaaaaaaaaaaagtgtataagtatacacatatatcatattttacagttcaacccatgttcgttttggagcttgtcagcaatcgtattttacagttcaacccatgttcgttttggagcttgtcagcaatgctatgtgtaaatcgggtgcatccatgttcatggctgtgtgcgcggcttcccccgtttgtgagcatttgttaccagtccctccactatgaggaggaaaagtgagatggtgaacacccttgagtcccctggggcacacacataggccatttgctccagagcactgctgtctaatggaaatagcttatgagccacgtacatcatttcacattttctaatacccaccttttttttgtttttttgagacggggtcttgctcttgtcacccaggctggagtgcagtgatgcaatctgggctcactgcaacctccacctcctgggttcaagcgattctcctgccttgtcctcccaagtagctgggactacagatgcgtgccaccacgcccggataattttgtatctttagtggagacagggtttcaccattttggccaggctggtctcgaactgccaaccttaggtgatctgcccgcctcggcctcccaaagtgctgggattacagttgtgagccaccgcgcctggcccctaatacccacatttttaaaagtaaaaataggcaggtgaaattaattttgagaatatcttttatttattcccgcagatccaaatattatttgaacatgtaatcagtatttaaaaattaacgaggtaatttacattctcttttacatactaaggctttggaacccactgtgtattttacatgtccggcacgtctcagtttgaaccggccgtatctcaggtgcttggtagcctcaggtagctggtggcgactgcactgaacgatacggctctgcagtttgtatgtaaaagtggatttgctaagcaatcgatgggctgtgcctatccacactgttattagttcaactgaaaataggccatgcctattctcagctttattagttattaacaaattgctctccaaataattgtactaatttacacttccccgagtagtctaagagtttaaattggccgggcgcggtggctcacgcctgtaatcccagcactttgggaggccgaggcgggtggatcacgaggtcaggagatcgacaccatcctggctaacatggtgaaaccccgtctctactaaaaaaaaatacaaaaaattagcctggcgtggtggcgggcgcctgtagtcccaaccactcaggaggctgaggcaggagaatggcgcgaacctgggaggtggagcttgtagtgagccgagatggcatcactgcattccagcctgggtgacagagcgagactccatctcaaaaaaaaaaaaaaaaaaaagttttaattggccgggcgcagtggctcacacctgtaatcccagcactttgggaggccgaggcaggtggatcacctgaggttgggagtttgagaccagcctgaccaatatggagaaacgccgtctctactaaaaatacaagattagccaggcgtggtggcgggcgcctgtaacgccagctactcgggaggctgaggcaggagaatcccttgaatccgggaggttgcggtgagccgagatcgcaccactgtactgcagcctgggcaacaagagcgaaactccatctcaaaacaaaaacaaaaacagggagtttaaatttccccatatgcttgccagccgttgctgtcaattagacttttaaattttgacccttctgatgagtataaaatatctcgtgatggctttaatttgaatttctaccctttggtcccttaagaggaagtgcttatatacagcgcagcgaagcctttccataaatatttggggaattgacttatggagcctcggtttccccttttgcagaaaggggcgatggggtctgccctgcctctcagaagaggcgaggctctgtgtggttgtgactcaggttgtgactgtgtgagtgacaggcaaacgtgtagtgaggctggggctttggctccttggaggtagaggaggtggaagaggtgaggacggggcctcaaggccaagggaaatggaaagacagcatcttcatttgttgttttgttttctttttgagacggagtcttactctgtcacccaggctggagtgcagtgacacgatcttggttcactgcagcctccacctcttgggttcaagcgattctcctgcctcattctcctgagtacctgggattacaggcacgcgccaccatgcccagctaatttttgtatttttagtagagacggggtttcgccatgttggccaggctggtctggaactcctgacctcaggcctcccaaagtgctggggttacaggcgtgagccgccacgcccggccaagacagcacctttaaatgtcgttccccacgctgcacgtggggagggaggcctgagcaggccacacgtgccagctccccccagcacacacacccccctctctccctgctccggctaattccaggatgtgaaggaagtatgagacattaagggatttcaaaccctgggagaccttcaccgtgctgaggaaagctggatgctgtgaagagttgaatttctagcaggccaacaaaggccctagcctggtctccccaaccccagaccccctcattaaccttattggctgagctggtttccatggaaactgtccagttcaaagggacactgtaatatgttcatccctgcgtttccccaagttcccaacgagctgagtgagaggttttcagtgcaggggagctcccggtgctccgtgaagctttcatccattcattaatcctctcccctcccaccctcctctccctctgttccctgactcctccctgcaggccagccagctcggtgtgtacaaagcgtttgtcgataactataaagtcgctctggagacagctgagaagtgcagccagtccaacaaccagttccagaagatctcagaggtaggccgctccccacatagccaccctgagggacaaggagctttgggggctgctcagagcccttggtctcccctccctcgcttgccagtcggtgaagtggttactctaatgggtaacacttagcctgatatttgctttcttgcacctgacattttccctcttaatagaaaacgatctattttatttatttttttattattctctttcagattagagagaggaacaggggaggcaaaaaaaaaaaaaaaaaaaaaaaatccaaggcagtgttctcccacaccacactatggtgaccttgagcaagtcacgtcccccctcttggcttttatgtcctgtccggtagaatgaggggtttagaaatggccagataatccttttttttttttttttttttttgagacagagtcttgctctgtcgcccaggctggagtgcagtggcgcggtctcggctcactgcaacctctaccccctgggttcaagtgattctcctgcctcagcctcccaagtagctgggattacaggcgcacaccaccacgcctggctaaggtttgtatttttagtagagatgaggttttgccgtgttggccaggctggtctcgaactcgggtgatgtgcccgtctcagcctcccaaagtgctgacattacaggtgcgagccactgagtccagcttggccagctaatcctgaccttgcttgataagaatcactggggcattgtttaaaacacagatttcctggcaccttccccggagcttctgattcagaaggctttgcgtggggcccaagattctatatttgaacaagcttctgggtaatatttatgacagggaagtcttgaggaaatttggactataggtcgtcttttaaggttcttgccaactctaagactgccatcccataaacacaaaaagggtaagagccacttatgtggagaaggagccttagaatccctggccgggaacacgcgtgcttctgctcctgaggcccagccttcctggccaggaacacgcgtgcttctgctcctgaggcccagcctacctggccgggagcacacgtgcttctgctcctgaggcccagccttcctggctgggaacacgcgtgcttctgctcctgaggcccagccttcctcccgcactcctccacagggcagaggtgcagtcctatctgccatcaacatttctacctaagaggtggcatggagggacagttgcttaggatccttcaggacagagcccagttcatccctttgtccaaaaagacctcagtggcacccctgaagcactggcctgagaggaacagcccccagctcagggcaagagaacctccatcctagaaaaggggagaagcttctgcagttttgggagtcctgccgtaaaggcccctcttggccctttgtgttcccgtctcagctctaacgctagaagagttggggaaacgcagggtagttttcctgaaacttcaggggtgacggtcgatgcccacgtttagaatccaccgagaggcagcagagaagctgacagttggagatgaacatgtcaccttcattactgttaaaaaaatgcagcttggaaaatgtggatttggatctgtagccacagtgggcttgctgacacttcgcctctggaatgaaacgtacctatagaagccgggcgtggcggctcacacctgtcatcccagcactttgggaggccgaggcgggcggatcacctgaggtcaggagtttgagaccagcctggccaacgtggcgaaacgccgtctctactaaagatacaaaaattagccgggcgtggtggtgcacacttgtaatcccagctatttgggaggctgagacaggagaatctcttgaacccgggaggtggaggttgcagtgagctgcgatcacgccactgcactccagtctggtgacagagcgagaccctgtctggaaaaaaaaaagtatctattgagtcccttgcaggaataggaaaacacaggcccctctccacaatgaggacagagcccacgcctcttacccagtgtgcagagagaggatggctgaccatagtttcttctcccagacccatggagcagatgtgtcaccctctgcctgggaggacgaagtgcagggtggggaagtccctctccatggagtcaagtggctggagaggccaggtgcagtggctcacgcctgtaatcccagcactttgggaggccgaggcgggagattggcttgagcccaggagttcaagaccggcctgggaaacatggtgaaaccccgtctctattaaaaatacaaataaaaggggctggagaaatggtgctttccctgcggtttccagcccaacccaggaactacctggactcccctggtctgtgttcagatcagccctgccaaggccgcccaagatcccggggtcagacatggtgcagagagtgtggggtcttctcttggcctgggctgattgcctgttctctgtgcctaggcagaaacccccacacccaaccataagcccctcacagcctgcccaccctggagggcagagccaggcccctggctttctgccaggtggcttctcatcctgactcactcgatgacgtgcttgcttcctgctgaggctgccacttaattactgcaattaggctcctctctgcagcaggagtgatttcataccctagacttcactggagggggcgtgaggaaacattcccgaaatctgggagtccaggcaccagccagagacacaggctggggacgctgagtatcccccacccccccgccccccaaaatatacacacacccaagctccatctccaggagttttctctgtctagaaacagcttgagacagaagtaggaagttcctgctgtctgagcgcttcctcccctgcagaccaagcaggtggcatcacctcggcagctgaccttggcctcatcacctgggcagctgaccttggcctcatcacctgggcacctgaccctggcctcatcacctgggcacctgaccgtggcctcaccttgcctcctgccttccctcccacacccctctttgaggctccgtgtgctccgtctgccaagtggggatggtattacagctccagttgcaggctgcactgtcctgttagcaaaagctggggctggaacgtctctaaaggaggataaagaggcttggagcagatgagtcatcccgggggtctttccagtactcactacctgctgcctggcttgggatccaggaggggcattggctgttcctccctcgaagcttcctctcggacccccagcatgggcagtggtgggtggggagtgtcgggggtgctgggggctgagtaagtgctctctgatgggggtaggatgcagctcactgtcctggggagctcagcatctctgccgaaggtccaccacttccctgctggcgtgtgggacccttccttcctacctcatgggttcctcatgccctaaagattggctggagtacctggcgctggtcaactcaaaccctgtctgcccttggccgacgtgtagggttcctgagtcggggttcctgtaatcacagggctccctgccagcctctctcatctctgggacctggagtcccttccttcttgcccacgccccagccactggactccacgaggctccaggagttcacaggtgtggtgcaggggattggggtggcagaggcagcccatggccatggggctcctttgtctttctttttttttttttttttttttttttttttttttttttttgagacagagtctcgccctgttgcccaggctggagtgcaatggtgtgatcttggctcactgcaacctccgcctcccaggttcaagcgattctcctgccccagcctcccaagtagctgggattacaggcacctgacaccacacctggctaacttttgtatttttagtagagatggggtttcaccgtgttgaccaggctggtctcgaacttccgacctcaggtgatccgcccaccacggcctctcaaagtgctgggatgactggcgtgagccgccacacccggcctctgttctcatatgtacaccctgagtttcagaactccccttcttgccaggctcacagtgggggctgggagaggtgagggacagaacaggccatgactcctctcctccctttggcaggaactcaaagtgaaaggtcccaaggactccaaggacagccacacgtctgtcaccatggaaggtacctcggggagcgggctggattacaggcacctacctttgtctggctgtgcaggcaacaggctgcgtgaacgcggcgcccttccccttgtgtgtgcgtgtgtgtgagcgcgtgtgagcgtgagcgtgtgtgagcgcgtgtgagtgtgagctgagtgcgcgtgtgcgcgcacgcgaggactctagcctcgtgcccaggcagccagccagctacaaacgtgctcctctttaggatgccagcaggctgctggctccctccctccctacccctcctccccttccccttccctcctctcctcgccacgcgcctccctcccctcccccttgctggaagagcactccggagcggctgcccgatgctggagtccgtgcggcagcatcagcaaggtggctgagtggccgggctgctggtgggcgccggggagcctggagcgatggctgcacgctcccgccgcggggacagaggctgccatggagattctcctcattattcgcttctgctgtaactgcacctatggtaacccaggtgctcgctgtgggaggtggcggaccctcccacctctgggggccggctggagtgggcttagatgtggccggggaggttagagggccgcagggaaggagggtgggcgagcggctggacctgaattcccccttcgttttggcggcatccagcctagagttgaaacctgggggctgctcagagcagggccgcttgcaaatggaaggaccaggctggaggggtccaggtggccccgaggatcggtggggaattggtgggctagtgtgagagaacttcctggaggggctgttagggagagacggcgacgagctgtgcccgcagacgtagtagccctgaggccagggagagggtctgcgggggccaggcacagcgtggcgatgggtggcgatggtccggacggcggcgttgccagccgagagggtgccagcgcgagccagagggagaagttgggagtttctttgtttctggagagaggcgcggaggctgggcggcacggtattgtgtgctccgcgcacatgcagcagtaggcggaggacacggaggggctgtgggagcaggaaggagaggtttgtttccagccgtgagagacccccagccgaggtctgggccctcaactgtggaaggcaggtcggcagggccagcgggagaggggtgtggcaagctactctgtgaaggtcacacacacacacacacacacacacaccacctttcggtggaagggacccggaccatcctccttgcagctcccgcagctggctgggggctggggggaagtcccgggacaggtgcatgtcatcaacacgactgtcggtcgtaggaggatgaagccggcccaggtagggaggtgtccagaagcccgtggaccctgcctcaagaggcaagacgtgccaaggggtgccctgcctgcctgtggcagggagtggggtgggcacgtgtggctcccaggccggctgctctgggcctgagtctgtgggagcagcaggcggctggttttaggaccttcctcttccttcccaccaggtgtttcggctctgcacccttctcagtcactttgctttcctatctccctggtaacctggagctccttggagctccttgtcgaaggctgacttgagggggatggtggcttgccggaagagagatggcaggtttcctgggctccttcccaggggcggctgtgctggaggggctgtgtggggccagtgccccctgaccttctcaggaccctcttgatggaagcaagctctgaggcagcctctctcctgcggcccagcagggcggctgcaggaaccctgttctcacttgaaattggcctggtcagcgatcagaggagaaatggtctttttggtctggcctaggagttggtcaggtcttgactctgcctccctgaaaaggaaacgtacccttggcttcctctcccttccccaaaaggaagcttcgactcagtgaaacggacctgggacctggagttcacgttgcttcggtctccgtgatactgttgttgaagtcggcttcaaagtggggaatgaggagtgaaagggccagctcgtgaggagggggctcaccccatcctggtcactctttccaagaacgctcctgtggttcattgaggttttacaggtgctgcctttccctgaagaaggtgcagctcaaagcaaggagtgcgggtggatctacccagctcccaccacttgtagccacaagtctctggcctcagttgccttgtctgtaaaatggggctagtgagaattgcttcccgttttaatcacaggaaataatgagagcaaagcagttaactcagtacccttgggcacagagcgagtacccagcaaactagagagagaccagcttgctgcccaagtcagtgtcagtggagagggagagtgggtgaggccgggcaggaagcaggccagcctgcaggagcccagggacaggggaagggccagagcgagtgcctcaccctgagttctcaggggaccccagcgtgcaggggccgtggggagcacaaacttcagggccgctcttattcccccggttccctccgtatctgatgtggtcccagtgccgccaccccccccacccccaccccccccgtgcacctgccctcctggccgcccttccagggctcattccacagccttactcaggtggactctggaggtgaccacagacatgttaataacccctctgaaacccaacctgccatgtgttcagacctctgagcttagtcagaaacctcttcctcttgggacccaagagagggctgcggggagccgataatgcagtgtcagctttctgtggagccgccactccggagcccaccctggcaggtgtctgctgagcttgtgctttcttttgggtctctggggttctccagtgtgattttttccccctgaagatgggctgagccacaggtgggtgccttaaacagcctcagaaatggatcccacctgagctaggacctgggctgcaccctcagtgccgaggataccccaagactggcctcattccttcaagcttccatggcccatggggagggtctctggaaactgctagataagaaagggctacagatatgtcatatgaagtgtatttacgtaaaccagtggttggccgggtactcatgcctgtaatcccaacttttggcagactgaggcaggaggattgcttgaggccaggagttcgagaccagcttgtatttggcttgaggccaggagttcgagaccagcaacatagtgagaccttgtctctatatttatttttatttaaacgaagactcactgtgtcgcccaggctggagtgcaatggcgcaatctcagctcactgcaacctctgcctcctggattcaagagattcccctgcctcagcctcccaagtagttgggattataggcgcctgccaccacacctggctaatttttgtatttttagtagagatggggtttcaccatgttggccaggctgttcttgaactcctgacctcaaatgatccacccgcttcggcctcccaaagtgctgggattacaggcgtgagccaccctgcccggcccctcgtctctatatttttaaaaaaattaaaataaatacataaataaaacataaagcagtggttttcaaccattattatacattcaaatcagtaaagaagctttatagaaatgctgatggcccttgtggtcttgcagagatttgggttgagttgacggggctggggagcagcatctgtatcttttaaccgctcccccagtgattccgacaggcagccaagctcggactgcgggtaaggctggtggccctgctgaggctgcattttcttcacagccagcagattgctccctgaagtgtctgcttagccgcgcacggggtatttatatctcaggctttggagaactatcaggtttggggcccggctagggcgtgcgtgttcacgctgggacctgtcacaacctggtcttatgggacacccagtctgggatccttcttcccagatgaccaacctgcctctgtcactgcccctgcggcaggaggcccaaggtcatgaccccagggacagagcatccaggtgcaggactgaagctgagcctcctgttgggagggtgggcgcagccgcgtacaggaagggtgttgggaagtgttgatccaccagctgccacctccacctgtccctgctgaatcccagccatcctcacttggtgtccgggttgtggagggtgtggctcttgggggcctgggctggccttgcctgcgtcctcccagcctctttggggctctcatatgtgaggcctaacctgagttgcttcaggaaacctttgcccctcaggctgccacgtgtttgagagcacagccttttttctttttttttgagatggagttttgctcttgttacccaggctggagtgcagtggcatgatcttggctcgctacaacttccgcctcccgggttcaagtgatttccctgcctcagcctcccaaatagctgggattacaggcatgtgccaccacgcctggctaatttttgtatttttaatagagatggggtttcactggttggccaggctggcctcggggagcagagcctttctgtggagatcaggccagcctcctggcctccagcctccctgcctccagccttcctgtgctttgctatctggggtttgaggatgtggggaggggtctttcctctgagagatgaggccagtcctgtggatcacagtgaggcatgccaatcccagctggctgtgcctggccttcagctccaggagcctgagaatgataaggtctggagagctgcccttcctggaaacacagcatgtctccttcccccattctggggtcctgcatgtggcaggtgtgctagactctgcagggcatggctgggtggagctgtgtgattctggggttctgcgtgtggcaggtatgctggactctgcggggcgtggctgggtggagctgtgtgattctggggtcctgcatgtggcaggtgtgctagactctgcagggcatggctgggtggagctgtgtgattctggggttctgcgtgtggcaggtgtgctggactctacggggcgtggctgggtggagctgtgtgattctggggtcctgcgtgtggcaggtgtgctagactctgcggggcgtggctgggtggagctgtgtgattctggggtcctgcgtgtggcaggtgtgctggactcttcggggcgtggctgggtggagctgtgtgattctggggtcctgcgtgtggcaggtgtgctggactcttcggggcgtggctgggtggagctgtgtgattcagggctgggggtccaggagagcatctgccttgagccaggtgaggccaggacaggcctggggaggggggcggggcggctctcgatgaagccatgtctgatgggagaggaggcagggctgcggagggagcaggggctgccagggctgtgtgtcacctgtgtctgctgtttggtcggcccggggagtgagaacagaggtgggggctgccgtgggctcactctggtgtccctcgaggggtgttcacgtgggaagcatgcgggtggggggacgaagctggtctctggggtgttgggttgccctcgtccatcatcctcttcctccttctccctgtctcccccgacagctctgctctacaagcccattgaccgggtcactcggagcaccctagtcctacacgtgagtgtcaagcctccgaatggccagagagggcttaggagttcagtggaagactgagcctgggtgagagggtgctggagtcaccgagaacagtccacctggggaatcaggggttcctaggctccaaggatgcctgtctggcccgcggtatccatgccgccaggctagggcctgaatacagcttggctactaagcttgacgtggccaggtgctcccggggaggcaggcattcctgcttccccacccgctgcctcctggtctccagtgtccttggagcagctgcagggcagacacagggtttctctcccagctgctcggggggatgagcctccacctggtctccacactggggagagagtatgactgtggccaggagaagagggggcagccagggccctctcccctgctgtgctggctctgattttttttttttttttttttttttgaggcggagtctcactctgtcacccaggctggagtgcagtggtgcgatctcggctcactgcaacctctgcctcctgggttcaagcaattctcctgcctcagcctcccgagtagctgggactacaggcgcccgccaccacgcccagctaatttttatatttttactagagatggggtttcaccacgttgcccaggctggtctcgaacttctgacctcaagagatcccccgcctcggcctcccaaagtgctgggatttcaggcatgagccgccgtgcccggcctgactctgatttgtagttcagattttgcgggaattaggcaggtccctgagtgcccaccctttggatggggactgagcactccccggtggccacacatcaggccccagagccgctcccctcaactcaccgcctcacccttcccaggacctgctgaagcacacacctgtggaccaccccgactacccgctgctgcaggatgccctccgcatctcccagaacttcctgtccagcatcaacgaggacatcgacccccgccggactgcagtgacaacgcccaagggggaggtgagctcagagcccggcacggcccctcacccaggctgagaagtatcaggtccctcgtccccttctctcacacacgggcggcaggtccctcgtccccttctctcacacacgggcggcaggtccctcgtccccttctctcacacacgggcggcaggtccctcgtccccttctctcacacacgggcggcaggtccctcgtccccttctctcacacacgggcggcaggtccctcgtccccttctctcacacacgggcggcaccgggtgcctcctgcctctccaatcctgatcccccattcccagccaaggagaggttttcagcccttggtcaccctgatgacctgcagctttccaggccctaggctgagaagtttaagtccagtgtctcattaatcctcataataatctagggaggccgggcacggtggctcacacctgtaatcccagcactttgggaggctgaggcaggtggatcacttgagttagaagtttgagaccagcctggccaacatggtgaagccccgtctttactaaaaatacaaaaattagctgggcgtggtggcggatgcctgtagtgccagctactcaggaggctgaggcaggagaattgcttgaacccaggaggcggaggttacagtgagccgagatcgcaccactgcactccagcctgggtgacagagtgagactccatctcagaaataataataacaatccagtgagccagaagaacctgaggctggggagtctctccaggtccaccacgcagtctttcagccactggtgtcagagctggattcctcacctgggactgtctggaggcccacgccggggaagtggcctccgggtgcctcattcttgaatgcagacacctgcctctggccagtgtgatgccgtcagggtctcctaggaagcgaagggagcaggagcttggagctgcttcagctcggcctgcacacgcagtggcttgcggggagcccacagcaggaaaggctggcgttggaggtggtggaggccgtccaggttgccggaatgtccagtgggcacctgcatgtgggacagccgttccctgggggcccttcttgatgcaagggtggggacagcccagcaaggggagtaccaggaagcatgagagggacagttgccttcgtggattggcagccgggcccgggtgaaaggcttcctgtccaggggaggccattaggcggccgttacgagtgaggctgacagggtgtctgctcctgtggtctgtttacgagcccccagggtctcctggggagaaagtggtgagggacaggcctggacagtgtccactgggcagagagagccgattccgtgcggctcctggtgctgatgtgcagcgtctggggatcccgtcgtctgttttactctggggatatctgaaaaatctccagagggcttagcgtaccctccgttttcagtcatcctttttttgagactgaatctcattccatcgtccaggctggagtgcaatggcgtgacctcagctccactgcagcctccaccctctgggttcaagcaattctcctgcctcatcctcccaagtagctgagattacaggcaggcgtcaccatgtctggctagtttttgtatttttagtagagacggggtttcgccacgttggccaggctggtctcaaactcctgacctcaggtgatccacccgcctcagcctcccaaattgctgggatgacaggtgtgaaccactgcgcccggcctcggtcatcttaattgtatactttgaatacgctcacctacgtattacagcagatgtaggtcacaccgtgtatcatacaggaaaggctggcacagatggggacgaccccccggctctgagcgggggttggaaactctggaactcccacgtggagcagaaaccacccagagcccaggttagagttggctgcaggtcccctctgggcactgctgcagtcccaggctggagggcccaggtctcatccccagggggctggagaagccagggaggagtagcacagacaggcctgagtgggtctcgggtctcgggtctcggttgagccggggctagatgaagttcgccgccgcggtcgggagggattgcaaacggggatgttcgtgccccagggtggagaaaccaggtcgtcccgggcagggggctccagggttagccgcggagagccccgtgcgttgcacacacttaatgtgccaggcactgtgctgtttcacatgcaccatctcgatgagtcaccttatgaggcagacctcactgtccgcacttaacagaaggtgaatctgggattcagagaggtcagggagcctgtctgagatcacagctgagaagcctgttggcattcaaacccatgcccatgtgactccaaaggcagtgcttgaaccacctttggttaagggatgacaggctatgccgcctctcggtccagtcctccctggctggccgtgcccccgtgtgcaggctctgccctcggccgcattcccctctgagcaggctggggggtctgccatctccctcagacgcgacagctggtgaaggacggcttcctggtggaagtgtcagagagctcccggaagctgcggcacgtcttcctctttacagatgtcctactgtgtgccaagctgaagaagacctctgcagggtgagtgtgtgagtccaggggcacggggcgggggagggggtccggacctctgcggggtgagtgtgcgagtccggggcgggggagggggtcctgacctctgcggggtgagtgtgcgagtccaggggcgggggagggggtccggacctctgcgaggtgagtgtgtgagtccaggggcgggggagggggtcctgacctctgcggggtgagtgtgtgagtccagtggcacagggcgggggagggaggccggaccctgccacccatggagccttcagcaactttgttggttttttttcttttgagacagggtcttgctctgttgcccaggctggagtgcagtggtgcgatctcggctcactgcaacctctgcctcccgggttcaagcgattttcctgcctcagcctcctgagtagctgggattacaggtgcacgccaccatgccaccatgtctggctaatttttgtatttttagtagagacggggttttgccatgttggccaggctgatctcaaactcccaacctcaggtgatctgcccgcctcggcctcccaaagtgctgggattacaggcatgagccaccgcgcctggccggttttttccttttaaaaactatattaattaacttaatttcactacatagccttttttcctgaaagtaagtcatgtttttaattataaagataatataaggccattggaggaaaccccgtcccccactgaagcatgaggtccgactcctgccgcgctgcttccttccctgtttttaaatgttctcatgtttcttcacacagtcgtaatcactgtgaatgcccaatttggggctctgctgtttctgtttcgtgtcataagcattttccctgttgctgcctcatcttcataatcatccttttactttcctgcacgatgttacccgtagatgtgccatcgtctacttaagcattctccttttattagacatctctgaatttctgctaactgcagtgctgtgaatattcaccacgtctcctgctactatttattgagggtttatgccatgccaggtgccgtgacacatgctttgaatacatgatttctagtcctcccaacacctccacaaagtagcgactgttgttccctaatcatagatgagagaggagtcttggagaaggtaaataagcagcccaagctcgcacagctagaggcacaggtgggactggaaccccaagctgacgtgcaaactcctttgagcctccttctctctacccgggagggtgggactggaaccccaagctgatgtgcaagctcctttgagcctccttctctctacccgggagtgtgggtctgctctgtgccttgagcagaggctcattctgcgttcattcacacattcttccacccacacttagtgatcaactgcagtgtgccaagcacaccccttctcacggctgagaagcggcagtctggattcaaacccgtgtctgtgggactcgtttaccatcaggctatcttgcctctcccttcagccctccctggttggctgtgcccccaagtacagcacaggggactccacagccagtgtgttacaccaccaggctatcctacctctcccttcagccctccctggctggctgtgcccccaagtatagctcagggggagcaagccccacgcccacctcaacactcaagggtcagaatgagaagtgcaaatctaagtcctaggggaaggatcgatgattatgaacgtcaataaagggatgactgggcgggcacggtggcttatgcctgtaatcccagcactttgggaggccaaggcgggtggatcacctgaggtcaggagtttgagaccagcctggccaacatggcaaaactccgtctctactgaaagtacaaaaattagctgggtgtgatggcaggcacctataatcccagctacttgggagaatgaggtgggagaatcgcttgaaccctggaggcagaggttggagtgagtggagatcgcgccattgcactccagcctgggaacaagagcaaaactccatctcacaaaataaaaataatttaaaaaataataataataaaggacatgactccctggaactagatcatgtttgagatagttctgaggcagagatggcaataataagcacacatgcttctgcctgtcgtcctttgcgatggcagacattactaatcacatatgcctctgcctgctgtcctttgccatggcagacatcactaatcaactagggcacactttcttgctagacttggatgtggctttgtaatcctccacccagtgttgacccatgtgaccactcttgataagaggtggcatttggaataacacctgtattccattgctagcctgaaggatattgaacacggatagtctagaagggagggaggggattgtggtggggaataggaaaatgtgagcccagccaggaaggcttcgctcttcttgatacctaagtggtttgggatgtttgacaacatgagtcatctgggccagaagcctggtaaggtgaaggggcggagttgctccctgcgggcggggcggaccccagaacccagctttcatcactccagtgtgtgtttcccaatcaggctcctcaggagcagggatcgttcttgcttctggcgagttctcagtcaacccctgtcagtggttctgtggttctggacccaagagttgaggctggaagagccaggctccctctggctcatggctccctctggctcgtttgcaggaagcaccagcagtatgactgtaagtggtacatccccctggccgacctggtgtttccatcccccgaggagtctgaggccagcccccaggtgcaccccttcccagaccatgagctggaggacatgaagatgaagatctctgccctcaagagtgaaatccagaaggaggtgagcagagcttggtatctgagcctggggccctttgagccagctgtgttgggggaggtggaggcaggaagttgtaaggtttgagactttgagagggagccttgagtgtgtagttactaagggaaagaccccgactacagtagctccaagcagatcgagggggtcagtgctcaggatttcatagggctaacatgggaagtgccctggaaagcagtgcatgttgaacacgatagaaaggggaagcaagtagccaggcgcagtggctcacacctgtaatcccagcactttggaaggccgaggcaggtggatcacctgaggccaggagttcgagaccagcctggccaacatggcaaaaccctgtctctactaaaagtacaaaaattagcagagtgtggtggtgggcacctgtaatcccagctactcgggaggctgaggcagtagaatggcttgaacccgggaggtggaggttgcagtgagccaagaacatgccaatgcactccagtctaggcaatagagtgagattctgtcaaaaacaaaaaaaaaaagtggaggtagagggaagcaagagaagaaaaagcaggcttttgtaaggaaaagcaggacctgtgcaaggaaaaggacctgggaggcctctcagaaactgacagatcaagtaggcaaataaataaggagagagaggacctgaatgccacaattaacatgcttgacttaaaaatgcagagaagcttgtgccctgacagaaaactgagattcttgtcacacacgtttgggaccttcacatttatcctataataggccactaaggaaatctcaaaatttttctgcaagttgatagcatacaagtcatgttcacagaccacagtggagtaaaattagaagtgaacaagaatattggtcagcctgggtgcagtggctcacacctttaatcccagaactttgggaggctgaggatggtggatcgcctgaggtcaggaattcaagatcagcctggccaacatggtaaaaatccatctctactaaaaatacaaaattatccaggcgtggtggatcatgcctgtaatcccagcactttaggaggcccaggcaggcaggtcacctgaggtcaggagtttgagaccagcctggccaacatggtgaaaccccatttctactgaaaatacaaaattagcctggcgtggtggcttccgcctgtaatcccagctactcaggaggctgagacaggagaattgcttgaacctgggaggcagaggttgcattgagctgagattccgctgctgcactccagcctgagcaacagagtgagactgtctcaaaaaaaaaaaaaaaaaaaaaaagcattggtttggaaagttcaaactgacaaggtaaagaggaaatcaaaattcaaaatgagaactgcaaactgtttagtgctgtctggaaatgagtgtactacataccagtacccatggatgcagccaaagtgctgtttagaggaacatgaatagccctcagttcacataacaacagtgtctagaggaacatgcatagccctcagttcacataacaacagcgtctagaggaacatgcatagccctcagttcacataacaacagcgtctagaggaacatgcatagccctcagttcacataacaacagcgtctagaggaacatgcatagccctcagttcacgtaacagcagcgtctagaggaacatgcatagccctcagttcacgtaacagcagcatctagaggaacatgcatagccctcagttcacgtaacaacagtgtctagaggaacatgcatagccctcagttcacgtaacagcagtgtctagaggaacatgcatagccctcagttcacgtaacagcagtgtctagaggaacatgcatagccctcagttcacataacaacagcgtctagaggaacatgcatagccctcagttcacgtaacagcagcgtctagaggaacatgcatagccctcagttcacgtaacagcagcgtctagaggaacatgcatagccctcagttcacgtaacaacagtgtctagaggaacatgcatagccctcagttcacgtaacagcagtgtctagaggaacatgcatagccctcagttcacgtaacagcagtgtctagaggaacatgcatagccctcagttcacataacagcagtgtctagaggaacatgcatagccctcagttcacataacaacagtgtctagaggaacatgcatagccctcagttcatgtaacaacagtgtctagaggaacatgcatagccctcagttcacataacaacagtgtctagaggaacatgcatagccctcagttcacataacaacagtgtctagaggaacatgcatagccctcagttcacgtaacagcagtgtctagaggaacatgtatagccctcagttcacgtaacaacagtgtctagaggaacatgcatagccctcagttcacataacaacagtgtctagaggaacatacatagccctcagttcacataacagcagtgtctagaggaacatgcatagccctcagttcacataacaacagtgtctagaggaacatgcatagccctcagttcacataacaacagtgtctagaggaacatgcatagccctcagttcacgtaacagcagtgctagaggaacatgcatagccctcagttcacataacaacagtgtctagaggaacatgcatagccctcagttcacataacagcagtgtctagaggaacatgcatagccctcagttcacataacaacagcgtctggaggaacatgcatagccctcagttcacataacaacagtgtctggaggaacatgcatagccctcagtttacataacagcagcgtctagaggaacatgcatagccctcagttcacgtaacaacagtgtctagaggaacatgcatagccctcagttcacataacagtgtctagaggaacatgcatagccctcagttcacataacaacagtgtctagaggaacatgtatagccctcagttcacgtaacaacagtgtctagaggaacatgcatagccctcagttcacataacaacagtgtctagaggaacatgcataaccctcagttcacataacagtgtctagaggaacatgcatagccctcagttcacataacaacagtgtctagaggaacatgcatagccctcagttcacataacaacagtgtctggaggaacatgcatagccctcagttcacgtaacagcagtgctagaggaacatgcatagccctcagttcacgtaacaacagtgtctagaggaacatgcatagccctcagttcacataacagcagtgtctagaggaacatgcatagccctcagttcacataacaacagtgtctggaggaacatgcatagccctcagttcacataacaacagtgtctagaggaacatgcatagccctcagttcacataacagcagcgtctagaggaacatgcatagccctcagttcacgtaacaacagtgtctagagcaacatgcatagccctcagttcacataacagtgtctagaggaacatgcatagccctcagttcacataacaacagtgtctagaggaacatgcatagccctcagttcacataacaacagcgtctagaggaacatgcatagccctcagttcacgtaacaacagtgtctagaggaacatgcatagccctcagttcacgtaacagcagtgtctagaggaacatgtatagccctcagttcacgtaacaacagtgtctagaggaacatgcatagccctcagttcacgtaacagcagtgtctagaggaacatgcatagccctcagttcacgtaacagcagtgtctagaggaacatgtatagccctcagttcacgtaacaacagtgtctagaggaacatgcatagccctcagttcacgtaacagcagtgctagaggaacatgcatagccctcagttcacataacaacagtgtctagaggaacatgcatagccctcagttcacataacagcagtgtctagaggaacatgcatagccctcagttcacataacaacagcgtctagaggaacatgcatagccctcagttcacataacaacagtgtctagaggaacatgcatagccctcagttcacataacagcagcatctagaggaacatgcatagccctcagttcacgtaacaacagcatctagaggaacatgcatagccctcagttcacataacagtgtctagaggaacatgcatagccctcagttcacataacaacagtgtctagaggaacatgcatagccctcagttcacataacaacagcgtctagaggaacatgcatagccctcagttcacgtaacaacagtgtctagaggaacatgcatagccctcagttcacataatagcagtgtctagaggaacatgtatagccctcagttcacataacaacagtgtctagaggaacatgcatagccctcagttcacataacaacagtgtctagaggaacatgcataaccctcagttcacataacagtgtctagaggaacatgcatagccctcagttcacataacaacagtgtctagaggaacatgcatatccctcagttcacataacaacagtgtctggaggaacatgcatagccctcagttcacgtaacagcagtgctagaggaacatgcatagccctcagttcacgtaacaacagtgtctagaggaacatgcatagccctcagttcacataacagcagcgtctagaggaacatgcatagccctcagttcacataacaacagtgtctggaggaacatgcatagccctcagttcacataacaacagtgtctagaggaacatgcatagccctcagttcacataacagcagcgtctagaggaacatgcatagccctcagttcacgtaacaacagtgtctagaggaaggcaccacgggaggagcatccctgtgagtggaggaagggcctggagcggtttggtcagcttggtctgttttcctcacctctcaggttcagcttaggcctcaccacccctgggaagcttctctgacacccacgcccaccacagtcttggttgggtgccctgtccccagatcctgtggctttttgttcacctgtggctttgcttaaatggtactgaattgtaattgcattgtcagactcctctcttccccactggaatttgaactccagggacagcgctattttcttctgttccatgttcctcatattcgacacgtagaaaacaggtggttagggcccagcatggtggtttacaccggtaatcccagtactttgggaggctgagacgggtgggtcacttgaggccaggagttcaagaccagcctggccaacatcatgaagccccgtctctatgaaaaatacaaaagttagccgggtgtggtggtgggtgcctgtaatcccagccacatgggaggctgaggcaaaagaattgtgtgaacccgggaggtggaggttgcagtgagccgagatcacgccactgcactccagcctgggcaacagagtgagtgggactccatctcaaaaaaaaaaaggcacttagtaaacaaacaattattgaagaaaacataaccagatggcctctctgaggatcctttcaactcaagcatctccctttgaacaggggaaagcaagatcaccattacagccccaggagtgttcagggctgggggatgtcctaggacagagggtccaactggtggtacatctgcccagagggcttcctcgccagcacagctgtccccctcctgaacggctgggccctgcccacagtgcccgcccaggagcatcctgcgtgcctgtttcccacccgcccctgggaggcttgctgcctccccgttgccccagctgtgcagacgtggccttgtgcccagtcgagtcaacagtcaacactcagtgagccccactggctgtgctgcctggggtgtgccgggtgcctcatgtatatccctgtccagtggaggaagcagacacgccccttgctgaccacagagtgtggtacatgtgagtcactggagaggcacaggtgccgtcctctgagtcacagaagaagcagtgatttgttttttgttttttgtttttttttgagatggagtctcactttgtcactgtcgcccaggctggagtgcagtggcacaatctcggctcactgcaacctccacctcccgggttcaagcaattcttctacctcagcctcctgagtagctgggaataaaggcgtccgccaccacgcctggctaattttttgtatttttagtagagacggggtttcaccgtgttagccaggctggtctcaaactcctgacctcatgatccacccgccccggcctcccaaagtgctgggatgacaggtgtgagccaccgtgctcagccttgttctcttgataataattttttaaattttcatgttttttctaatccccaatataatactggctggttttaatgagaaatgctcgtagtaccagcatgtacagggtaaagctggtcgccactcacctcccactgctgacagtttgaggtgtattcttctgaactcttctttgcttatgctggtgtgcgcccgcgtgtccaatgagactagactacacgtgctgttttgcaacttcagcattttactccacagtgggtctttgagccctttggatgtatcagattctttttctttctttttgaggtagagtctcgctctgtcacccaggctggagtgcactggtgagatttgggctcactggaacttccacctcccgggttcaagcgattctcgtgcctcagcctcccgagtagctgggattacaggcgcccgccaccacgcccggtagtttttgcatttttagtagagacggagtttcaccacgttggccagggtggtctcgaactcctgacctcaaacgatccgcccacctcggcctcccaaagtgctgggattacaggcgtgagccaccgcgcctggcagtatcagattctttttaacaactgcctcctgctctgtcgcttggctgcatacaaatgtttttgggtgtttggattgtctctgattcttcgctcttagcaggcaagtcaacagtaaacatcactgcgcaggtgcctctgcagtaggttccctccaggtgggatgggcagggcagggtgagtgtgcgcttaattgacaggcttttacctctgaaaaagctgtgactggtggcattccccctgcggtgtgtgagggtgactgtcccccacagtgtcacaacactggctgtgaacattctttacaattttgccagtccagtgggttaaaaagaacaaaacaccatagaggtgaattctaactgaggagcttgaggatggccttgggagctgagacttgaagcataatggtggttaataaaagggagggggtcctttacgaaacagacagaaacttggaacattgagggagcaggctctgcccgcagaggatgaatgtctggtgagagggggaggctgagccgacgggacctggtgggttgtctgccgggcagggaggctggaaccctgccatgggggccttggtgccaggctagcaggtggggcttcaggctgaaaggtgtctgaggtttctttaagcaggtgtctctgttgtacccaggatttaatgtgtagaggcagcagagtgacagtacagagaggttaatactactgtaatatttgtattatttagggttctcaagagaaggaggcatagcaccccgcccagggccacgtggagaggtgccagctttgaacaggaggcaggaatggaaagaaagtgtggccacagcttttctgtggagaaacagggcagggaaagggcttggcaccagctggcttccgttatgtcggcagccctgggctagaggagtggtctctggtgacctggtccctggccctgggtgacgtggggcagaggagatgctggcttggcgagtgagcgtcaggtagagaaggtggttggggacatgggctctggatcagtgggtgtgtgtatgaaagctgtgctcatagggcatcactgacaggcttaggaattagtgagccctgtgggggagcagtttctcacccagctacccgcctctcctgccacaagatgtcaaaacatcacgaaatacggaaaatgtaaagagcatgttaacacacagtggagtgtcgtgcttagtgctgctcgtgagaaaggcccgagtgtgaggggaaccctctgtgtccccatctcctgcagaaagccaacaaaggccagagccgggccatcgagcgcctgaagaagaagatgtttgagaatgagttcctgctgctgctcaactcccccacaatcccgttcaggatccacaatcggaatggaaaggtcaggatgggtgggggtgggaccaagacagccccttccttagtccagagcagcccactctgtggctcctggccctgacctgtacgaaccggaaactcaggccccctcttcctgaggaggctgccatggctccagctgttgactcgctctcccctctcgtgtggaatgagtgccctctgctggccgtccctggcacagccgctcctgtcaccttggcttcccaggaaggagctcccccttcacccacccacccccagctgcctcctcctgcaaggtcagctgtgcctggataaggaggagctttgggccgggcacagtggctcatgcctgtcatcccagcactttgggaggctgaggcaggcgaatcacctgaggtcaagagtttgagaccagcctggccaacatggcaaaactctgtctctactaaaaacacaaaaattagccgggcgtggtggtgggcacctgtaatcccagctactcaggaggctgaggcaggagattggcgtgaacccgggaggtggaggttgcagtgagccgagattttgccattgcactagagcctgggcaacaagagcgagactctgtctcaaaaaaaaaaaaaaaaaaaagataaaaggagctttgttggggtccccaggatctgggagtacgctttgcctgactgtggtcacccactttatgcttatctcctctcttcagagttacctgttcctactgtcctcggactacgagaggtcagagtggagagaagcaattcagaaactacagaagaagggtaaattcctgcctcttccacgctccccaatgatgtccgtggcattgatgggccttttgtatttctaagcgtttcatgtccagtatcacgtctttggccctcgcagtcaccctcagaggtgccagggtgagcgtttaaggatgttacggattaattgagacccaaagaatctaactgattggctgaaagacatgatgatttagtcctgggactggacccagagcccagcctgggctttctctctctctctacctctctctctctctcacacacacacacacagagacacacacacacacacacacacacacatacacacatacacagaggctgggtacggtggcttacgcctgtaatcccagtcaggagtttgagatcagcctgggcaacgtggtgaaaccccgtctctactaaaaacacaaaaattagccaggtgtggtggtgggcacctgtaatcccagctactcaggaggctgaagcaggagaatcccttgaacctgagaggcggaggttgcagtgagctgagatcacagcactgcactccagcctgggcgacagagtgagactccgtttaaaaaaaaaacgaaaacaaaacgcatacaccacacacacacacacacacacacacacacacacacacacacacacacacacacacacaaacctcttcagttagattctcctactctgacccctctcgcagcatctacaccagtcctgctgtgtccacaaatccttccccctccctcgcaaggaccaagtctgccccagggattaagccgtcttcctgcagcagcccccagggaagagcagccggtcctggtggaccagtgcccacgctcccttctctctcggctctccctccagatctccaggcctttgtcctgagctcagtggagctccaggtgctcacaggatcctgtttcaagcttaggactgtacacaacattcctgtcaccagcaataaagacggtaagctcgggaaccagaggtggcccaaccggcaggtcccagccctcagagcgtggccggcttcccgtaaggactcagacagacatgtggctgtaaatggctgatccctgctcggctgtgctgagactgttgagtggccaggacacagcttgggtaggggtgactgtctactgagttcccagatgaccccagcttttccttgggcccctctgtctggcttgggagaactggcaccctggtgcactgagattgtgctgttaatatattcatgagagagcagacccggtagataaaatggtgtatgggaaatgaggctggaagtttccagggaccagctcttgaaaggccttgaatcccaagcaagggagtttggaattcatgctgtaagcccgggagtctgggggggttttgagcagtggggagctgtgatcagggctgggaactgaccggagtgggtgtattctagctgcctgtgtgctgggaaagggtccactttgtgaacggggtcctgaaggcaagctttcctcgacataaatcattagcagaatgatttatcatattggtcagttttcagtgccaggataggcaggatttggagggagagacagtacccatggggaatggtactaagtccctgggccaggatggtgggtgtgctggacccccccaggctgagtggaggagagaaggaccccctagccctaccccgggcagctcacatataaggccgccgtggccttcggaaactttttcatctggccaccaggtggtgatgttggaccaagactcagctgagtctcataccccgtctgcctcccgccggcctggggtggaggctgaggggatccgctgaccaccctctgccctgggggcttttctctcttgcagacgatgagtctccaggactctatggcttccttcatgtcatcgtccactctgccaagggatttaagcaatcagccagtaagtgccctggccaggacgaggttgggtgggccattgtggattctgcactgctctgcccaggatggggccctgccagcacgcctttagacatggggcattcccctggaggccagaaaccagctcctcttggcagggaggtcacccctggcctttgtctccaaagtcctctttctcaagccctccctgaagctgtctgaaacctaggggccgggcgcggtggctcacccctgtaatcccagcactttgggaggcccaggcgggcggatcacgaggtcaggagttcgagaccatccgggccaacatggtgaaaccccgtctctactaaaaatactaaaattagcgtgggcatggcggtggacgcctgtagtcccagctacttgggaggctgaggccagagaatcccttgaacccgggaggcggaggttgctgtgagctgagatcatggcattgcactccaccctgggcgacagagcgagaatccgtctcaaaaaaaaaaaaaagaaaccgagtgcgacaaacacgtggactccaacttcatatctgagggcgacaaacacgtggactccaacttcatatctgcccatgacaagctgtgtgaccttgggcaagtttcttaacctctctgggcctccactaaaaggcagtcacgcttgtgaattttgacccgagagcaggctgggatatgatcgtgtgtgtgcaacgctggtgtgctgccacgctcatcgctttttctccccttcccccttgtgggttcctcatactaaatctgtttttagtgtctcacaaagtaggattgcactttttaatttttaaaaaatttttttttagagacaggttctccccatgttggccaggctggtcttgaactcctgggctcaagccatcctcccacctcagcctcccaaagtgctgagattacaggcgtgagctgctgcgcccggcctggttgcgctttttatctacctgttatccacacgggaatctgtgagtcagttagacagctaatagtttctacccatttgccagaggaggtaaccgagtcacagagaggagaaaagacttaacatcacagaggatcagaaaccctgactctctccctctccacctgcccctcccactccctgctcttcactggcaggtggggtctgccctcacccctccctgcagcgccccacacagaggtgactccccgggccgttagagcagcctttcccaggaagcctccctgagttcctgggggcaaactggcctcccttctttgtcccttctttgtgcccacatcccctcaggttccttgtgcccccatcccctcaggttccttgtgcccccatcccctgaggttccttgtgcccccatcccctcaggttccttgtgcccccatcccctgaggttccttgtgcccacatcccctgaggttccttgtgcccccatcccctcaggttccttgtgcccccatcccctcaggttctttgtgcccccgtcccctcaggttctttgtgcccccatcccctgaggttccttgtatccccatccctttgaggttccttgtgcccccatcccctgaggttccttgtgcccccatcctgctcagggcaagctggttatggcacctgtcatgctgttttgtcacttaacaatttgcgtctcccactgtgagttctctgagggcgggaaccaggtctcctttaccctgggatgcatgggagctcagaaatgtggaatgaagtcgttaatttacacagcacctaccgtgcacctggagaaggtgagaacatggctggcgtgtggacgtactcacatgtgcaaagcctgtggcgtgttcagagcctctcagtctcacggtccgctctgagcctccggcatcccgccgaggtcacggaaaccatccctgttttacacacgaggacgccgaggctcggaggggctcaaggttccttcctggagtcacacagtagcaggtggtgcagcagaatccacgtcttccggcaccagagccggagctctaaccttttgggcacttctcgatgtctggccgggaacaccacacggtccctcaggctgcttgttaccgtggaagcttcctgaactctctccagacccacagacctcccttcttgggggctgccgctgaggagcttctggctagtgagctctgaagcactgtcccacccatgtctggaccaggcgccaccactccatgtccccagatgccgcccctccctctcctgcttcccgttggccgggaggtcctcgcctcagggagccgacccgtggcctcccagcctgggcgggtgtcagagccggctgagctgctccaaaatctctctttacccccagattatcctcactcccttcgccgccgccacccctgacccactcatatgtctgttctcactcagaggtgaggccctgtgtcttcagccgtggtaaactcaggacctctggacaggcaggcccagggtgtaggcaccatgacttttcctgctgtgcagacaggaacctggggagagaagggaggtgatctgtgcagagctggggtgtggacccagatggtctgactccggaaccctcgctctgaccctgtgagccgtccccagctccttccggaaccctccctctgaccctgtgaaccctcccccagcccgttccggaaccctccctctgaccctgtgagccctcccccagccccttctcgaaccctccctctgaccctgtgaaccctcccccagccccttccggaaccctccctctgaccctgtgaaccctcccccagccccttccggaaccctccctctgaccctgtgagccctcccccagccccttccggaaccctccctctgaccctgtgacccctcccccagccccttccggaaccctccctctgaccctgtgacccctcccccagccccttccggaaccctccctctgaccctgtgacccctcccccagccccttccggaaccctccctctgaccctgtgaaccctcccccagccccttccggaaccctccctctgaccctgtgagccctcccccagccccttccggaaccctcgctctgaccctgtgacccctcccccagccccttccggaaccctccctctgaccctgtgagccctcccccagccccttcctgaaccctccctctgaccctgtgacccctcccccagccccttccggaaccctccctctgaccctgtgaaccctcccccagccccttccggaaccctccctctgaccctgtgaaccctcccccagccccttccggaaccctccctctgaccctgtgagccgtcccccagccccttccggaaccctccctctgaccctgtgaaccctcccccagccccttccggaaccctccctctgaccctgtgacccctcccccagccccttccggaaccctccctctgaccctgtgacccctcccccagccccttccggaaccctccctctgaccctgtgacccctcccccagccccttccggcaccctccctctgaccctgtgaaccctcccccagccccttccggaaccctccctctgaccctgtgagccctcccccagccccttccggaaccctccctctgaccctgtgaaccctcccccagccccttccggaaccctccctctgaccctgtgagccctcccccagccccttccggaaccctccctctgaccctgtgagccctccccagcccctcgaggaggggctcacaccgagatcaatccatgatgacagcacttcatggcccgtctcaaacacacaggcccactccctggtctggcccaggctggggtgctcagggcctctgtgttgttcacctgcaaatccccagccccgttctgtgtgttctgaggcccacctgggtcttctttctgttgctccagctggaggcttcttggggtagctgcactgtcctttctgcaggaaagctggtttttttggtttttttttttttgagaaagagtcacttggtcgcccaggctggagtgcagtggtgccatctcagctcactgcaacttccacaccccaggttcaagcgattgtcctgcctcagcctcccgagtagctgggactacaggcatgtgccaccacgccgggctcacttttgtatttttagtagagatggggtttcaccatgttggtcaggctggtctcaaactcctgacctcaggtgatctgcccaccttggcctcccaaagtgctgggatttacaggcgtgagccaccttgcccggccaggaaagctgttctgatggagaatggcccagctgggcagctgcaggggctaagtggagtaagccacctgcactgtatgcccgcactgtgacctctgacgttgtttcacgctgcagagggttggccatagtgtcccaaaggcacctcccacaccacctctggtaccctgggaacaacctcggcatctccctggaggtgggaggactgctggggtccgagcccagggcgggtgtgggtttgcagagggcctggggtccgtgccggtgctgtggcctcagcagttgggtcccaaggtagattttcagcctgaaggccagggtggaagatggaaatgccggggaaagcccccggccctgccctcccgccccagccctccactgccttgttacctggagcgcttggtggtggtgggagcctcgttcaccgtgtgccagctgggttcccagccctgttcttggtactgcgggtacaccggcaggcaggaaaacccaggcttctctccacatggtgtttacgtcgtggggggagagagactagggacgcacgagtagagaagatccctttggtttatgttaagtgcagcggaggaaaccacagcaccctgggcttggggatgtgggcgttgttggtcgtcaccgcggcaggggatgctccgagcattcaggacccagaggcagggctgctaaacgcctcccaccccaaatgccgctgttgaggcctgggcacccatgttacggggagaggtggctccagggcggtcagtgaagagtttgtggtgtcgtctccatggtgaggaagatgtggagacggaacagtcaagggccctttagagggaggaggaggccagagtgtggggagggccgaggtgggaagggcagagtgtggggagggccgaggtgggaagggcagagtgtggggagggctgaggtaggaagggcagagtgtggggtgagccgaggtggggagggctgagcccctaagaagggggcaggggagaagccagatggtcccgggcttcagggaggagagagccaagatgccatccgtggggacgttggaaaggacagatgcgatgtccccctccatcctgagtgccgccccagctgccccaccctggccccactcactcagtatctccgtctgtccttcccccacagacctgtactgtaccctggaggtggattccttcggctattttgtcagcaaagccaaaaccagggtgttccgggacacagcggagcccaagtgggatgaggtgagtggcaggggctggcatctctgtggggaccccaccaccccgtgctcgtggcttgtctgctggggacggccagcccattggttggaccagctatgtctgcacccccctttctgctccctgctcctctggcttctgatcgcggtgtgtgtctgggtgtcagaccctgtggtgtcagctcaggcccccagactccaggggtgatgggaggcctctgggagctccagaaaatctgacgtgtccttcgtgggccgtgcttactccctcctccttgcaaagctgaggcacgcacctgccggaaagccaggcctcccagcttcggaggttcagggccctttgtcccatctttccccaggagtttgagatcgagctggagggctcccagtccctgaggatcctgtgctatgagaagtgctatgacaagaccaaggtcaacaaggacaacaatgagatcgtggacaagatcatgggcaaaggacagatccaggtgaggccagggcgccggggcgaggctgagggagcctccaggaggtggttccagttgaaaaggaattctggtcaaggagcctgctctttcgtgattttggttccaagctggttggaggaaagttcccaggaggtggttctcccctccctgctagaggtggctgcctgttgtggccccggaagcccaggcgtgtgcgtggctcctcaggtgggtcatctgcgcttctgcaagatggaaacaaccagctttgttttcacacgccagctttagtctatgggtggttgtttcccggaacgccatgttgagaaggactcagaggctgcgtcggtgaacgggagggaggaatgctgtgtgtgaggagccgtgtctgccattgacgggggaccggagttaggcacacggaccaggcgtttgctcttctgcccgaaagacttagggtcctgctggttggcttggggggaggggggtctctgacttgttgttagggtggccggaccttactcagctgcgttgggagtctgtggcttcgggtggggactctgggtgttagtagaggctgcacctcgggttaagggtatttatgcttctgggtgcggtggctcacgcctgtaatcccagcaccttgggaggccgaggtgggtggatcacgaggtcaggagttcgagaccagcctggccaacatggcgaaaccccatctctactaaaaatacaaaaattagcaggtcgtggtggcgggcgcctgtaatcccagctactcagtaggctgaggcaggagaatcgcttgaacccaggaggtagaggttgcagtgagctgagatcgcgcctgggtgatggagtcagaccgtgtctccaaaaaaataaaaataaataaaaacagcatttatgcctcaactgtgcttttggctccctataaacatatatagggaaaaggcctctgtgtgtgcagcctgtgtctctgaaacattctgccaattttgaagatggctgctattcaccaacctattaagagaagtaggcttgggagcgggaaaaggcgtgacgtggtggagccgctcacactcccgtctggtacctcgtgtggcctcgtgctgtgccgcaagtggtctggtttgggggtagattctgtgaccatgaaatgaagggagacggtaactgacccgtactgaggttgagcctcgggcgttgggcgtgctgagcttcttgacagtggccgcagacgtgatccaggcacagctgggcgccgagcttcttgaccgtggccccggacgtgatccaggcgcagctgggcgccgagcttcttgaccgtggccccggacgtgatccaggcgcagctgggcgccgagcttcttgaccgtggccccggaggtgatccaggcggcagctgggcgccgagcttcttgaccgtggccccggacgtgatccaggcgcagctgggcgccgagcttcttgaccgtggccccggacgtgatccaggcgcagctgggcgccgagcttcttgaccgtggcccaagaggtgatccaggcgcaggctgcgatggctccgtctacaacagggagctgaacgatgctttttagcaggaagcatttgttctctgatgcattgtcatggccaccgagtttggtatctggctcttacctgcaggtccttggtagcattgcccctggggagctgtgtgggtctcccactcgctgccccatctcaggctccagtgtttgaaccaggggccccacgtggaggggcctggcctctgccgcatacgccccgtgttcctaaacacgtctctttccgatgctgtggggtctgcaccctgcttctcagtactcgtcactagggagacagggctgccaggcaactgccagccagtccttcgtgatttaggaaatgggctctagagattcagtccctgggacctgctctctgtggggataaggggagggagccccatctccctgtccctgggctgggctagagggacaggcacggaagggttctgggctggcctgtgcagccccaggagacgcccaggcaagagacgagtggtcgccacgccacactccctgggccactggtggctgtggaatagaagagttacaaggatgtgccgggcagccagccccgtgggcacggtgggccccagcccctcgagaactcagctcccaaggcccgagggcacattcccccacctggacttcagccccattgcttccctccttctcactcagctgcacaagccccgggggaaacacaccatcagtcactgcaagcctcttggagacaggagcagatggaggcagtgggggagggaggaagccaggttatgtttggcaaagcagaaggcagagtctggtaaggaaaatgtttctgtgtttaagcttcgaggaatgttaaatgcctgggagttgatattaaaagaaacataaaccttcctgctgccagctgacctgggcctgtgagcggacagttcagagccagagtcccctgcaggcctttgaagtcccccagcactcagcatgccaaggcccggccctggccctccgctgcagaaccatctcaccagcctgcctttggtgggggaggcatgccccaggggcgggctgtggcttagaaagtctcgccccgtgactgccctcagagccaccgtggatggccaggctgggtgacgagtccacacggagctgttcccacgaacccgggccccacggagccacggaacggtctgtccccacagcttgtctctgccttcactccggccacacatctaaggaagggagctggcactagcctctggaatgcagtctttctgcccgccagcaggcgctgaggacatagtcggaggtggctttgagatagggcccagccctcggggatattcagggggcctgtaggaaaggcaggaggaggagggcagtctctgaggcccccacttctctctaagccccctcccagcagcccatccagagaaagcaaggggccctacggcctaagcgcaggcatttgctgctgtgatgaggcccccactctgggtcgcctgatggggcagtggggcaggagtctcagcggcggggtggggtgggggaagcatttagtgacagacagacggcagcatgcgtcaccaatgtgtgtccagcacttgtgctcctggaggccgcttcccaaatgccatctcctcgtgtgatccttgtcgtgatcctccagggagaatgacagtccctcctccccatcttacagatgaggacactggggtactgaggttaagtaccttggccaaggcatctctgcgtatggtatgtgggaaaggccatgttccctcctctgtgccatgtccccacgtctcaggcctttgtcaacgaatcccccagcccggacagagggccgtggcatggctaatggcctggagaagcagctgaggtgctgctttatggcataaggtgagcgtcctttgtcttggagtcctctgggcaggggacacttgtgcctggtgcccctgggaggaaggagaggagcacgtgcgggaaagagcaggaggccgaggtgggctgatcacgaggtcaggagttcgagaccagcctggccaacatggcaaaacccctttcctactaaaaatacaaaaattagccaggcgtggtggcacgcgcccataatcccagcactttgggaggccgaggcgggcggattacaaggtcgggagttcaagacccgcctggccaacatggcgaaaccctgtttctactaaaaatacaagaattagctgggtgtggggcccacgcctgtaatcccagcactttgggaggccgaggcgggcggattaggaggtcgggagtttgagactcgcctggccaacatggcgaaaccccgtctctactagaaatataaaaattagccaggggtggtcgtgcgtgcctgtaatcccagcacttcgggaggccagggcggggggatcacctgaggtcaggagttcgaaaccagcctggtcaacgtggtgaaaccctgtgtctactaaaaaaacaaaaattagccaggcgtgatggcgggcacctgtaatcccagctacttgggaggctgagggaggagaatcacttgaacctgggaggtggaggttgtagtgagctgagattgctccattgcactccagcctggacaagacagaatgagattctgtctggggaaaaaaaagaaaagaaaacagcaggaggggtacttagcatgcgtctgtgaggtccccagcccaggagggggtcctggcctccagggacccactgtcagattggaaagacgagtatattggtccatgttctccagtgagaagaatgctagatgtcagccacaatagccgtacacacataagcgagcccaggacgagcccagcacggtgctaaatgcttccatctgctgtctcaggagatcttcccaggaccctgtgggagaggaatatcatcacagctagaaagatgaggaagctggggctaaggagcccggacaaggccatgtgcccaggagtgggccagggcgggcagctggctgcagagcccatttctagatgtcctgctgcctcctgctataagaagacggaagattgtcctgctgtaagaagacggaagattgtcctgctgtaagaagacggaagattgtcctgctgtaagaagacggaagattgtcctgctgtaagaagacggaagattgtcctgctgtaagaagatggaagattgtcctgctataagaagatggaagattgtcccgcaggaattcagaggcagaaaggtcaccatgggctggaattagggaggcttcaaggaggaggtggaacgagagcgatttggaagccctgggttttttaattccaaaagcaatgtttgtatgagaaagaaaattgcagtagaagcaaagagacttgaaacctaatcagaaaccatccttcctccggctcctccgaagcagccagtttattctgtgccttttcccttcttgaggtatacacatttttatgtagatttaatcagggcctgttttgtctgtttttctgttttcatggattattataaacctccttttctctagagctgtatggagtcttcttaagcacctttttggatactttgttaaaagtactttatattctttgtagaaatcttggtatagagcggccagcgcaattgctatgctaaggctctgtgttattccagcaaggtgcgcaggctccgcttccgcagaagggagtagggtgggagttctggaggacagacccgcctggcagggaggcacgaatgtgaagggagggtcccaggaaagtcaggagcctcagcaggggtggcggggagctgcaagcaaggccagtagaaggaatgaataaaaggaggggattcctgggggtttggccggaagaggtattttttttttttttgagatggggtcttgctgtgctgcccaggctggagtgcaatggcgcaatcttggctcactgcaacctctgcctcccaggttcacgccattctcctgtcccagcctcccgagtagctgggattacaggcgcccaccaccatgcccagctgatttttattagtagtagtagagacagggtttcaccatgttgaccaggctggtctcaaactcctgagctcaggtgatctgtccacctcagcctcccaaagtgctgggattacaggcctgagccacggcacccggcctggaataaatcttagagggcgtttaatccaatcctgttttccggagagaaggaaatggacaccagcaagggtgagcgaggcagccgcggtcacagagcttgttagtgggtgaacaagggccccagactcagggaccccatccaggtccgcttagctgggagccccccctccaccggctcttgcccctgcccccggcgtagtctgccctggctcctggtcccaggggactccactgtgtttatcctactctatttccagccttgccgctccagctgcaacctacccgctagctgattagcatattcccagggtccggcccttcttggcgggctgggcctgaggagagcgctttcccttggggccccacagctcagtttctgccagcgtccccagactggagaagggcctgagaccaagaagctacttaaacctgaggggccctctgcaccccctgcccgccccccggccctgcgtcattccctcgctcaccgcaggctggggacagcccccaccccacagtccacctctgctccctgtgcctgggaggcagctccacttccccacgtgcctgccagggcagcccctccctgggcacagcagcgctgaagaccctgtggtgggaggggcaggttccaggccaggaagggagtgtgagccaccgcgtccggcctttattctttttaaagaaaaaatagtggtagaagccaggcatagtagctcacgtggtgtagctgtggactacttgggaggctaaggaggctagagtgagctaaggattgcgctactgtactccagcctgggtgacagagcaagagtctatctccactgaaaaaaataaaaaataaaagattgtagtgaaatatacataacataaagttaccattttaataaattttaggggccgggcgcggtggctcacgcctgtaatcccagcactttgggaggccgaggtagatggatcacctgaggtcaggagttcaagaccagcctggccaacatggtgagaccccatctctacaaagattaaaaaaaattagccgggcgtggtggtgcacgcctgtagtcccagctattcgggacactgaggctggagaattgcttgaacctgggaggcagaggttgcagtgagccaagatcatgccactgcactccagcctgggcaatagagtgagactccatctcaaaaaataataatttttgggtgcacagctccgtggccataggtggatttggtgctgtgcagccgttgccagtgtgcatatccagaacttgttggccctccccagccgaaaccccatccccattaaatcataactccccactcctgcacccttagcctccagtaaccacctgcctgctttctgtctgtacgaatttgtccagtctgggaaccttacgtaggtggaatcagacagcatttgtcctcctcatgtccttgagcttcacccatatgccgttgtgtgtctgaatttcctccctttctgaggctggatacaatttccctggatgtagatgccacgtctctttatctgcccgtccgtccgtggatgtaggtgccacgtctgtttatccgtctgtggatataggtgccacatctgtttatccatccatccgtccgtgaatgtaggtgccatgtctgtttatccatccatccatccgtggatgtaggtgccacgtctatttatccatccatctgtggatgtaggtgccacgtctgtttgtccttctgtctgtccgtggatgtaggtgccacgtctcttcgtccatccatccgtctgtggacgtaggtgccatgtctgtttacccatccatccgtccatggatgtaggtgccacatctgtttatccatccgtccgtggatgtaggtgccatatctgtttgtccacccacccgtggatgtagctgccacgtctgtttatccgcctgtccatctgtggatgtagctgccatgtctatttatccatccgtccgtggatgtaggtgccacgtctgtttatccatccgttcgtggatgtaggtgccacgtctgtttattcatccgtttgtggatgtagctgccacgtctgtttatccatccatccgcggatgtaggtgccacgtctgtttatccatccattcatggatgtaggtgccatgtctgtttatccgtccgtccgtggatgtaggtgccatgtctgtttatccgtctgtccgtccgtccatccgtgcacatttgggttgtttccacccaaaacgctcttgcctttcgttgagaaaaagaaccttgtccctgaggatggagacagcacagcctccttctctccagacccaagctctgtcccccacctgcctcccagctgtaatagatgagcaggacccgtgaccctagggcatgactggtcactattagtctcctgtagttgaagcacacagttgggccccctgcctcggccttctctccccctcccggccaagtgtccctgccccttgaccccttcacccttcttcctgggtcagctctttcctcccctggtcagtggtttaggtgcatcgaatgcagacgcagtcaccctgaggccgcgggaacaacctctggtcccttgacttcttggcatctcagtttcttcttttatttatttacttatttatatttatttgagatggagtctctctctgtcgcccaggctgagtgtaatggcgcagtcttggctcactgcaacctccgtctcccgggttcaagtgattctcctgtctcagtctcctggttagctgggattaaaggcgcccgccaccatgcccagctaattttcgtatttttagtagagacggggttttgccatgttggccaggctggtctcgaactcctgaccttgtgatccacccgcctcagcctcccaaagtgctgggatgacaggcgtgagccaccgcacccggccaagtttctttattgattcagtgggggtaactattcctaccccaccttcagcactggcttaaaggatctcacatacctggaagagccagtcggtgctgtgacgtgtgcgtccacgctttcacctgttcactcacttgtttctgtttacgatacatcctctgaatggcaggccctgggctgtgggtacaaagaatgaccaggacctcaccgtctggtaaagaaaacaagagaacttaggccaggcacggtggttcatgcctgtaatcccagcactttaggaggccgaggcgggcggatcatgaggtcaggagttcgagaccagcctggccaacatggtgaaacgccgtctctactaaaaatagaaaaatcagccgggcgtgatggtgcgctcctgtaatcccagctactcgggaggctgaggcaggagaatggtgtgaaccaggacccaggaggtggaggttgcggtgagccgagattgcgccattacactccagcctgggctacagagcgagactctgtctcaaaaaaaggaaaacgagaacttggatcgttagccagtgttgccggggttttgaggccagacagatcttgcggggctgagtctagctttctccatcgttagttgggagaacagagcgagtatctttgcctctgagcctcagcttcctgacctgtcagatgggctgtaagaggactgaatgtgagggtccatgaaaccctggacccggggcctggcatggagtcagtacgtggtttgccctaagctggcgggttcaggcaccctgtcccccacccccttccagtggttctgggtgtcacttgtccagcagccccctcctaaaggctgtcacctataagtggtcccctgggtcggggcctttggctggccgaggcagcattattttcttaagctgatggggtcagactggctttgctgaaccaacctcatagcaggggcggggaagtcaaggctggggccctcaatgccggctggcccgaggtttccctgccatgacccagcacggcagctctgagcttggcctggtgtggtcggaaacaaggggcctttgtcagcggctggggagcagcttctggtttcaattactctggagagcacgaggaagcttgcagagaacgtggggccggagcccgccagggcaggagtcaagggctcccctgccccacttccctccctctgacccccaaggggtgtcttgtccccattcgaccctgcctgagggtcctgcgcgtgcgtcctgggggccctgggttgtgagcccagagccccttccagctccggccccctctcgttcttcatagtggtactgggacccctcccaggaagatgatcgacggccggtaacgtgggtcctcagtgcttccccgttccaggcctcacgcgtgggccacactgaccacagccgggcccctggccctgagggaggccttgattcaactgggaaggaacacaggcctttccctttggttccatctctcccgtccccaacccctgccctggcactcacagcccccatagctccctgtcgtgggacaccggagtgacctctccctggaagatcagcccgcgtcggcgcccgccaaggccaggagtgcatgtcaggccccgcctcggctcctggcttaggagttccgcctccctgctgcttgccaccctcacagctggcccacgtggggctcttccctctgccgccacccccacccctgtgccagttccccaggcacatagggaccgtggaggctgagccccaggcctggttctacttcctgctgactctccacttcctcccagggccccgtgactgcagccattgtcctgctctggccctgcccaccccagctgtttcgggcacatttgttctccagcccagactcccacctgctgtccctcttcaaggcaggtctagacgcctggttctccttggagagtgggcagcagagactgtcctgggtgggggaagtcgggggagggtccctcgagagtgcctgccctgccgtcgaaagcttttccaaacgtggggcacgaacctctctcgtcagccctgctcagctgcctccatcgcccaggtgttcctgattttgggagcctggactctgcccagtggattctgggcaggaagcatccagcaggaagcagatggaggtgtgagtcggctccccccgctcccctccacccctgggaagtgccgcctcagcaggcaggcttggcgcccgctccccctgacccgcctctgaagggtgggcaccatgcagagaagccggtccagacaggacctcaggagccgatgcagtcaggccctgagaacatccagcctcccgacagaccaaaaaaaggtgttctcagctctgggtgccgggctcccagactcagaggcacgggacctgggtttgatcttagccggccaacctcgggtgacccttcagagagtgtcctctcgggtccgtggcattcagcgaactcgccgaggcgaaagccgcagacatagattcctccccgtgagccgctaacctccctgctggcggaggctgctgcttcctcctaggaatccaaaggatcagctccagggttgtcccactttccgtgttttctgaaagcttcaagagaaggatgccacagaagggttgccagagaatttcttgagttagggctgaggctgcagatgaatgctgagcgggggtcacctttagggtgggctctgctggcctccctcaagcctgcggccaccgcagactcacagcagcccctcgtggccagccccgcccttgccgtggcctgggggcgtggacattggtggtgctgggcgagggtctaagccccagtgtagcctgtagctttgggctggggcagggagggatgggcacaccgtgttcacgccctcggaggcaagtgctgagctgccctggcttcaggaaagaccctagcgcggctggagacgcaagatgacccagacacacccgcctgacccactagacaggtgctgtcccctctcgaggctgccagggcgaacccacagccactgagcaaaagccctgagtttcccaaaggagggagagaagcagagacacgactggagctgcaggttcagcgtctgacccagaggtgtccttacaaagcccctaatctctcagacccccacgtcccccaccccgagggagagcgaggccttcgggagaactgcctctaggagctgctgggaacctaaggtttgagctgtagatgcctgaaaggagggcggggcgctgaggtgtgcctcagattctgcctgtggggcgtgggaattccggggagggacgtgagccccaaggcaggcgaggggtggtggaaaagcaggtgtgagccagtgggccccacgtcccctcttcagccagggcgcctgctctctctgcttctgcttttatccgacgaggtgggcagggagacgtcggcataaaatttcatttggaaaaaacggcaggggtgcgtcctcagcagaaaagaaatctcaccggagaccatgtgtctgttccgagctcctgatttgacagctgtggaaactgaacccagagaaaaacacagccgttgagtccacaggtccctggctcccagggctttgcttctggccaccatgagctcggagcttgggtggaagggaggtgttcgggaatccagaatgaagaaagagcagggaggctcggcgaccccatcccaccttcaggcctcagcccctcctgcctcaggctgcaatttatggctgtgctgggagacccggccacaccccctccttcccgggaggaggagcaggcaagcagcccaggggggctccagcggtagggacagcatactgaggggccacgccctgcccactctgtccctgggtgagttttgttctagataagcaagatgttcccaaaggctcaagtgcatttttcacccttttccatgaccaaatgtgctgtgagaatcgctagggtttgccagggacgggctgtcgggacacttctcctgcagcagacaagctcttgggctgtttcagcctctcctccgtacctagaaccaccgagcaccctggcgacaccagcctgacgtggccagagagaggctggaggtcaggcagagggaggctggagctgtgtgagaagcagcacgtactcgggactgccctatgagccggcacaggcctttggggagttgggaggacagcaggttaccttgggcaggcctaggtctgggccgtagagcaactgatttcatcctgactgccttcttccttacactgtgcccatcttcaaccttgagcccaccctggacccctctcccagccccacctggatggatgggtgggtgggtggatggatggatggatggatggaaggatgggtgggtgggtggatggatgggtggatggatggatggatgggtggatggatggaaggaaggaaggatggaaggaaggaaggatggaaggaaggaaagaaagaaacaaacatagctcctagggtctaatctgccattggctgctgggtgactcctgtccccaggctgaatgcaggctctgaacattgcaaatacccagaggtatccgatgggtggggagaaaaacctagagtgagtctcagtgtctcattctgggaagacatttggccttccagtccgcaggttttggttagggtcggtacaggaaatggtcagaacacacagtaagaatgcagtgaccacagagccaccgagttgggggacactcccgtccccactcccccacagctgtccccggaacgtgccatcctcccgcccaactcgcacgccctgtgtgggcgctgggcaccccgggctcccatgctcggcctgcttgtctctctctcatcctggagcctgcacctgtctttgggcaggagccactggcaggctctctgcagcccccaaagcctcgggtccgccctgctctcctccagcaccttcttgccccccagcctcgggtccgccctgctctcctccagcaccttcttgtcccccagctctggtcctctgatgcccagccggtgccctgatcctctggtgctgagagagggagtgttcttggcagacctgagccacatcccctcggtccccatcctcagctgggtgccaggctcctcctgggctctggactctctgggcggcctcttggggctctccccgccccaactggctcccaggctatccccactggggcgcctgtggccttggtctagctggctgctcagaaaccccctctcctggagtcatttgcgctagcggataggacgaggaatcggggttcaagtgtgggctgggggagaggagcgtcgttctggtgggaaaaaggaggtcactccaggaaagcggcagctgcatttctaggttctgaggcagaaccttcctcctggtgctcacaggctggaggatttgcctggaagccgtccccacccccagctgtcaccgaggcagccccactgcagcctttgcccctcccgctcgcacagggcaggatgtgaccttttttcctcgttgatgccgccactgaacaccttaacccgattttacctcagtcacagctgtgctgggtggcatgaccccctccctaggtgtaatgcggggtcccacccacgtctccccggggacagcccctctcactccccttgcagagagcctggggaggggctgagggaggatgggatggtccactaggaatgtttttaattccaaaggcagtgacatctgttcgtgggggccttaccaccaggctctgtttatccagccgggggagtcttgcaggtcgtctgaggagggctctggcaggtgtgggggatggaaggggtggggggagcaggtgtgggggatggaaggggtggggggagcaggtgtgggggatggaaggggtggggggagcaggtgggggtagaaagggtggggggagcaggtgtgggggatggaaggggtggggggagcaggtgtgggggatggaaggggtgggggaacaggtgtgggggatggaaggggtggggggagcaggtgtaggggatggaaggggtgggggagcaggtgtgggggatggaaggggtgggggagcaggtgtagggggtggaaggggtgggggggagcaggtttaggggatggaaggagtgagggaggaaggagagtggccccttcccaggtggttgggatagcctgagctgaacccagcagagatgaggaggggtccgtggtgggctgcagcgactagaattcagacttctgcttttgctggggacatctgtcttgcacagatcttcttccacccaagaccattgactccaggaagcaatgagtcgggcttgggggagagaaggcaagtctgcgctgtccccagaggaagcccccagtccatagggaggaagggaaagatgagcgtctcaggggaagactcccaactcggctacccatctgcgaaggcacttatgtcaccatggagaccagctggccatcgttcatccagtccgagcttgctttacctagacaagtattgagcctgtggtacctaagacagatgagtgccgggccttgggaacgggattcacacggcccccttctcccccacacccggcggcagggaggggcgtgcattctcgcagtctgcaccctgtggcctgggacccagcccgagggaaggggaccataggccagtgaggggccgattctgaagttaagtcacggcaccaggagcactgtggcgcaaacgtggagagcagttataatggcatcctaccagccagttacatgacagccattgcacgtttgctggagggaggtagagtaaagctgggacccagtgagggtggatggcctttccctacagccccgagggccccacgctgacccctctcctccaggaagccttccccagttgcctccagctggaaattgtatctctcgatgttcgtggcattttgtctgtcctgttctgaggccgtaatatgggattttgtgcgggttttgtccatctgggcgtggtgcctagtaggtgcacaagtgacccgtgccaaatgcacaaatgcttgtctgcctcctgttgatggacatctctgctttcttggctgcccctttgtcaagcactgacttttgattcgtctctgtgatgccttaacccccaccccagggtcgggcacgcagccaggccctcagtcactacctctagagtgacatgagtggggccaggtgcagtggttcatgcctgtaaacccagcactgtgggaggctgaggtcaggagtttgagaccagcctggccagcatggtgaaacctcgtctctgcgaaaaatacaaaaattagccgggcgtggtggtgggtgtgtgtagtcccatctactcaaggggctgaggcaggagagttgcttgagctggggaggcggaggctgcagtgagccaagattgcaccactgcactccagcctgggcaacagagcaagacactgcctcaaaaaaaaaaaaaaaaaaatgacatgagtgggaccaagcagtggggcctgaggagtgagcagagccttcctggaggagatggctttgtggctgtgtgaaggggctgtctgggtcctcctggagccctggaaggggcaggcgaaggaggggtggagaagggtgactgaggcctcagttaggggacacaggcatgttcctacctccgtccgtctctccacctccccctcaggcggtgctggtgaggctgttgtggctcagcccccacttagcagctcaggtttgaggaagttccgtgtgcaccgtccaggggtgcgtgtgacgtgtgagccaggaagaagtggagctggtctggccgcccctgcagggacagtgaagactgaggcccggttctagcccaggcaggacgccccaaggcccccctccaccagccaggtggaagatagtccagggccagatcctgccacactagggcatcacagtgagtgacaggggtgtgggctttggagttagccagacctccgtttgtgttccagcttgtcctggccttggacacgtagctcagcttgtcagagcccttcgtttcctcagaggtaaagcggggatgctggtactgacttcatacagttgggaggggtaagtgacttaatccatgatgcctggtccctgccagccttccacgaaggacagctctgactacggctgtctctgcagggaagccacctattcctcaaaaacaccaaggcctctgaggagaaatcccgacacctgcctggctggtgacgccggatgccgagggctcgtctctgggccccgacccacctgccttggggtcaaccaagaaatgtcctgacccagctctttttcctgaatccaaagcatcatccatgtttgagtaaggcacagtgcttgtgagcaccaagggctttggagggacctccccatcctcacttggcactgtgtaaccctggcaagaactggacctcctgaccccctgtcctcacctctctagaacagggcagtaacaccaacatgacaagaatgtgaggctcacatgcagtcgggcgtttgaaagacctggttcgcggttgccacggtgcaaatactggtttcctttctgtgccgtgctggggtctgcagaggtccgaggccccagacacccctgggttttgcatagttaaacatttgggattcagcctttctcttttctctgaataccgtactctaacttgcactgttaccttgagacgtaatttgtgtcctagtctctgcggttagaaagttcactaaataaattgaaggtcaagaacaagttcttctctctctcaaggcgcccagcacggacacgggtggttgcccgtggcgtcctctgcgcccagcacggacgcgggtggttgcccgtggcgtcctctgcgcccagcacggacgcgggtggttgcccgtggcgtcctctgcccctggcagcggaaaccttttttggtgaggtgcaaagggccatggttcaaagtgacccctcaagaggcatctctggctggacgtgtgacccgcgtcgtttcgggcttttgctcctgtccctgagcagatcagtgacccgattcccactgggattcccacactaggggtctcctttatccttacatttctcacctgaggaggcttctgagtgccggtccacaagggtctggccgggtcaccaagctggctctgaggaaggtgcctggggcagaagttgggggtggggaagtgcgaccccagggcagtcagagtcttttgcccggggaggagggcagctgtttgtggccaaaatgcagcccccgcctggcccccggcccctccgcttggcccctggagcagcccggtgggcaacacggggacccagcagggagggactggggtgtggggctggtgtaaactttattgcgagggagggcggcggggtcggggaggagcagcgcccttgccagggatgaaacccggggttggggcttggaggggcggccctgggcctgggaggcggcgctcagcctgggctgcagcctcgcggagggcggggaaggagggatgcggaggagggaggagggaggagggacgcggacggagggagggagggaggggagcgcggggagggagggagggagggaggcgagcgcggggaaagccggcgggactagggaactagcgggactggcagccgggactgagcgctccacaggcgccttctctccagcgccgcgtcccgtcccccccggcatgaccgacgtcctgccccagcccgactgcagcccgaaggcggggcgcgaacccctggcgctggaggagtcggggagcaagcgcccccccaacaccggcgcccggctctggggccgcgtgcgcaacaagctgctccgaaacaaggtgcccgcgggggctggaggttccggggggtgggggctcgggggcgctgcggggctcggggggctgcgggggctgcgggggctgatggggtcccgctcccgccccctccgtggagtcccgggacagagctggggtctgtgcgcgtccctctaagtggcttgaacttgatggcgaacgctggggccgcccccacccggaccctggcgctcgggcatctgcccctgcctcgggagaagggaggtttcttctcggcaggtggaccctgctttccactccgggagtgcaaacagcgcacggggagacgcctgcctctgggtctatgtcttgccgccctgttcagcctctacctgatccctgcatccagcgggccttgctggctgcccctttgctgaggggcgccgaccgcagcaccgtctgccgtgtgaggtttctctgtgcaggattgtggggaggggagatgctgccgggtctgggggctcgaggcttcccttcagggaccacccatctgactgtgggcccagtgcccgccgggcaccaggcgttccgtccatgtgccagggcagaccgccggtgcccctgcagccccagacctgagttgggattaaaatctgagatagaagccgactgtcctgcagctgggcaggctgcctcggggctggcttggggccctggcatcaggcacgtgaggaagagccagacccagcgcccagcgcacaggaagtgctcgataactctgcagatcaaatcaactgtccgagttagctgtctcagagtgccagtccggctggccagggctgggcccatccatcaagagagcaacaagggaggccttggccagtccgtggtggggatctgcagctcctcctgaggctcacaggacctctctgcaggctcttactgccagccggcattgaggctcctggcatcagccaggacgaagtgatcttgggctcactggcccctcgttttgtttcagctcctgccatggggcatacttgacctcccagaggtgacatcagccctggaaagtgctgggcagggcagcaacttgagctgtactgcactggcccctgtgtcaccttcagcctccctggggactgggctagcagagccctgctggccccagctgctgccagagcccctctgtgctgaggcagctgtctgtgcccggcagcgtggactcatcccctccccagcccctgctgaggccagcaggcaccagcccagagctcaccatccatccccaaacgtcagggttggcaagaaactgacctggcaggttccgggtccagcgccagccaaacagggcgcttccagtttacctgcccctttgaggaggtgcctggtgggcagggggcaacttttaaacctgaggtcccagactttcagttctttccctatgcatttgtggccggcagaactgagaagccccttcaagaattccttagctgggtttgcctctggcagtgcctggtggctccgtgtctgatggggatctctgggcaggggtggtggccaggcagacgccgggctattgagctgctgagcagttggcgtcagtgcagctcagggtggccccggccctgggctgctctgtgtgacgagcgattccatcccctaacgtgtgctgtgtgccacagtgtgtccgtgtcgtggacgcaggggtcagcgctgtggcggacggagggacgtctgccacagtgtgtccgtgtcgtggacgcaggggtcagcgctgtggtggacggagggacgtctgccacagtgtgtccgtgtcgtggacacgggtcagcgctgtggtggacggagggacgtctgccctgtgcttcccacctcactgtgcgcaggccagcgggtgagcagcagagtcaaagggccaggcctcttgctttctatcctcagccacattaacctggcattttcctgcaggagcttcacagttgggccgaggggctgggactaggcagtttcgtttcggtggggtaagggaagggtgcctggtactgcccagactggcaggagggattgcctcattaactcctcgttaactttgccctgagtgatgctgtgggtgcgagaaacaccggtggccctcctgcttccactgacctgaaggttcattaaaggctggaggcggggcgtgactcatccagggctgggattaaacaatctgttcagatggaaaggtctcatgatcagaactgagcctttaaatagtgcagggcctctggtttctgggggagaggaggcagggacactcacggaggatcctttgggtaccagcgggggtccctgtggttgggctgttcttgtcaccggaggagagttcaggggccaaagcctcattccagcccctgacttggcagtcagctttttgtgcgagtgtttagctgggagacacgtggcatctgggtttgtgggttcagccagggctctcggtattgaacttcgcgtttctacttttctttccttttccctgtttgtttttttttttttttgcctcaaatcacactcaagtagaccaggcccggtgccttcctctccctcccatccttccctcttctagattcttggttgagctttggatgggaaggggctgaattctagattctcgcttgagctttggaggggaaggggctgaaggaggaacccccccaccctgcccccgcagcatccccttgtgggagccgtgaggaggctaagagggcctgaagggaggccggtccagaagcatttgtctgtcggggaagttgaggcccttatagagcaaccaagtccaagacgctcctgacccagaccaggccagatgctggccggcggtggggactcaggctgagccggcagggtgtaaggagattgagtgcagcttcaggtgaccttgtctctgccctgaagcacagccatgtgggtctgagaatcccctacttccaaagagctcctcttaagctggacaccggcactgctgacccccacggtgagtcccgtgttctgtgatgggagctgctgcctttgcttcagagaggatcagaggtgttacctgaggaagggcggggtggagagcccctcttgggccattcggggaagcttcaggctcatgatggtcttagaagaaggtccctttcttggatcacctgatgtcaggagtccaagaccagcctggccaacatggagaagccccgtctcaactaacaatgcaaaaattagccaagtgtggtggctcacgcctgtcatcccagcactttgggaggcagaggcgggtggatcacctgaggtcaggcgttcgagaccagcctggccaacatggtgaaaccccgtgtctactaaaaatacaaaaaaaaaaaaaatagccgggcatggtggcgggcacctgtaatcccagctgctagggaggctgaggcaggagcatcgcttgaacctgggaggtggaggttgcagtgagccgagatcatgccactgcactccagcctgggcaacagagcgagactcggtcttggggtggggggaggaaagggtccctttctttgtcagcttgatcgccaccgcaggacaaccccacccctcacagagcctgtcgtttattccttcttgatggtaccaggtgtgcagaccacgtgcacaccccagaggttcactctaccactcacttggccatcgagggtacacaggtgctgggtacaagatacagatatgtcttgggctcgtctactttattttataatccagtctgggcgtcaggaaagatctcgcagccttctgcaatagaagtctggcctggcccggctgcccaccgcccttccttgtttcccggtgggaagaaagcttcatcgtgcgtcttctctgttcacacacacccccatagcgacccctcagccacagacaggggactacagtgctgcctcccccgagagctggaggcccctacaccagcccacctcttcctgggcctatgtgtgggtcctgactgcggccaggctggctgacaggttggcagtggggtcgggcgaccctccctcttttccacagcacttacccacctgccgagtgggcagacctcactgctggggcctcatgagtactctctgatctctctgccaggccagctcccaagaggcttgcttgagtccgcagagcgggaaccctggactctgagaatctgatgaaggttctggaggccactcagacacagagccaccccatgcacacactgtgtgcgacttcagagggggctgcagacatcaaggcgggaaccctgctctgagtgaacttggcaaggtgccgcttcttggtacctagggagggtagaagggcgctggtcctccccggcctccctgcaggccacagacggcttggccagccagcggtgctgggcgcggtgccccagcttttggatggctctggaccagggagaggagaacctgccaatcaagggggttcctcaaaggccaaagctgcctgagcccagtgttgctgtagtacccagaggcaatgaggccccagacattttggaaggagcccccaagcctgcaggtgtggctgggggagctgccccaggcattttggaaggagcccccaagcctgcaggtgtgagtctgggggagctgccccaggcattttggaaggagcccccaagcctgcaggtgtgagtctgggggagctgccccaggcattttggaagcgcccccaagcctgcaggtgtgagtctgggggagctgccaggtgttggccacagggcgctggtgctggagaggcctggccctctgctgagtggcctcgctcactgcccaggtggttgggaactggtcagcaggtgctgttctttgacctcgtttcccctgtgaactcatgctggggcaggaagatgtttgtgtcctgacggccccccagcaccttcgaggaacagacagtcccctgcgcctgtgacctgcctgccccaccctggggagaaacgcagcgtcagtcctgggtccagtgagccgtagacccttggccctccaggatgggccctggagaggcgggaggggcccgtggagctggtcctgggcttctgtagagaggccaggaggccccaggatccccacagagacttccccagtcccgcttcaagacagcggaaccagctcctgagccgaaatctggagggatctcctttctggaccgtgaccccagccggggctggtaccgatgaccggcacagccagagccgtgacatccacagcgcccttcccatccgatgcctggatgccgtggctgtgctcggggaggcctccggggtccccagcccctcaggctcatgtggcacaaggtgccagagaagacagggcgccaggccggtgggagtcaaggtttcccatttttctcgtctcagtctgctacttaactgctgtgtgcccgcgagtacatccctttgcctctctggttctctggtatcagctcaatgaaggagctgaacaggatgatctcctggaatccagttcatgtgatgatcttggccatgtctcaagattcctagtcctaaaccttaaaccctgagcaccctgggagagtctgtcacagggctgcacctgggccaatgccagccattcagtggacacgggagcagggggtttagtgggaacacagggcttcttgagccctgtcctgaagcagccccggcggggagccattgtcacctccttcccccatgccccagttggttcctctggcctgtgagtattgccggagcaccttccacgtgccaggcctgcaggaactagggacacagaggcgcccgagacagacgagaccctgtctgcaggaggagtccgtcaacaaatgagatccttgccggtcagatgagtgctgtgaaaaaaataaacacaactgggtaacgcagtagagagtgacggggggatgcctggcttgagaggatcacttttgaacgaagatttaaatgacaagaagaattcagccataaaaaacctgggggcagtgcattccaggccaaagaaccggcaaggtccacaccccgaggcaggtgtgctcagaggcagagggggacagtgtggggcgttacgtggggtcaggggacggcggccaggcgacgtggggccctgcggttcaggacagggcctttaatccgaatgcagtgggaagccgcggggtgttcaagcacagttctgtgacgatatgttttgaacacgtactgtacgaggcatcattcttagcctgtgacgcaactgaggtgacacttacaaggtgctgttattcacactgtttatttatttatttgtttgggttcttttgtttttgtttgctgttgttgttttgagacagagtcttgctgtgtcgcccaggctggagtgcaatggcgcgatctcggctcgctgcagcctccgcctcccgggttcaagcgattctcctgcctcagcctcctgagtagctgggattacaggtgcccgccaccacgcccggccaagttttgtatttttttttttttttttttgagacggagtctcgctgtcgcccaggctggagtgcagtggcgcaatcttggctcactgcaggctccgccccctggggttcacgccattctcctgcctcagcctcccgagtagctgggactacaggcgcccgccacctcgcccagctaattttttgtatttttagtagagacggggtttcaccgtgttagccaggctggtcttgaactcctgacctcaggtgatccacccgcctcagcttcccaaagtgctgagattacaggcgtgagtcactgcgccaggcctaaatgtgttttgaattttgttttacatttttaattttttttttttttttttttgtgggagtctcactctctcgcccaggctggagtgcagtggcaccatctcggctcactgcagcctccatctcccaggctcaagcaatcctcccacctcagcctcccaagtagctgggtctacaggcatgtaccaacatgcctggctaatttttgtattttttgtaaagacgaggtttcgttatgttgcgcaggctgatgttgaacttctggcttcagtggatccacctgcctccgcctcccacagtgctggattacaggcgggagcccccgtgcctggcccagactgtttttatatatgaggaatgaggctcagagagtgactcagatgaagtcacgtgagtggcttagccgaggggcgacgttcagaccccggccactcagcctcagcgcaggctctcacccgcggtgtcctgccttccgtggccggttggggttgggctgcgtgccccagatgggagcgtctggagacgccgggctcctgcccgtcaggcatcagtgtggtgcccgtcctggcacgctgtgcatagcaacaggcaagacggttcttctcgacgacgccactgaacgtgagactcggagcaaggcaaggcctgggaggggccgctcagagctgacctgggccctggaattgctggagcccctcacgtccccggcagcaagctccatgcccagaaagtgttctgggcccgggcagggagggtgaagctggtatcagagaaggctgttgatgctgctttttttttttttttttttttttttgagatggagtctcgctctgtcgcccaggctggagtacaatggcacaatctcggctcaccgcaacctccgcctcctgggttcaagcggttctcctgcctcagccccctgagtagctgggtttacaggcatgtgccaccacgccggggtaatttttgtatttttagtagagacagggtttctccatgttggccaggctggtctcgaactcctgacctcaggtgatcctcccacctaggcctcccacagtgctgggattacaggtgtgaaccaccgcgcccagccctgttaatgtttcttaaccactccaggtccagctcgaggcttcagagcccatggaggtctgacaggtccttggccttcccgtggcctccagcgtgaagcttcctggtcaggaccacagaaggcctctcatcttggactttgacctctgagggcgcccctttcctttcaggacagggcctccgtgttgctttggccctggcctgttccttttctcaagagggccccactgcccctgcccttgccactctggcatcctcgacctgccctgggctggggcagggccggcttcctggctggtatttgtagcccagttctgagctgaagctgaagcctccaggctgcctgcacagggaggcagtggtggggtgggctggccctgaggaagacggagccctaggccgctgggggagatgtgcctggctgtggggcctccaagagcagcccaggtttggattttgtctgcttctcctcaaggtcagccatgcccagcccgggggctaaaagcaaagtgggtgccagggcaggcagaggctctggagtggacgtggggccggcagaggcgctggagtggacgtggggccggcagaggcgctggagtggacgtggggccggcagaggcgctgtagtggacgtggggccggcagaggctctgcagtggacgtggggccggcagaggcgctggagcggacgtggggcaggcagaggctctgcagtggacgtggggccggcagaggctctggagcggacgtggggcaggcagaggtgctagaatggacgctggggaaggcaggttgctgcgggtgctaagaggctagcctgccttggacaaaagcgtcgttcagagctgctaatccccttcctcccatgaggcttggggaacttcgaagttctctggtgttggaggggaagccagccgaggccctgggacacggcatcagcccgagcctatctgtggctggcctgggtatggcaggtgggcacaccttggctgcaggacaccttggctacaagggagcctggctgaccctgcagggtgagggctggagaggcggagcctgcctggcctagcagtgtggatgccaagccatgggaagatgtgtggagagtttatggagcctggcccggtgtccccaacccagctgctgagctggaagccaggggtaggtcctggcagcccctccctctctgccctgcctctctcggagtcgctcggagcagtcacgttgacggaatcctccggcgcctcctcgagggaggagaggcagggtcttggcaactcccgtctcccccgttgccagcttgccagccccgccgtgcctctcacgcctgtggtctgccccaatgacaggccggcttcggtgtcccaaggggacccagccctgagcgtggggctgcccttgggggagggcaggggaaagccagcccgggctgccaccgtggccgctggcctgggagccccaggaaacgtgcccaccctcagacccgatgcctggctcagggcctgggctccgcggcccctccagggcaggcgtgaaatgtgcccacacagctccaccttccacgtggttccctgtccgggggccacttgcactgaggtccttctggagtcattttctgtttttttttttttttttttgagacagagtcttgctctgttgcccaggctggagtgcagtggtgctatcttggctcactgcaacccctgcctcccgggttcaagtgatttccggctaattttgtatttttagtagagatggggtttcgtcaggttggccaggctggtctcgaactcctgagctcgagtgatccgcccgcctctgcctcccagagtgctgggattacaggcatgagccaccgcgcccggctgggagtcattttctagcgttcctgtcccacctctcaggaacagatttaccacctttgttgtgaagaagcattttttttttttttctgccgccaggctggagtgcagtggcacaatctcaactccggctcactgcaacctccgcctcccgggttcaagcgattctcctgcctcagcctccccagtagctgggattacaggcacccgccaccacgcctggctaatttttgtatttttagtagagacggggtttcgccacgttggtcaggttggtctcgatctcctgaccttgtgatccgcccgcctcggcctcccaaagtgctgggatgacaggcgtgagccaccgcacctggctgaagaagcacttttttttatgaacctctgcaaccccctctgagggaaaccctcccgcattctgggatgccggggctcagagggtggagggtagaagagcgccagccgtgagaggcaggatggggcggcccccgagggcagggctgtgcctggaggcagggctcctcggggggtcagctcctgggcggtgggagtgaccgagtgggctcctgagggaagcggctttcaggaaggaggcggaggcctgggagctcttggggccctggcaaatgtggtcttcagattcccgtcgtccagtgagcccctggatcacgtcctgagtggcgtccactgaaggctgcttgggacctctgctcccccctccactgagacccccagtggccagttctaagtcccacctgccttgggcagggccaccacaggccccttactgtggattaaagggccctgggtgagggcttgtgggaggggaggtggtggaaaccatctccgaagaccttggggcgagctgcgtgctggagtggagagtgtggcccagcaggcaggagcactgggttggaatgggggctctgccacctccgagggagcaggagtggagaccggagggagcgtgcccctgaatccgagcacggggagctggccgggagcagccctccgggcagaggcaggagaaatggggtcacctgccccagggggtgagaggtgagccgagaggaagggctgagaccctcaggggcatccccaggatgttcctgaaactcagccctggaggacgctcaggtgtgcgtggagcaccctctgccctggagcctcaaatcctctccccgctgcggggccactttgctgattcctgccccaaacatgaggtcacttcggtccagaaaggcgaggcgacctccaccagccacctacgggattcttggcagagaatccacgctcaccttcgggtcttcactcctgctccctcggaggtgacggagccccatttcaacccggtgcccctgcctgctgggttttcgccgcaggggacctggtcgtctcctggacatgagcccccagcgccagcgtttctctttgggagaggcctgaatgcgcagtcatgatttgaccaggcgaagtgcccagacaaagagaaaacagtcggccggatgcaggggctcacgcctggaatcccagcactttgggaggccgaggcgggtggatcacctgaggtcaggagttggagaccagcctggccaacacggtgaaaccccgtctctactaaaaatacaaaaattagccgggcgtggtggctcgtgcctgtagccccagctactcgggaggctgaggcaggagaatcgctcgaacccgaaggtggaggttgcagtgagctgagatcgcgccactgcactccagcctgggcgacagagtgcgactccgtctcaaaaaaaaaaaagaaggaaatagttgagctgctctcagtgaccatgtacggcccagtcgtcgacccctggcccagtcgttcgtccgccttttggctccacgatgttttgcagcctgtttctgtctcctgcctgtggcccaccttggggaggccccagtgctcgtgtgcccctggtggtcttcccagcctgacccttcacgagctccctctgtctccctgcttcaggtgatcagacatcccccaagtacctgctcccctgggcccatggaaggcacctgtctgctgggaccagagggtgagcagtcaggtgtcccatccaccaacgtcccaggggccagcccctccaccccggtgctaatctcatcaggaaatagcacagtccacatttcccaggagttataaatagccagcgcagttgcgggcagcagcgtttctctggaaaatgtacgctgtgcctctccctccctcctctgtgtttaaatgatatcctgaaatagacttggtttctggaggctgatagcctcctgggaaacagagcgtcgttgtcagggcaccgtggggccaggcaggcctctctgagcggataccagggccacacctgcagcaggcaccagggccacacctgcagcagataccagggccacacctgcagcaggcaccaggaagatgtcagggcttgaggggcttacagcttaggaaagtgcccctggcccaggcctggcctcagaaggggctggagtgtgtgagacagcagcaagtgtcgcctgggaggctgcagagggtagatcttagtggagcaggaaggcagagaggacccaaagtttcccactgtgacctggggctctccgagaaggctctctggaggaggcggggcgagaactgggccttagcatcaggaggtgcagtcctgggtcagatgtgcccaggttgaacctggcagctggagcggaagtgatgggcacgaggcagcgggagggctgtactgggggtggcctcccagcaccaggtctgcccaccgggtcgggacacacaccaggaggcccgatgttgcctttctgaggaagcagcagttacagcagctgcgggtcatggacttcacacattctgcagtttcagcagagagggtgctgggggccttgattttgaaccccagctctgacttcctaggtgtgcactgggtaaattcctcactctcgttaagctgcagcatcctcatctgtgagatgggagcggctatgagagcttaaaccgcatatgtctgctatcatgatcatgaacgcagatgctgtgtgtagaggattcatcagtgtcagacttgcaggaagagctcgagataagtccgttgctctcactcttccataacagccctgtgagtcaggtgtggatgcctccatgaggaaattgaagttcacggaggtgaaaggccttgcccgagtgcgcacggttgaatgggagactcagatcagcctgcctccaaatcctgcacactccccccgaccaggttgtgtccaggtccccctgagacttgggaagggaccattggctcagcttcctgcagaagctgccaggaggcacccagtcgtgggaagctggggcggaggaggggctgtgggtgaatcggaccaggggccatggaattggcctgaggcttatgctgatgtgtggagagacctgcctcaagaaggggtggtctcaaaacatcgaactgcgccccataaatacatacaactgcaatgtgtcaattaaaaaataagggcccgggccaggcgtggtggctcacgcccgtaatcccagcactttgggaggccgaggtgggcgaatcacgaggtcaggagatcaagaccatcctggctaacacggtgaaaccccgtctctactaaaaatacaaaaaattagccgggggtggtggcgggcgcctgtagtcccagctactcaggaggctgaggcaggagaatggcgtgaacccgggaggcggagcttgcagtgagccaggatcgcgccacagcactccagcctgggcgacagagcaagactccgtctcaaaaataaataaataaataaaaaataagggcccacacagtggtacatgcctgtaatgccagctcttcaggaggctgaggcaggaggatcactgaagcccagggcaacatagcagcctggacggcacagtgagaccctgtctctagaaaaataaatacaggccgagtgcggtggctcacgcctgtcatcccagcactttgggaggccaaggtgggcggaccacctgaggtctggagttcaagaccagcctgggcaacatggtgaaaccccatctctactaaaaataaaaaaattggccaggcatggtggctcacacttgtaatcccagcactttgggaggccaaggtgggtgggtcatttgaggtcaggagttcgagaccagcctggccaacatggtgaaaccctgtctctactaaaaatacaaaaattagccgggtgtgatggtgcgcacctgtagtcccagctaattgggaggctgaggcagaagaatcggttgaacctgggagacgggttgcagtcagccgagatcacaccactgcactccagcctgggcaacaagagtgaaactctgtctcaaaaaaaaaaaaaaaaaaaaaagagggcatggccgctccagaatgtttcttccaagggtagcatctcagttgacaaagagcatttgattcctccaccctgtgtggctactgctgggggacagagctggggacagacccaggcccggctccgtgtccagacgagatgaaggaactacgagggacagcctgtgtgatccaggagggtttgcaaagaacagaagcagcttagaggggagagaggtttcgggaaagtaaggccagagctggggcttcctttgagaccctgtaggacccctgcctccagccgggctggtgatggcctcacgcttcccgtgtgtgaagaggtgcccggagcagtggttctccctgaggggcacttggttctctgcacacacccaacttctgtctcctgttctgggttccatcccttctctgggcagggcgaacccagtgcagacccagaccccgtcggaggcttgggtaccacctgcccccagccggtgtgtgggtgatagatgtgggaaggacctacatcgagctgcaggaagcccaaggctgacccagatccagtttcccttccgtgatgacagtggcctgttatagcaactgcgttcaaaccgtggcacgcacacctcagagtgcacagagacgttctgagggcgacgtgggcaggagagttttcaggaaatcagtttgcagattctcagctgccataggtgctattgccagaaagccatctgcctgagagccagcatctcgccatcctgtcctctgcagaggagaggcctgaggctggctgtcggggcttggcccggggtgcgcagacctcctgggtggggaacagaggggcttttagaaatgttggggtaggggccaggcatggtgggtcacacctgtaatcccagcactttgggaggccgaggcaggtggatcgcctgaggtcaggagctcgagaccagcctggccaacatggtgaaaccccatctccactacaaataaaaaattagctgggcgtggtggcaggcacctgtaatcccagctactcgggaggctgaggcaggagaatcacttgaacccgggaggtggagcttgcagtgagccgagactgcaccactgcactccagcctgggcgacagagcgagactccgtctcaaaaaaaaaaaaaaaaagaaacgttggggtcagtgttcagaaagtaaaagactctagtggccacttagaacctttcaaaagtcaggtggtatccagttctttgccttccacaaaactgatggaggactcaattttcaactgagagatcatttcaagtaattttcagtaataggtatatatgcgatttaaggcggatagcatggagagaggttaaagaatggtgtaacgcggctgtgataaaactcttttcgacctcatctacttctttatgtgaacaaaatgtttcattgttcacatatttcttgttcattttagagacatggtcctacattgcccaggctggtctcgaactcctgggctcaagtggtcctgtggctgggagccacagcacctgcacatctttacaacaaaaccagaaacatgaaccaaattgatgctgagcctcgtttcactctagcaaaaaataataccctatagatacgcgaactaaagcaaaaaatgttccgcccatctcattgagagagcattccaccaaaaagttactctgctacttaatatttattaaaatgtataatgaggccaggcgcggtggctcacgcctgtaatcccagcactttgggagaccgaggcgggtggatcacctgaggtcgggagttcgagatcagcctgaccaacatggagaaaccccatctctactaaaaatacaaaaaattagccgggtgtggttgtgtgtgtctgtaattccagctactcgggaggctgaggcaggagaatcgcttgaacccaggaggcggaggttgctgtgagccaagatcgcaccattgcactccggcctggacaataagagcgaaactctgtctcaaaaaaataaataaaatgtatataatgtgtcggcttactttttttttttttttcttgagacagggtctcactctgtcgccaggctggagtgcagtggtgtgatcttggctcaatgcaacctccacctcctgggttcaagcgattcttccatctcagcctcccaagtagtagcttggactacagtgcccgccaccacacccggctcacttttgtatttttagtagagacagggttttgtcatgttggccaggctggtctcgaattcctgacctcaggtgatccaccagcctcagcctcccaaagtgctgggattacaggcgtgagccaccgtgcctggctgtctttttaattatgtactgccaatcatggtactaactaatcctgaatatattttgaatatttggagccttgtggtctctggaaatttttgttttcaatgtatacagattttttttgtggaagcaaaatgtaatggtgaataaaggacttgaaaatataaaaatataaactaggacaacattctttaggagaaatggaatagaaacaaattcaaggagagaagatccaggagctctgtgagggaaagaagagcttgtttgtgtagttttttgttgttgttgttttttttgagacggagtctcactctgtcgcccaggctggagtgcagtggtgtgatctccgctcactgcaacctccacctactgggttcatgccattctcctgcctcagcctccccagcagctgggactacaggcgcccaccaccgcgcccggctaattttttgtatttttttttttttagtagagacggggtttcaccgtgttagccaggatggtctcgatctcctgacctcgtgatccgcctccctcggcctcccaaagtgctgggattacaggcatgagccaccgtgcctggcctgttttcttaatattgaattttgagagttttatataataagccctgaaattgggtaatattagccctatagctgtgttctttttcaacattgtttagatgttttttctttttttttgagacggagtctcgctctgtcgcccaggctggagtgcagtggcgcgatctcggctcactgcaagctctgcctcccgggttcacgctattctcctgcctcagcctcccaagtagctgggactacaggcgcccgccaccacgcccggctaattttttgtatttttagtagagacggggtttcaccgtgttagccaggatggtctcgatctcctgagctcgtgatctgcctgccttggcctctcaaagtgctgggattacaggcgtgagccgccacgcctggcctcgtgtagtttttaaatggatgagtgtgggtatcacgtcgctggggtatttagatcccactgaatccatgagaaggaatgatgtcacacttttattttaggatggcaatattgacatgattttggaaatcatactctttgcaactatttaaacttggaaatgttcagattttgacttcagaaagtgccagggagcgcacagttgctcagaattagttcgcaggtgcacaggcagacgggcgcgaaggcccccgagttacagaaacagaacgtggaacagtcctgtgtgagggttgcctctgacctcccctggggtccgcacctccctgggctccagcccgagcctggggacttcccctgtggaggatttgcttatttgggagccaatggcttgacccaagttttctccctgaatcttcccagcaatcccagggaggcaggttctgttgcagatggaataactgaggcttagtgagtttaaaacttgccaggattcaaacccaggcagcctcctgtgcgcgggctcctgactcttcaacacctccacgtggatgggctggttccctcctgatggacttgagcgcctcctaatcaggtgcttaccttttgtgagcctcagtttctgcatctgtgaaatggggtaataatacccatgtcccgggctggcagccaggagtgcctaacagggtgtgccctgcctcccccacggtgggtaacagagtgtgccctgcctcccccacggcgggtaacagggtgtgccctgcctcccccacggcgggtaacagggtgtgccctgcctcccccacggcggccacaggggcctgggggctagggtccccccaaagggttgatttccaggtaaacatcagcttatcccagctgctcacttccgccttcctgactgtgtagctggctctgagcagtgctgacccacggggagatctctggcttggcctccgagctggcacctctctcacccacattctctctctgcagctggacccacaaaccgtggagaccaagaactggcacacggacgtgattgagatgaacggggtgagccggggatgggaatgatcagtggcgtgagccgggaggtggaacgtctgtgcagcaggtgggcagcccggccctgtggctgctcctggggccgctgtgccgcctcgacctccccgcagcccagccccctctcccctcctgcccacaccctgcccgctgctgtcctgcaggtgttgtgttgagggagacctgggtgtgagctagccctcatttgcagtcttggggaggggacccctgtgttttgggggcattcctcgggcactcacaccctggggaatctttacctgcctcaccccccaaccagatcaaagtggaattttccatgaaattcaccagccgagatatgagcctgaagaggaccccgtccaaaaagcagaccggcgtcttcggtgtgaagatcagcgtggtgacgaagtaggtgctgcctcgggtctcccagtcctggcgtcggtgccccgggtcccccccagcccgggccccccagccctccccgccggtgcccatcctggcacctaatcagttaccccccgctcggcggtggcagatggccggtgtggatctagagtggccgcagaggcgctcacaggacacttcagaagcacgcgagccagcacctaaacgctggaaggtctcttgtgagatcccagatcgtctgctcctcgtaacaagcgggaagctctgtcagccgggggcctacgtttgggctcggcaccaacggggactggcggcccctcgggaaagggcacgtgtcccccggttcaccaccaccctggccccttgtctcaggcctgacccacctcctcatgtgggctgcctgctgggcctcctacaagcatctgaatctgggggacgttctttccctagagtctcggccttaccttcccaagttcccaaggcttctcctgcccacgtccgtcgatgccccttcggcaggcctcgggtgggctggctggggtggggtgcggtggcctctttctctgccctgcccctgcccccgccccagctctccatcccaaatgctagaagctctccagggtgtgtgtgtgctgggtgggggttgctacgggagagctgtcgtgggggctgccctccacccatcctcacgctccaccccaggcgggagcgctccaaggtgccctacatcgtccggcagtgtgtggaggaggtggagaagaggggtatcgaggaggttggcatctacaggatatcgggcgtggccacggacatccaggcgctcaaggccgtcttcgatgccagtgagtctgggaggcccagccggggcaggtgtggctgtgtctgagcaggctggtgggatggacaggagagctcgggggaaccaggagcctccctggagaggaggcttgctctgcttcagagtccccgtggcaagtgctttctcttgtaatcccctcccctccaatctcttgtcccttgctgcaggtaagcaactgcagaaactcacaagggccgactcacttgcccaggatgacccaacttgtaggttttggttctggacttaaaactcagatctgactccagtgtctttcttgctagttcctgggtgcctggtgagccgcagggaaagagctttgagcctgcacctgctgtctccagggccccaggtcccctctggggcagtgctgcctctgcgtgaagcccaccatggtgaggcctgacctttctggtttctcctccctgctcctgctggttcaggtgcagcagccacataccccactgtcaagaaacctgcactggccaggcagggatgaatccgtggggagcctggagtggaggacggggtggggcctgggaactggccggcgttggtgcctctgtgcagcctagaagctgaggctttgtcggaacatgcttttacgtgtgaaaagtgtgcaatgccttccagagaggggcttagcgatggagaggttccagtcggaaggaagctgcaggccacatggtatgaatgtggctctgaactctgggtgatggatttcactccccaaacaccctttcccaagcagccacagcagatggcccccaggctatctctccctgttcccccaaccccgacccacagagccgagtcacagacacctgtgggccctctctacatcctgctcttccaggggagaccagaaccagagctggagtgggtgggggctgtgtcaggatgggtcgggggtggaacggggctgctggcccagctaaggctgcctgacctcggccccacccctgcagataacaaggacatcctgctgatgctgagtgacatggacatcaacgccatcgccgggacgctcaagctgtacttccgggaactgcccgagccgctcctcacggaccgactctacccagccttcatggagggcatcggtgaggccctgagggctcctaggactgggctgggccagactgagccaggactccctgcccggagaagtaaccagcaggagaaatatctgtggcttcctttgctggctgaccttcccagtgcactggggcctgtggctgaggggtccgagggtgaggtgtggcctgctgggacctggtgcagacactgggccctttctcgcctgcctcttgcccctgatgtccccatgggcagccccttctgcttcctatttggacgttggcctcttgcttggaagctcgagcatccagggaagactgccctgaggtgagtggccagaagccagcatcccagaaccaaggaggaggctggcttaagccatagggcactcgagatgggttgtgctgagccttccagcgggaccacacaccgtcccgtcacctctgcggagggccccggccagcaggccttccgcctccacccacctgggccaaacccagccccaaggaatcccttcagccttctctgctcctggggcagactggagcttcagcccccacggaaggctgcttgcacccacgctccagcagcagaaggggtggagaaagagaatccaccgctggcaggatatgtccctactggcttaaccttagccacacagaccagggggtgtcctgttacgagacaggggatgccccagcacccaaggcctatgcagtcagctgcaggaagggggtctgctcccaccagccggcctcctggctgagttaccagtcgtggtggggcctcctggaggaagcagctgctgacagcccacccagacaccaggccctcccctgtggggtctgctccccaaaggcctggaagcctgggctctctcccgcaggggcccacagcctcacgaccacaggggccctggcggggagccccaggagccaaacgccacactggcccttctctcccacagccctgtcagaccctgctgccaaggaaaactgcatgatgcacctgctccgctccctgcccgaccccaacctcatcaccttcctcttcctgctggaacacttgaaaaggtaacggggagcggccccaaccccacctcctcagtccctcctcatgaaaaggtaacggggaggggccccaaccccacctcctcagtccctcctcgtgaaaaggtaacggggagtggccccaaccccacctcctcagtccctcctcgtgggcgctggcctccatcgggctgtctgtggggagtgagagtttgctttccaagttcttgcactcatgtttttctgttttgagaaatatttgggtcccgtaaccagtagtaacctcaaatattgaccatagaatgctcagaatggcagggtgagagcccaggactacaggcaggttttataatcagtgggtcccaacctactggtggttcattcaacgaatgtagccatttctagatgcagtggggggtggacagcagtggggggtggacagcagtggggggtggacagcagtggggaatggacagtagtggggatggacagcagtgggggaatggacagcagtggggatggacagcagtgggggacagacagcaggaggatacattgtaagccttgatgcaggtgctgcttttcagttacatagagacgtgtggactgtgttacagcatgggttgtattgtgggccacagtcaaaaaaggtgaaacccactggtcttggcccacacctcactagacatagggaaactgagtccccacaccaggcggagacttgcttgggttagtagcagacctgtccttagagccctcaacttccagatcctaaattcagacccttcttgccttcccaccaccctttctagtcaggtccaaccaagagtggctaaagttggttgtacttgtagcaaagttcagaggtcctcaggcttgcgtggggaggtggtccctgggcgtcccttaaacccacctgcacgccaggaccggggagccccctcagactgctctgcggaacaattcttccctgagctcagccccagctcagggccaggccccccgctgcagctcagccacgccaggctcgggagagccagtggagacctggacgcgcccggggctggtgtcttgtttttcccatcatgaaacatttttcctctggtttggccaggactagagccccaaccaattccgaaagcatttggcaagccttgtggggaggagtgggaagggaaaattcattcggcttccaccctgggaactgggcacagtctgttcccacatctgggcccctggctggaccgtgtgcgcgcgtgtggtgaggggctggccccgctgcacagctgcctgttggcatcacagtgtttgtttgcctgtttccaaagcaggcgcagccacagctcctgcctggagggtgggaatgatggtattgagggtgagaggcgctgcttagggtgggtgggtctcagcccagaaacattttttgagactgaaggagaaccagaggccctctgatatgtttgctgaccctgggcctgcctggacaccagccctgatggcagctcctgctgttaccccagggaagcatcgcagagcatctggcctgttgagtaagagaagcaggagaggatccagagggaggacaatcctgggtcccacgaggcagacggagaggcataggaggcagccctgggtcccatgaggcagacccttccggagaggcacaagaggaagccctgggtcccacgaggccgacctttccggacaggcacggggggacagtccccgggctcatctggaagtagggctgctcctgccccagcacagctggcagagccccgggtctagctagtgactcctgctgggctccaggccctgcctgcctttctcccctgccccacccaccttaactcttcttttgggccacttagcacatgagaaagcaacagagcggtaggtcctggaggcagctaccggggttcaaatcccagctctaccagttgctggctgtgtgaccttgggcaagtcacttaacccctctgtacttcggtttcttcatctacacgatgggggtgacgataatcatatttacctcaaaggactgcggcgagtgtgagttgttccagggagttttcagaacagtatctgctctcaggcaagggagctggagttggcatctgtgggctccctggctctggcagttcaccatcagttcagggggacccagcagctggagatgttagcacagaacactggcacatggctggggccctgctctcctggatgagtccccttcccccgggggaggtccccactcctaggagacagagacgaggtgaccccttccaggagtccttcaggagttcccacagcgaaggccaagggtcctggagctccgagtggctgctgaggaagggcttctttcctccccatcttctccttcttagggttgccgagaaggagcccatcaacaaaatgtcacttcacaacctggctaccgtgtttggacccacgttactgagaccctcagaagtggagagcaaagcacacctcacctcggctgcggacatctggtcccatgacgtcatggcgcaggtaccctggcaccgcccgggcccgtggctggcggagggtgacggtcccatgacgtcatggcgcaggtaccctggcaccgcccgggcccgtggctggcggagggtgacggtcccatgacgtcatggcgcaggtaccctggcaccgcccgggcccgtggctggcggagggtgacggtcccatgacgtcatggcgtaggtaccctggcaccgcccgggcccgtggctggcggagggtgacggtcccatgacgtcatggcgcaggtaccctggcaccgcccgggcccgtggctggcggagggtgacggtcccatgacgtcatggcgcaggtaccctggcaccgcccgggcccgtggctggcggagggtgacggtcccatgacgtcatggcgcaggtaccctggcaccgcccgggcccgtggctggcggagggtgagaccagccccttaggaggagagagaacagctcagagtccccacacctcttccctcgtgggaagctgggttgatgggctatggggtgtcaccagggaggcaggactgtagacacttctgcccctcccaggccaaaacaaacatgtgagcctagaccagggcccagagatgctggctgcattctcaggagggcctcagtctcagaaagcaagcccaggggtggggagatgctgggcccttgtcctcatgggtggaagctctgaggttgcttccaagggcgggaggcttccctgggattcctgcaagacccagagcaggggccggactgtggccgcctcaggacagagcagaagcttatggccaggttggggaagtggccctaggcccccgaccctctgccccgtagcaccttccacggctgcagaaaggcaaacacacctgggctccccaggaaggggcggtggccggagccagtctagggagtgggaggggcaacacaggctggagtcagcaaggacgaggcctaggacagggagcccagcctccgccttcctgtctccccacaggtccaggtcctcctctactacctgcagcacccccccatttccttcgcagaactcaagcggaacacactgtacttctccaccgacgtgtagcccgaggcagggtggctgcgggcgggtggtggaaccagcccctccagcctggggtccaactcagacttgaaagactgcaatagaaaactcccaaacccagcactccagactcgagggaagccagcttccaagaactggaatgcgtacgtcttttgtgccaccttgtacaaagccggctgcccagccccagcctcaccaccgcatcccacctcctgccctccatacctctagttgtgtctgatgctccgtgctgttcgggaattgttttatgtacacttgtcaggcagaaaaggtagtgaccggcccggcgtgggcacacagacagcccgctttgttctttcatttcctccagcactttctttccgcctgagtccagcccaaggccttttattttgcgctgtgtaactgctgccagcttctctcttggccctgctcccagatggcggtctcctggcagcctcccctcagtcttcctccacccgctcttccttcccagcctgcctgcatgcatgtgcacccttggtcttcgctccatcgccttgaaagctctgaagaggccctgggttgccgcggcagcagtggtctgtttgatgctgccgtttgccgctgccggcccctcctcagactccgcctttgggagcacacctgctttgccttgctgcctgtgcaaatgttggacaagcagacacactcacactcgtccccagcttagcacagagctggagcgcccatttctggaattttccgtttgggaatctccacttctggggtttacctgttcggcctcctgtctatcagtgaggcatctctgactgtttcttctactgcttttcagttcccttccctgctgttctatttcctttgagtgtaaagactcacaggtgacctgctatcgagatagccagagggtcaggagagaatgggggaggaggcggtcaggctgctgaggaaacaccacaggctgaacgggggaggaatgcacatgccacgctgggtgtcccgggtcgcggggaggcagctcagctcttaggagcaagttgtgggggcttttcaagaggggccaggcttcctggagggtgactgatgtggccgaagcaggtgtccaggcaggtaggctgcagccaggagctccctggcaccgcaggacctcgtggtactcttgccttagattttacacacactccacagccaagcactgccacggtcctccaggacctgggaagcaaaggcacaggcccacggtggccagccattgtggtgccgccccagcttctggatacagccttttgggtaaacactgggaactccagaagttgtggggagagtggggaatcagacagccgcctctaggggctgggttctgctggggcctccttgttggtgctgtaggcacccgccagggagcagggacccgacttgcagacgcattgcccggtactaggaaggagtgaggtgtgttcccaccgtacacttcccacacgagctgcggctgccagcctcgggccatcagcctaggagagcagatgcagctccaggggctcgacttatagccagttacagctccccggctcttctgtgtggcagagcgtcgtttccgggccctcagggctggggagctcagttcccattgcttgtgctcagggctgagtcttaaagaagggtttgccggccctaacgctgcagcgcgtgcgcggtgagaggccctttttgagcctgtttactcctgtggccttgggcagaacagtaaatactctgtgcacggaggaaagacatgcccaagaggaaggaagtactgaccatcggctgcctgtgagcagcttagcaaggagcccttgctccctgggaaaggcggtgaacttgagtctaaagatgcagtgcctggcccttcctaaggtccctgcctggcatccgagtgtcggtgtgtggcacagaaggctcctgcttgcttccaaagtgatggacaggaaggggcagagtgagtcacggcccagactgggcaccttcgcgtctcagcctcagggagccccacagccccaagctcgctgaggcaacgtgagaacaggctatgggaaggctgcaaaggctgagaaatgcaaaggctcatatttataaatcccacccccagagtggggagggtcaggtgccagacctggactaaactgcaccaaggaaacacccagcagggtctcctgtgagccggggaccatgcagcccgaaacctccagtcactgcgcccggcaggagtcaggagccagggactgtgcagcctggaacctccagtcactgtgcccagcagggtgggctgtgcccagcaggagtcaggctaagaaacgccaggtctgcctgttcttgctgggcaatggctgatggctgccagtttctgctgatacacaggtaggatgggacccttcatgaatatctgactttaataagttggtaaggatatatttttttgtctatgttctgtttcaacttatgtagattattataaattgatgtaaaccacgtgagaggaaaatgttaataaaaaatgcaaagccccatcatttgcacaaaactcag

SEQ ID NO: 1123 - DNA, 36472 bp, Homo sapiens
acgttgtcgcgggccagtaacgtcatcagacgtgtgtgtgtccctgcggcgctaagaaggggagactgaggctgaggctggggaacatcgggcagcatgagcggctgcgggctcttcctgcgcaccacggctgcggctcgtgcctgccggggtctggtggtctctaccgcgaaccggcggctactgcgcaccagcccgcctgtacgagctttcgccaaagagcttttcctaggcaaaatcaagaaggtaacgcgagccctgggcgaacccttgctgtctggctcccgcttttcaccctcagctgcaagactggtgttgaactttgtgagattccccaaacctgccagagagatacaccctgcggccgaggcgtgttaacactccggattcctgagttccaggaaaaccttcccagagaaagggtgagacatttccaagacgggggacccttggaaatgtggtggtgacgtgttccagctaaattttgtcaggggaattcggaaaactctaggctaggtaattaacaaagcagccttcatctcagctggtctggtctggaaatgtgcggggcttcctctctgattcctaaacagcttacaccatgtccctcctcagtcaccttccagcgccctggggcttccttccccaggtgagcccagcgcctctccctgccattgaggttcctcagaaatctggctccaagatgcttcccaagggtggcacaacccagccaatagtaacagtttggttataaaacactcattgtcttcttagagttggaagacttgggtttggtcttggctcgttgactttgaaactcagttgttttttttgagacagagtcgcgctcttgtcgcccaggctggagtgctcactgcaacctccctcctgggttcaagcgattctcctgcctcagcctccggagtagctgggattacaggcgcctgcccggctttttttttttttgtatttttagcagagacggggtttcaccatgttggccaagctggtctagaactgacctcgggtgatccgcccacctcggcctcccacagtgctgggattacaggggtgagccaccgcgcccggccaagactcagttctttcagccttaaaatggagatagtgttgtgtctccttcacagatgtgttgtagagccccagtgagataaacggtgcatggagagtcttcttaaactgtagagtactgtgcagcagaagagagagctggcttcaacacttagtcttgtgaccttggagctgacggctgcacctccctgtgcctcagtgcattcatctacaaaataggaataaacacatttcttgctctttcctttgtatttcattttatcttctaaggaaaccaacagtatacttgctatttcgtcgaggtgccctactttgaacttggctgaatgttggctgatcctgtatcacagaagttattccctggcttctctttggaacgttcctctgaggttgtcaggctgatacctttatagcaagcaactttacagatgaagaagctaagactcagactaaaagcagtttgcccagctagaaagtgcggagctatgtcttgaacatattggaaaaccttttacccaggacctggggcagtgtggtgctctatcctgggacttcctgctatccagcagcatggtgaagaaagaacacagatctttcagatctgtttccatctttaaacctctggcactacctgccctgccctgcctttactctcagctgtcagctttgcttcccattccactgggaaaatccatgcagtcggatgagaagttcacaggcacagttaccccctcccgctgcatatgtgccggtattatctacattctgttactgtgaactgtctgctcctggcaaaaccaacctctcattagactccaggtcttctcacctactcaagggtaattctttcctttctctgcatcattaactgttctctctactggatcttgagcccttaccattcaggcatttgtccctaatggccatagaagtcagtaatgacctctctgttatcaaattgtgtgatctgttctcagacctcatcctacttgacccatcattggcatctgacaccgttcatccttccaccctgttgacgcactttcgtctctggtttctgaatcactgttctcgccattctctgaatgttctaaatacttcactggctgatacttctctgtgtccattgctggttcttattcagctccttgaccgctaaacagtgaccagtgtttccaactagccaagttggaatttactaaggctgggtctcgtttcatctacagccatctgctgggtgaccttatttagtgtcctggctttaaatatcatcaatatcctgatgcctcaagtttctttcttcagttcagatttctccctgaactccagattccttttgctttttcagagttgggggctttctctgtcacctgtgctggagtgcagtggtgccatcatagctcactgcaaccttgaactcctaaggctcaatagatcctcccacttcagcatccccagtagctgggactacaggcacgccctgccacacccagccaagattctttttttaatctacctttgtactcaaaagctgtactaagaggtctaacaggcatttgagattaatagatcccaaactgagttcctggttcccacccaatcctgctccttccaccagccttctttatcatagataatggtggctctgttgttccacctgttcaaacagaacacctggagtcaccttgtactcttattctcctagtccacttctaattccacagaagatctggttttctctacttttaggttcttagaatctgaccacttttaggcccttctgctgctactttggatcaggccagtgtcatctctcacagccttactgggattagagcagaaacatgggacatgatgcttagaatctcagattgtgtaggccagtggttgtcaccctgccctaagctggacccaagctattcatggagtgtcctggaactgctgcagggatgggtgggaagttgagtgggtgggatttgggtgcctgttttccctatcagcagtctcagtcagagccgcctgcttctgtctgttttacatatttggtttctgcactagatttctttgaataacaggttccacttttttagataatttacaaactgtttattgcaattgaactctcctcccctaaggcattgacctgatttgataacatcaggatctttctcccacgcccctgcaatctctcctgtgtggcaggttttctgtggttgtacctgaaggccaattagttgccaggcagtcttatctggcctgcccactggtaccagaatgatctctaacacagcccattgcacaagacccaagtgtcagtgagcctctgtgttcagtgaaggagactgagctttgatataaaaggctgcagagtgatggagccatcagcttgtttttttttttttttcttgttttttttttccttgagacagtgtcttactctgttgcccaccctggagtgcagtggtgcaatcacagctcactgcagcctcaacctccccaggctcaggggatcctcccacctcagcctcctgagtagctggaactacaggcgtgtgcaaccacgcccaggctggttttgaactcctgggctttaagcaatccccctgcgtcagcttcccaaaggactaggattacaggcagtagccactgcaaccagctaagcttgtttttttctttttcttttcttttttttttatggagtctcactctgtcacctaggctggagtgcaatggcgcaatctcggctcactgcaacctccacctcccgggttcaagcaattctcctgcctcagcctcctgagtagctgggattacaggcgcgtgctaccaagcccgtgtaatttttgtatttttagtagaaacggggtttcaccatgttggtcaggctggtctcaaactcctgacctcgtgatccgcccgcctcggcctcccaaagtgctgggattacaggcgtgagccaccgtgcctggcctccaacctttttttttttctataccaccttcagggtggttttggaatggatggaggcagggattcctttaagttggctgtcacttttagttagggactcacctataagcctgtggtcctgggcccagagaggagaaagcagtgcgagcatattgatagagtagagaaatctgttggctgattagctgtacaaggtctgaggagaaggttgaggtctccccaagacttctctagaacacttggtgagaggcgccatgaggacaggtgatgcttgggcttatagctctgactcaggacatcactgctcaacagcctgaagcccacatccaaagctcatgtcatgctggcaattgaaggggtagcagagcccaaaagtccagaggggctcagcacagggagcagatgtctgtgagcaggagagacagcggctgtagggatcgatgagacttggtaagcatgatgtgctcttgtcagcatagcatctttgagctcacacaataattgatgtagaattgtccatttcagtaaggagtttccacatccactatcttccacgattctcacaagggccttgagtaaatattacctgcatgttatgggtgagaaaggggtagtttagagagctgaagggatttggtgaaggccacataatgagtaagcctgaaatcaaggaccagacccccaggcttctaaatgttagtcttgggctccttgtttcatgggactattatcatcccttgtactgagaaggaaaactgatgaaaatcgggaagaacctatttgaacaggggagggagatggatgtgggtggtggagcctgcacatagtttctgtatctcaggaaccttgtgaggtttgctttccagttccttcagtacgtcatgtcccgctggccagggtggagtggagcacatgtttttccttcccttttaactgatatttccgtgatgggagtgtgctaaaaattaaattttttagaaaatatttactatttttagaaagaagttttcccatttccagaagttagccaagatgaacttaatgaaatcaatcagttcttgggacccgtggaaaaattcttcactgaagagggtatgtatggttttctttaccattgccgatttccattgtaagggctatttggttgatatttatattagaagtgacatacataggagaagtcttcttgagggagaaatggtttccactcataatattttgctttaggtttcatccctattgccatttaattaaaaaacatccagttaaatgcttctcattgtatttgtggttcaggagcactttaaacatttccatactgttccaggtcaacacttccataaagctataataaaaatgaataactaaaaaaattagatggcaaaaagccaaggccacacaccatacaagcccatggagcatgtgttggttgttgtggcagtgtacagttgctcttagtgtttctaaaggttgagtttcaatttctgtactttggtaattgtaaacaaagagtgatttgtggaccagccacagtttggcacctgcatggtgaggcagcatttgacctcaggtccctctctcagagctgttggccggtcctccagccagggccttggtggagagttcagtgatggtggatggacagcaggtcttccctaatagtaggatcctggagagcttttgtttatatgaattttatctatcaatatttgccatcttaggggttattttatttttattttactttatttttttgagaaagggcctagctctgttgctcagactggagtgtggtggtaccatctcatctcaccaccacctccatctttcaggctcaaacagtcccccaacttcagcctcctgagttgctggaactacaggtgcgcacccccatgcccagctaatttttttgtatttttcatagagacaggttctcactatattgcccaggctggtctctactcctaggctcaagtgatcctcccaccttggcctcccaaagggctgggattacaggtgtgagccaccatgcctagcccctcttagaaattaaaactgagaaatttaaaatatactgtggggctgggtgcagtggctcacgcctgtaatcccagcactttgggaggccaacggggacagatcacctgaggtctggagttcaagaccagcgtagccaacatggtgaaaccctgtctctactaaaaatacaaaaattggccgggcatggtggcgggtgcctgtaatcccggctattcaggaggctgaagcaggcgaattgcttgaacccaggaggcagagattgtagtgagccaacattgcaccactgcactccagcctgggtgacagagtgtgactttgtctaaaaaaaaaaaataaaatatactgtgttcatttgtttaaaaataataaatccattacatgttaacataatatttttaatgaaaaatattttgtttttgtttttccgagacagagtctcactctgtcacccaggctggagtgcagtggtgcaatctcgactcactgcaacctctacctcccaggttcaagtgattctcctgcctcagcctcccaagtatctgggactgcaggcatgcaccaccacgcccgggtaatttttgtatttttagtagagatggggtttcactatgttggccaggttggtcttgaactcctgacctcatgatctgccttcctcagcctccccaagtgctgggattacaggcgtgagccaccgcgccagctaatgaaaaatattttgaaaaataatcaggccaggcgcggtggctcacacctgtaatcccagcacttacggagactgaggtgggtggatcacctgaggtcgggagttcgataccagcctgaccaacatggagaaacctcatctctactaaaaatacaaaattagctgggcgtggtggtacatgcctgtaatcccagctactcaggaggctgaggcaggagaatcgctggaacctgggaggcggaggttgcggtgagccgagatcgcgccactgcactccagcatgggcaataagagtgaaactctgtctcaaaaagaaaaaaaaaagaaaagtaagttaaaaaaaaaaaaagaaaaaaattgatggaaagagtgacattggttgaaagttatgcaagtccttttaatgtttggcttattagaagacagctggattctcatacctgtttgtgcacgtaacctctggaaaagtccactgtgcagtctttttttttttttaactgtctttttttataatcttcagacatgctttttgtttgtttgtttctgagacagtcttgctcttgctttgtcacccaggctggagtgcagtggtacgacctcagctcactgcaacctctgcagttgaagtgattctcatgcctcagcttcctgagtagctggaattatagcacgcaccgccacgcctggctaatttttgtattttcagtagagatggggtttcaccatgttggccaggctggtcttgaactcctgacctcaaatgatctgcctgtaatccaaagtgctgggattacaggtgtcagccaccgcacctgtcctgacacgtgcatttaaagcaagaaacacacacttccaggacatagggctctgtcagcaataactgtcatctttgtatttgcagagatgtaaatatataagaaaccggctgggcacggtggctcacactggtaatcttagcactgtggaagactgaggggggcagattgcttgagtcccagagtttgagaccagcctaggcaatggagcgaaaccctgtctctactaaaaatttaaaatattagccgggcatggtggtgcgcgcccatagtcccagctacttgggagtctgaggtgggagaaggtacccaagcctgggaagtcaaggctgtagtcagctgtgttcatgccattgagctccagcctgggcgacaggagtgagaccctgtctcaaaaaaaaataaaaataaaaataaaaaaataaataaatatatatatatatatatatatatgcaagaaaccactgcaaaccaaacccactccctctcacaggaacaaaggtctcttggaataaatagcaaatgctggaataaaaactatgttcattcagctgccatgatgtgaattcaaaaaggaagttaaatccaagggcaaagcagagaaaagaacatacaaaaatacacctatttcatgtacattcaaagaggaggctaatcactgtggacaaagggccctctggaatgacagctgtaggcagccagcagtgccacggaaatagaggcactgtcatctggagacacagaaaaatcacatcctcccacaactggcctctatgaaaaccaaccaggacagacaacccttccccaaaagtaatggccaagaataaaagcacaaatattgctggaaatccaagtagcctgttttactgctttgagtgacttatatgcaaacctaagacttttttctgaatccttgatcaagatttattcatataaaggccgtacataaattctgggaacatggtactttggactatatattggactctgagccaaaacgttaaatacactacactgcgccccactgtacagtcttcagagaattagaatttaaaagcaagtaacatcttaagtagttttaggccaggtatggtggctcatgcctgcaatcccagcgctttgggaggccgacgtgggtggatcacttgaggtcaggagtttgagaccagcctggccaacatagtgaaaccctgtctctactaaaaatataaaaattaaccaggtgtgttggtgcccacctgtaatcccagctactggggaggccgaggcaggagaatcactggaacccgggaggtggaggttgtattgagctgggatggcgccactgcacttcagcctgggtgacagagtgagactccatctcaaaaaaaaataaaaactagttttgatcctgtgggaccccctagaagcagctcaggtcccccagaacctctttgagaagtgccaaattgtcagctgtcattacattgcttggtttttgtttgtttcttatttcacacctggtgatcacaaattatatgttgctagttttaaaagttgcttatttatatataaacataatttataatttagaaatacttatttctgctttttttcctagtgtttatcttcctatttgtatctttttttagctcccatagtctcttgttcttttatttaaacttttcctatgtggtttgtcaggtttttttttttttcaggtttaattaaggaataattgatttacaataaattgcacacactgtcatgtgacacataatgacattcaagtcaatgacagaccatatatacagtggtgatcccataagatcatcataccatatttctactgtatcttttctatgtttagctgtgttcatatacacaaatacttaccattgtgttacagttgcctacagtgttcagcacagtaatatgctgtacagcttttttgttttgttttgttttccttaaaaaaaaaaaaacaaaaaatatttaacagtgagatggggtttcactgtgttgcccaggctggtttccaactcctgggctcaagtgatcctcccgcctcagccttccaaagtgctgggattataggcatgagacaccacgcccggcctactgtacaggtttgcagcctaggagcaataagccataccatatagcctaggtgtgtagtaggctctgccacctaggttgtgtaagtccattctgatgttcatacagggagagaatcacctgacgcatgactgtatttagagagtacccctcaggagccatcagtgcaacagaggaagtgaacgtactcattacccgtcaaagtttccttgtgcctcttttatttcccccctgtttccaggcaactgctgatctgttttctctcactatagattagttcgtattttttggaattatattatgtgtgattttgtctggcttctttctgcataattttgaatttcatccatggtgcatgtattggtagtggcttcctttttaatgctgagtcatatttctttctatggatataccaagatttgtttatccattcaagtattcatcaacatagggtatgtatccagattttagctatcaccaaaaaagttgccataaacattccttttttcctctttttctttttttaagagacagggtctttctttgttgcctgggctggagtgcagtggtgtgatcatagctcactgcaacccttgaacttctgggctcaagccatcctctgcctcagcctcccgcatagctaagactacaggcacacgctaccatgcccagctaataattcttaaagttttttgtagaaatgggttctcactatgttattcaggctggtctcagactcctgggctcaggtgatcttcctacctcagcctcttaaagtgttgggattacaggtatgaaccactgcgcctggcctgtatttcctttttttttgagatgccatctcgactcactgcaacctccatctcccaggttcaagcgattctgcctcagcctcccgagtagctgagattataggtgcgtgccaccacatctggctaatttttggtattttgagtagagaaggggcttcaccatgttggccaggccaatctcgaactcctgacctcaggtgatctgcccgactcggcctcccatagtgctcggattacaggtgagagccacctcgcccagcctggcctgtattttattttagaaactttatagttttggctgggcgcagtggctcatgcctgtaatcccagcactttgggcggccgagatgggcggatcatgaggtcaggagatcgacaccatcctggctaacatggtgaaaccccgtctctactaaaaatacaaaaaattagccgggcgtggtggcaggtgcctgtagtcccagctactcgggaggctgaggcaggagaatggcgtgaacccgggaggcggagcttgcagtgagccaagatcgcaccactgcactccagcctgggcgacagaacaagactccatctcaaaagaaactgtatagttttaattcaggtttagaactatgattcattacaagttaatttgcatttctttatcaattttacaattttcaatgtctgcaaaaaggcctacaattcttaaatggttggtttatcttttagagcaattttttttttttttttgagacgaagtctcactgtgtcacccaggctgaagtgcagtggcgctatcttggcccactacaacctctgcctcccaggttcaagcgattctcctgcctcagcctcctgagtagctgggactataggtgcgcatcactatgcccggctaatttttatatttttttagtagagacagggtttcactatattggccaggctggtctcgaactcctgaccttgtgatccacccgcctcggcctaaagtgctgggattataggcttgagccaccgtgcccggccagcaatttttaaaataggaaaaaaggatcttgtagttacccatgtagttactgattccagggctcttcattctctcatgtagagtcagattcccttttgctaccattgctcttctgtgggaaggacttcctttcacttttcatgatgtgcagctctgcaggggatgcatattctcacttttgtatgtctagaaaagtttcagccaggcatggtggctcatgcccgtaatgccagcatttagggaagccgaggctgtcagatcacctgaggtcaggagttcgagaccagtctggccaacagggtgaaaccccgtctctaccaaaaatacaaaaattagccagatatggtggtgtgcacctgtaatcccagctacttgggaggctgaggcaggagaaccacttgaacccggcaggcagaggttgcagtgagctgagatcacatcactgtactccagcttgggcgacagagcgagactccatctcgaaaagaaaaagaaaaagaaaagtctgtttcatcagaacaggtttctgtgttgacaggatttacctttcaggccattaattgtgttgctctgctctcttcctgacttcatattgcttcagaagagatgtctgcttccattctttgttcctttgtacatagtgtttttttcatctctggctgcttttcagtggtttttaggaaaattgattatcacatttatttatgtagttttttgcacatttattttgcttggagttgtttgaacttcttggctctgtgtgtttatactgtttattgaatttggataaacagttgtacacccatacagtgaatactgaacaacaaaaagtaatgaagtatttatacacgcaacaacacgggtgaatctgtaaatcatgacctgagttaaagaagcccgggaaaataggtgccatatggattcatttatataaaacttgaagatgcaaactgatctacagacaaagatttgtggttgcctggggatggtggacagatggatcgatcacaaaggggcatagagacttttggtgaaaaaggaaatgtttttatctcgattgtcatgttttcactgacaaatatgtcagaactcaacaaattatatattataaatatgtgcaggttattcttcgccaattatgtatgtcaataaagttgttaaaggataaaaaatgaagggtttggcctgcacttttgggaatctgtagttctcttagtgacccatgtatacaaaaattcttaagtgtaggttatggtgtttttaacaatttataatactgatgaagtttaattagcaattcagaagtacactttaattaatttgatgcatacaaaagtgtgcaattataggtctaatgctatgctattgattgttcagttttgctgtagtgaatgtgaatttttattttagagatgagatctcactctgtcgctcaggctggagtgcagtggtgccatcagagcttactcaacctcccaggtcaagtgatccttccacctgagcctcccaagtagctgagactacaggctgaatgtgaatgttgaatgaatgaatgaattggtgttaaacaggctaaactgtctcagaacttgtggattgtgctgaaagcagtatggcctctggcagtgaagtaaaccttggcccagatactgccatgaggtggctatctagctgaacattttagtacaattctgagacttgcatatttattctctcatttcctagaaaataccggccaaaaaaagtatgaggtctataaggaggaggaaaaacatgaagtttaacatgcctatagaaaaatttacatcccatgaatgtatataatttgctgctgttttacacagcaaaagcacccctgtgactagcacccagatcaagaaatagaacaccacctagctctggcagcttttaacaattttattctggccgggcgtggtggctcacacctatgatcccagtactttgcgaggctgtggtgggaagattgcttgcgttcaggagttcaagaccagcctgggtaacatagcaagacctcgtctctactgaaaaaaaaaaaaaaaattagctgggtgtggtggtatatacctgtagtcccagcttctcatgaagctgaggcaggaggctcacttgagcctgggagattaaggttacgtgagctatgattgtgccactgcactccagcctggatatcagagtgagaccttgtctctaaataaatatataaaaataaaatttttcctgggctcattacataaaattgaacacaggccaaatgaccatgactacagaatttctagttttgaaaaagtttctactctgggattatatatgattaatatataaacactgtcctgtttacttatatttgtagaaacatagcttatatttgtttaatcaagattttcctcttggcagtggactcccgaaaaattgaccaggaagggaaaatcccagatgaaactttggagaaattgaagagcctagggctttttgggctgcaagtcccagaagaatatggtaagtcaagcaaacaagcacccagccagtttagctcttaagaaagcactctgtatttgtccataacaggtctagttgctggaatagatgacaccatccgtggtgggctacttggtaggggtggactgactgaaggacctgtagggaggaagtgttctcgggtcctgtgcttctcatcctagcacagaggaatgaggcatgtggtctggctggctgtagagtgcaaggcacatcgaggtgggagattggaccagtgggaacctttgagcagggtcctttgtcctatggactgtccctgtaattctttgagcatcctagtgatgtttttagcccccaagtggcggttctgccttattagagttggccagtcactacaacttgcctcccttacgctttttctcgagttggtcacctgaattctgcagaggttaaagggacaggcaagcagtgtgtagaaggcaaggtagaccttcaaggttcaaagggatagaccacacacatgtgtgccatttgtgtttaccctcaggcccttttgatataaaattataaaggccaaggatgctgctaagcatctgacaatccacaggacagacccccaaaacagaaaacaatccattccaaaatgttacagtgccacagtggaaaagctctgtcctggagtcctctggatactgggcagtgggtcacactatagttgttgcatttataaagacctacagctgtgatggaagattctcactacatgttaattgattcgatgtgtgtgtagatatcttcatatttaaagtatatatctacatatgcttgtatgcctagaaaaagtgtggatggaaggatatacacagaaatgcgctttctgaggcacaagattgcgagctttttttttttttttttttgagacagggtctcactctgtcatccaggctggagtgcagtggtgtggtcatagctcactgtagccctgaattcctcgggctcaaacaatcctcccacctaagccttccaagtagctgggactacaggcgtgcgccgccatgcctggtgaattttttttattttgtagagctggggtcctgctatgttgcccaggctagtcttgaattcttggaaccaagcaatcctcccacctcagcctcccaaagcgccgggattacaggcgtgagccactgtgcccagccctcgatttttgtttactttgtacctttctgtattgtgattttttttttttttttttttttgagacagagtctctctctgttgcccaagctagagtgcagtggtgcgatcttggctcactgcaatccctgcctcccaagttcaagtgattctcatgcctcagcctcctgagtagctgggaccacaggcacacaccaccacacctggctaatttttgtatttttagtagagacggggttttgccatgttggccaggctggtctcgaactgttgacctcaggtgatctgcctgcctcagcctcccaaagtactgggattacaggtgtgagccaccatgcccggcctgtattgtgatttttttttttaatatggtgatctggcattactttataatcagaagaaaaaaaaaagccaatgaagccttaatgggaggaatctagggctgggctgtgattgacgctggtccatctctcctaggtggcctgggcttctccaacaccatgtactcaagactaggggagatcatcagcatggatgggtccatcactgtgaccctggcagcgcaccaggctattggcctcaaggtcaggtatctggggattctgtgtggtgctctctgtaggtcttctggagtcacatggaggcatagaggccagaggcttgctccctctgaattgggcctgatatctgaccttcagccctgcccttcagttccctcactctggccacacctcatggtgctcaatcctcacacactgcccacatgcgcagtggcctttgggtcgcatgtcccttccttctgaatccacctcctgtccccattgcctctgatccacccttcaaggcccaggtagggtgccactgccttcgccttgggctggaagtggtctctcctgagccttcgtccttcagcctgagcatgcccccactctttatgcaagccaccttctccccactgggcttggagcaccttagggcaggcccagggtcaaccgcccttactggcaatctcattactcagattatttctgcttaatgttgacatcaaagagagctgaatgcacaccatgctcggctcccccaccccagagagcgcacacattcatgcagatgtttagtgaagagggggactgtctttgtggcactgggagggcagcaggtgggacagccctgacactgagcaccttctttaggataggcttggttccagcactcctgtgtcttcacattgcatcatccagaccctgtcagtgggtgggagtggcccagtttgtggatgacaagatggaggaggctttctttggaaagggatatcctttgcccaagaccactagtctgggaaatgaaggaactgatatgaaagttttggacacagactgcaaagcactgtgggttgcacaggctcacggcactggcatgtgcgccctgaccgtctcctcagcagcttggctccctgggctctgcctgtggccgcttgctctgagttcttgctgtcttctcttgcccgaagtaaatatttgcctcagaaaggaaatgtttcacaaacacctcatgctctcctttctccccacagctgacattagtctgtgtctgttttgtttaggggatcatcttggctggcactgaggagcagaaagccaaatacttgcctaaactggcgtccggggagcacattgcagccttctgcctcacggagccagccaggtctgtctctgcacaaaacgttatccctcagcagctgtgatgttgcccaagattcactggggcaaggggctgttggttttgttgagtagctgacttttccttctttccaaaatcttgcaaagaatcaactcagcaactgttcttgccattcctcttatcttgaccttatttctctgtcccagtgagacttgcaagtgagataccacgcttgacagcacttattaaataaatttttgtggtttacaacacaccttgacatacaatatagtaataacgttccggcttcaaagcacctttcagaatatatagcgtgggtggtactgctcccacttacacattaggagctgaggttcagtgaggctgtgtgatctgctggatggagcagggctgcggcagcactcgggactctgatgataagtccatcacctggaccatcctccatcctgcttcactttgcatgagaacctgggaacagtcatccttcctggggtgcccagaactcatcctcacaggacctcagatgagcccattgcaagcacccatttccatgtttaaacctaagcccaagttgttttcactgccgcttttttacgtgatgtattgaagcagaggtcggctaaatccagcctcctgcctgttttttataaataagttttgtttgtttgtttttgagacagggtcttgctgcgtcacccaggctggagtgcagtggctcaatctcatctcactgcaacctccgccttcaagcgattcttctgcctcagcctcccgagtagctgggactacaggcatgccccaccacacccagctaatttttgtatttttagtagagacggggtttcaccatgttggccagatctcaatctcttgacctcgtgaaccacctgcctcagcctcatgttctattaatagcagcagagttgaggaggtgagacagacatcctgcagcttggaaagctgaatatgttatctgacccttcattttaaaagtttgctgacctcttacaagtactaaaacctccattttcaggccctcaaaagcattcatatttattcccagtattctcccttgaccacatctttctgcatctgcagtgggagcgatgcagcctcaatccggagcagagccacactaagtgaagacaagaagcactacatcctcaatggctccaaggtagggttccttccccatggccacattagggtctcagtcacaaccttcactgccactgagtgagcactctccacacaccagggattgtacctgctgctgtagcaccgactaccttcttgagctgcttttatgtgtttgtttttaattttttttagttttttttatttgcgatggagtctctgtcacccaggctggagtgcagtggtgtaatctcagctcactgaaacttctgcctcccaggtttccaatgattctcctgccttagcctcctgggtagctgggattagaggtgcgtgtcaccactcctggctaatttttgtattttcagtagagatggagtttcaccatgttgtccagtcaggtcttgaactcctgacctcaagtgatctgcccacctcggcctcccaaagtgctgagtttacaggcaatgagccactgtgcccggcttgtaaacccaaaaaatctttaaattttttgttacacaaagtttcagacatattctgtgtgcctggctggccctaactccggcagtcacctgcttatggccactgtgcctcttccagcagcatcgccacctccagatcgcatggtaacaatctcagcatgcctctctaaaagacaggagttttttttgtttgtttttgttttttaataaacacaaagccgtaatacccttatcacattttaaaaattgataatttctcttttcttttgagacagggtcccgctctgtcacccaggctggagtgcagtggcacgatcttggctcactgcagcctcaacttcctgggctcaggtgattctcctacctcaacctcccaagcagctgggagtacaggcacacagctaactctttgtattttttttttggtagagatgggttttcaccgtgttgcccaggttggtctcaaactccggggctcaagtggtctgcccacctcggcctcccaaagtgctgggattacaggcgtgagccactgtgcccagctaataatttcttacttctatcagcattcaaatatccctgattgcctcatacctttttttggtttaactgtttgcttgaattaagatccacacaagtcccatctgttgctgtttgttaaggagtctgtttctgcctctgtctccctctgtttcctttcctcctcctcaccaccctcccgccttttttcatttctttgtagaattaacaaataaatgttgtgtgtatttacatctacaacatgatgtttttatatatgtataccttaagaaatgattaaaccctttctttcttgaagaaatgcagttgtctggcggtggagcctgagctgtctgacaactttgggtgttctttcccccgcccccgcctccacctggccatccatgtcccttgggaaaatccttgctctggggaaagtgggctgagccctgtcctctattcactcatgcttggttggcttctgcagagccaaggaccctgcatgtctggcctgaggtctgactggcagctggagcttgatggacaaagacagagctgaggtgggtcacataggggtttggttttctccaaagtccatctttctgtcctcaggtctggattactaatggaggactggccaatatttttactgtgtttgcaaagactgaggtcgttgattctgatggatcagtgaaagacaaaatcacagcattcatagtagaaagagactttggtggagtcactaatgggaaacccgaagataaattaggcattcggggctccaacagtaagtagctcctgtgcgcgcgtgcgcgtgtgtgtgtgtaagggggagactggcctttgacggtgtgtgtgtgtgtgtgtgtgtgtgtgtgtgtgtgtgtgtaagggggagactggcccttgactctgtccaaatagcaagataaaatgagatttaaacactttcagtttttgttaagcattttaaaaagatcaaattaagaatgccacttgggctttgtctttgttcctgcagctgagtgctgctcacttgaaggcctgctggtcatcccctgctgtagctgccctagcagacacaccaccttagagctcagcttacagtccccagcctttagttgtctcagtctgcagtgcctggcagcctgcttcaggctgtgagttgggttcaggtccatctgggttcaggtccatctggaggcttgttcttagagcagatcataagcacctaaggggccaagccaagccatataagtactatttttgccgtgggagacatagtctccctctgtcacccagcctggaatgcagtgctgtgatctcagctcactgcaacctctgcctcctgggttcgagtgattctcctgtctcagcctcccaagtaattgggactacaggcgtgcaccaccacacctggctaatttttgtattttttgtagagatggggtttcaacatgttgcccagacttgtcttgaactcctgagctcaggcagtctacctgcctcagcctcccaaagtgctaggattacacgtgtgagttaccatacctggccacttttttttggtttgttttttttgagacggagtctcgctctgtcgcccaggctggagtgcagtggcactatcttggctcactgcaagctccgcctcccgggttcacgccattctcctgcctcagcctcccgaatagctgggactacagctgcctgccaccacgtccggctaattttttctattttttagtggagatggggtttcaccatgttagccaggatggcctcgatctcctgacctcgtgatccgctcacctcggcctcccaaagtgcgtgagccaccgcacccggcctttttttttttttttttaaatagagatgaggtcttgctatgttgtcctggctggtctcgaactcctgggttcaagtgatcttcctgcctctgcctcccaaaatgctgggattataggcatgagccaccatacccgactgaccctaaaacacatttaaggtctctgttcatgttgggtcagctctttgtattggccacaggaagtcacatggtcatacctagcaggcagggaaagggagggaggtccatccctcctcacagtgggagagtgctacagttagattgcaggggtgtgattgtgttagagttaagaattgagaccagtggtcccagtctaccctaaggcttcaggaaatgctgttctttccctcactttgcttgttctggctctttatatgcctggttcttttcattcttaaacttctgctaaatgtcaccttagaaaagtctgacatagtccttaataaaaatattattatccacccccttgccaacctccatttctctttatcgtgatgccctatttatttcatccatagcactgatcacaatattacattgttttgtttatagcttttgtctcccaaatcaaagtatgagcctccacaaagataggaactttgtctttctatactgtcctaccaaacattggatggatggatggatggatggatggatgaattgcctgcttgcaggtcagatgcagagtggtttgcattgtcagatgatatcttaaatttcatgtgtttcagcttgtgaagtccattttgaaaacaccaagatacctgtggaaaacatccttggagaggtcggagatgggtttaaggtgagttgccagccacagccccttgtaccaggtagtgtcatgagtgcagtttgtcgcccccagcttttgccctatccctgctcgtagcagagtagcctgtgcatggcaggtgactttgcatggttatctgttgggaaattggcaaaatggacactggaaaattggctggctcctagaagaagtgtatggtaaggattaggaatttcccttcacctctgaggccctattcgcctcgagcggaggctaagattcccttctgcagtgggtatgagaaagcagcctgtgggctctggtgaatctcaagctctgtgtaccacaaccctggtctgcatcgctgccctactcttttctttttggactaagacttatttttatcaagagatgattcatatgacaaaggactcaccattttaaaatattatttcagtggtttttagtatattcactatgttgttcaaatatctcacacagaacatttcctcaccccaaaaagaaatgttgtaccatccagtatgacccttaccccatcccttggctgctactcttttactttatgtccctatggatttgcctgtttggaacatttcataaaaatgcagtcatatacaagatccagtctttggtgacaggcttctctcacattgcgtgatgttttcaaggttcatctctctcatagcatgaatgagtaattcattccttttatggctgaattctcttctgttgagtggagataccacattttgttcatccattcaccagctgatggacattggggttgttaccgcttttggctgctatcagtaatgctacttatgaacattcatgtcaagttttaatgtggaaataacgttttcaggtattttgatttatgcctaaaagtagaatttctgtttggcccaagttggtcttgaactcctgggctcaagcgatcctcttgccttggccttccaaaatgctggtactacaggtgggagccaccatgcccagctctggcatggtcctttggaataacgttcagtggtcttgtgtgtggggatgttggtagagctgcaacagtgactgaaccaccttgttctgaggcattaggatggtgctttctcccagcttgagggaaggcaagctgatccacctggcctggtttcgttgcggcctcctccctctgcctccttcagggcccctgggctctccctgttctccctgcaggtggccatgaacatcctcaacagcggccggttcagcatgggcagcgtcgtggctgggctgctcaagagattgattggtaggtaagttagggacaaggccctttgtgccccaccccctgctgccccggctccaaccctggaggctctgccattcccccggccccttccaggccagtgctgaaccaggctaccagcctgagctcagtccctgggcttttgtggagaccagagggtctcctcagcctgcccctgaggtttgttgtcttccgcattcctctgtttcacctccacccgggtgatgctgactgggggacaggctttctgtctggggtggggatggggattggggaatgggctgtctgtctggagtgagaggttgccactgaccagtaggagcagagctgcttggtgagcacacaccaagaaccaggcttccaggatacacggcctctggttcccaaggtccgtgcctcctgggtgactctgcatggtgggtggggagtaggatcgggtttggaacccaggtccctgggcccctggatcttacctttgttctattctgtcagaataccccaaacctccattttcctttgccagtgaacttagaacagccctgtaaccatcctggttgtggtggaagcatttgcggggaaatgggggtacccggggcagcacacccctaagtgctttatgaagctcctctttggtgccaggctctgggcctgttttggcttccctccattttagagatgagaagacagagactcagagagggcaagcgatttgttccagactgtgctcctggacccaaaatgaaagctgtcaggctccaggctcagggctcttcttactcaggcacaaggcctctggggagctcctctgctggggctctgagtggggctcggccctctacacctcctgagtgcaccacacctgggagagcctgtggaggacatggctatggcggggcgggggtgcttctgcctgggagaggcgccatgtcactcttgggcccttagagctcagcactttgtcacagccacacgcctggaagccccagcctgagtattcaagccaggcggccccacctgctttggtcactgcacggggtgtgagcctgcaccacctctgtctggggcctctgtgcctggctttgtgcgaggcgccctcccccttccacctggttgcatcttcacagcgactctgaggtgggggtggtgttcagggaggtgtcgcactcggcctgaggcacagcctgtaagaaccattgccaggattcaagtctgtatctgatgccaaactctgtgtgtgggtgccatgaggaggggtggttctcctctgacccacgggtgctggcaagtgggggtgccagcttctggggtatttgacctcagcagacacgcttctcacagtgcccacctgtgggaagggtaaggatgatggccataggaaatcatgtttgaaccacagaaatattccagttcattctaataactctgctcttcctcagaaatgactgctgagtacgcctgcacaaggaaacagtttaacaagaggctcagtgaatttggattgattcaggtaccaatggttgagtactgtatttgtgcatttcactgtgtgacatgaacggtgtgttcttttgatgtctctgtactggtgacttctgtggtgatttgggaagaagactagttaaggctttatttgacacgggtcactgggcttgcttctcttgggcattgaggcttctgacttaattactttctctcctgtttcacagatttggctctcagcacatgcaaattgtttcttgtgttttttctgaacactccaggagaaatttgcactgatggctcagaaggcttacgtcatggagagtatgacctacctcacagcagggatgctggaccaacctggctttcccgactgctccatcgaggcagccatggtgaaggtaaccctggcatagccagagagctggcgctggagggaggcttgggaaatctccctcactgtgacctttcaagcccatgctgttgcctgtcatcttcctcctgtcattgatccagtatttatgatgcacttgccctgtgtagcactccagggataggcaggcagcggggagcagcagtagggaagtgtccagtgggccagtggatcagtagtttatagcagaaggagaccgttatgataatatccttttagagtaataacattgcatctggcttgtgtgagaaagacttcttttttccttagtttatggccttcctactttctggtatcaaaactttatcttaaaaactaagcatatggcagggcgcggtggctcacacctgtaatcccagcactttggggggccgaggtggatggatcacctgaggtctggagttcgagaccagcctggccaacatggtaaaaccccatctctactaaaaacacaaaaaattagccgggcatagtggcgggcacctgtaaccccagctacttgggaagctgaggcaagagaatcacttgaacccggtgggggcggaggttgcagtgagccgaggttgtgccattgcacaccagcctaggcaacaagagcaaaactccatctcaaaaaaaaacaaaaaacaaaaaacatgtatgagcctgggcaacatggcgaaaccccatctctacaaaaaatacaaaaattagctggcatggtggcacacgcctatagtccctgctacctgggaggctgaggtgggaagagcatcttatttggttaaggtagatactagaatttgcttttgttttgttgagggtggagggtgtcattttttagctgtaataaaaaagatggccacacttggggggaccctactttgtgccccccacaattgtttttaagctggtctctggaattgagctcttgagagaaatagtgagaggtatggcagcttacagaagcaaacatcctggtgtcggcaggagagtctacctaaaaggttgggatcctgaagtggcaaggtccctaaaaaaataaaaaattaaaaacaaaaaggctgggcatcttggaccgtgtttgagtcttttctaggtgcagtctgtgtactgggtgcatttgcatgtgttttatcatctcgttttcttgtcacccttgaacagtgaccacagacattagtttgctgtaggccagcctcttccagatgctaagcctagggctaaacatggcagtatgtttgcccccaaggcacttatagtgtgcacagacagaaagaaatcacggccgctggggcttggcaggaacaggtcaggttttctcgggaaggggagatcttaggtgggttttaaaggaacaggagctcagccaggtgcagatagggtgaaggcaggcccagaggtacagaaggtcatggtggggtagggaacacaagctggccagtgtggtcacggaaggcaaaggacttgaccacatcacccctcaagttcctccctggccgatctcctccccaagcccgtgtgcctcccatgcctccccagccacccagctccctgcagcgtaggtcctccttttggaaaggattcagtgtgacaccccacaggtgttcagctccgaggccgcctggcagtgtgtgagtgaggcgctgcagatcctcgggggcttgggctacacaagggactatccgtacgagcgcatactgcgtgacacccgcatcctcctcatcttcgaggtgagtggccccgccaccagctaagctgtgctccacccccaccctgcctggtcctaaagatgctgctcagggcctcgcagaggcccccgcagcccagggctgggtcgcatgctctcaggggctctcctagccctggcacgtctccttcccgactgctgccctccatgaagtcacaagcctgaggagtcagttcagttagcatgtgccaggtggcaggggagggaactggggccacagagatgacttcggatgctgtgttctgattgtgcagcagggccgaccaagggagatgacagagtgtaaagaggcagggagcgggcatcctccagaggcagccagagttttgtgaagcatgcgctcctggcccctaggggcagaaagaaagggcttcaaccagggccgggtggagggcagtttgtccctaagggcagggtaatagagcgcgccaggcccagatgggactgatctgctggcacaaggtgaatgaagagagagtgaagggctttctgggagcagcagtcagccctgctaggtgggctggggcaggcagtgggtttgggggtgttgaagaaggtatatgggaaggctaaaaaagtagccagactgtggaggaccttgattgacagcagaggaatttggaagccacaaaacgtctttaagcagggcattatttggttgtatctgtgttgtgggaaatgcccccaggggctcagcaagtgctggacatgtggacggggctcatgtggagagtgagttgcagggatgaggccggagaccaggggctctcctgctgggagggaggggctggacctaagagagcacagcaggatgagtgggatatgatggtgggcatgggtatacaggaggcaggcctgagacagggagagggtttgggcctgagcagcaggtctggtgatgagaggcatcatcagcctctgggagtgtagtcttgtctcctgggccgtcctgcccagtgggaggcctccttggctgcttttgttcctggcctacccattgggttccagccatctccactgttgcagtggacatacggggcaagggccagcctgagggcactggagtggtctcagccctgcaaagggtcttctccaaaggcccttcccttagcctgggagggttggggttctccagggctggggtggtcagcagggttcaggaagccctcaaggccttggaagaacacagggctctcgatgtagggtgagagctcctgtctggagcctgctcggagctgggtggtcctgccaggaggcccctgcagtccccccttttcctgtagggagtcctgctgtccgtgatgtcagcctgactgcaggggacagtcctcagtccctagtgctggctgtgtagcctgggtcaggcccctgcacctgacacacagtaccattgtgcagagtgggcagaagcccactggcctctcactgatcagaatcatgggttgggggagtggggagcatgtggccctctgggtgtgttgacacctggcactgaggaggttctagctgccactcagcaatttctggcttccgtgaggaatctggcctccacctggagccagcaatgtctgtctggcactggctgagccccaggcatcagcacccctcaccacccggggaaagctggtttccattttacagaggacctggagacttggagaaaggcttgacacacgtgaggctggtcacggagaggtgggggggtcccagtgggagctcatggccatctggtcacctccctcctcatccctgtgcactccctgagccctggccagagccctgctcccagctacttcaggagcagtggcttttgtggcaatgggcaagcaggcagtggccggctctacccagcacacgtggcactaccatggctgcctggccggggggcagcctttgacctctacactactgaccacagggaaccaatgagattctccggatgtacatcgccctgacgggtctgcagcatgccggccgcatcctgactaccaggatccagtaggtgccattgtcaccgtgtgcttctcaggtcccatacctgcccagcaggggccagtccagggcagtgggaggaaagagctgccttgacctggagtgggggcatgggggtgtggcgcagccttgtggaggggaccttcccctgtggtagtggggggcttgctgcccagggaagccctcgctgccctgcccttatggccacagcaccctacagcttcagcataaataccgtatcccccatctggtccctcacactagaggcagctggtttttcagaacctgaagaatgagaggtgtccctttaaaggtgccaggcctcacagccaacataagccagtgtttctcttctctgcccttcttcccctcatgctcccctccacccccaccctaggggcacagtaatccaaaatcactgctggaggccaagtacaggttgctagtagcattttgtctccttcacaggagacagctgctgggaagctggctgtgactccacccctcatgggggagcatatgtgtggctcccctgaggagactggctgctctctggcaggtggtgggtttgggggggttcaggctgtagccaggggcccagcatacccaggccagaggggggcacggagcttctgggtgccgaatgggccatgttgctggacagtgagcgccagcagcgaggcctccagtcacaggaccatggactttctgcagtgagcttaaacaggccaaagtgagcacagtcatggataccgttggccggaggcttcgggactccctgggccgaactgtggacctggggctgacaggcaaccatggagttgtgcaccccagtcttgcggtgagtgggcctaacaggcataccccctatttcaatgccctcctgccagatctccttgtggcagaaaagatctcactgtggggggtctgggcttctccaggggaagttggggaacaccagctagtccatgacaccctggattgcttcccccagatggggcatctctgcctggtacccgggctgtgagacaggacagggcactgtagggatgaggtgctgaactgagtcctgtcttggttaataggacagtgccaacaagtttgaggagaacacctactgcttcggccggaccgtggagacactgctgctccgctttggcaaggtaaccaggccctcccaggcctgggtcgcaagcggtcctccaatttggccagcattcatgagactactttttgtcaagcatcctttgggaccaggcctagaacagaaatgttgatcaccctggagggatggggtggtgaggtcaggctgactttgtcagcctggggcccacttagctactcggatgggtacccttgctgggtgagttttctgcagtgtttttctgtgcacctttcaggtagagaggctccctagaatcgggagggcagctccacctggggcctgaatctagggacctgattggtggggcccttgctgctgaaggtggcagtagcacagtaagcactggcttctggtctcagccaagcttctgggacctggtcttgccttaacccctccctgaatctagagctcaaagagaagggaaaacagaaggtggctgggagccgttctcccacaacctgaagagaaaggtgttattgactccactttctcaaggaacacaggagactaagacaggcaaagatgcagcccagggagggaccatgtgggggactggtctaggtagtgagtccccacttggagcctctgtgatcccagaccatcatggaggagcagctggtactgaagcgggtggccaacatcctcatcaacctgtatggcatgacggccgtgctgtcgcgggccagccgctccatccgcattgggctccgcaaccacgaccacgaggtgagcccagcccagcctcacacagggcctggctgctgccatctgtcctgctgcactttaatgaagttgattgttgaggagggtgtggtcgggtgtgggggaggctgtgcaggttcaccatgcggtggccgtgggagggtctgtgctgctcaggagatggggctgttccctttcttcttcctgactgagagaagagggggtgagtgacaggggttcctgatcccagtgcccctacccccagcaagggacagaccctgcacattgcccgctgtgctggagggaggcgggtgcagtctctgaggacccactgtataccaggatctctgcctgcactttccagagcacctgcagataccaggattgtgacatctgcctttcagaggaaacagggtcagagatgttgagtcacttgctgttggggaaaggctgttggatcagggctggaattagaacccaagacggggtgactcctgtgccaggccttgtgacccctgccatgctacccagtttggctgataggctgggtttttgaagctcagaggtctgattccaggaatttgggcatatcttttctgtcctcggttctggcaggttctcttggccaacaccttctgcgtggaagcttacttgcagaatctcttcagcctctctcagctggacaagtgtgagtggcatgtcttgggggagggaaggaagggcccacttctaggcccctattgatggtgagctgtttctggaccctgtcaagctcccagagcctgctagctactcacagacctctgccttgagcgagggcctgggtaggcctgggcttagctgcagcagtgcccaccaggcactgtaggtgcatacctgccccattcaccaaggcagttgtatgtatatatgtgtgtgtgtgtatgtatgtatgtatgtatttatttcgagatggagtttcgctcttgttgcccaagctggagtgtaatggcgcagtcttggctccctgcaaactccacctcttgggttcaagcgattcttctgccccagcctcccgagtagctgggattacaggcgcacgccaccacgcccggctaattttttgtatttttagtagaaacagggtttcaccatgttagccaggctggtctccaactcctgacctcaggtgatctgcctgcctcagcctccaaaaatgctgggattacaggcatgagccaccgcaccgggcctgccaaggcaattttagattgagcaagtgcagagccctttgcgcaggacccctggcatctgcccagcatgcctggctgtattctcttttttttggagacatagtctcactttgtcacccaggctggctggagtgcagtggcatgatcttggctcactgcaacctccacctcctgggttcaagcaactcctgtgcctcagcctcctgagtagttgggattataggcacgcaccaccatgcccagctaatatttgtatttttagtagaaacaaacagggtttcaccatgttggccaagctggtctccaacccctgacctcaggtgatccgcccaccttggcctcccaaagtgctgggattacaggcatgagccactgtgcccagccctggctgtattcttgaagctgcccggggaaggctcacgaagggaggagcatctggttgtacctgattctggagacagcattttacctgcccctttacccactgtactccatccaaaatgaccctgcagtgccctgcagaggtctcaggccttggcctagagaacagagggctttgctcgtgctccccgctctgtctgcagtgctcttcctcttctatagccactcgaccatatctaggaatgcccagctcagtctacctctgaccctcacagtcctgttgacctgaggttctggatcagtgtccccacaaagcccagtcgtgttgccaagtgatgggtgtaggcgccagcactgtggcacttgctgagagtggcatatgattttttgcaggtcctagccctgggggtagcccagacacccccccagtgctgacaggttatgtgctgtggagggtgctgaaatggtttctcctccagtgggctggaatcacagatgggctgtttacggagcaagtgccggctccaccccatgagatctgggggttagagatgagcaggatgagtcctttgtaactgagaatgaagctgtacccctttctctccctgcagccctgaatcacttgctgggggtctggaggaggggttcacccttagggctgcttcatggtgggtgggctgactttgtggaaaaatgcccccacttcagccatgtttgtcttatcacggtgcagaaagatcacccaccatctctccttttccttcccagatgctccagaaaacctagatgagcagattaagaaagtgtcccagcagatccttgagaagcgagcctatatctgtgcccaccctctggacaggacatgctgaggcaggggacagtgtcccctgctaccgcccgcccctacccatggcccgttgctggatgactgttactcttttttcagaaggtgttgggattatcacaggttaagccttttgttccccgtctgcacctgaagggttgtcgcctggcctgggagagcctcttccaggttttgacctgcaggcagtgctctctaacaggaccatcacagcttctgaactgagccggagagagagaatggaattgctgacccctggaactggcgggtattctggtcattgaggagacaccatagtggaaactggggcttatgctgctgcctccagggtgtgaggtgggtggggacctgtgtcaggtgtggatagccatttctgctcaaccacacattctctaagaaacagcttgaaagctctgtctgggtcattcatttaaactagaagcagaggcacttaaaacatgtaccaggaaccatttaacaaagaatataaaatgtcacaatctgtgtactgttagcctttgctgtacttgtcacactgttccttagaaccagcctttaatgggtgacagcaggaccctgagaaccaccctttggtgatggcctcgggtcccctttgtcctcaccctgcaaggagggcccagaatgctaaggagcagacacacagtgcaggccacaatcccttggggttatgagcccttagtttttatccttctcaggagatgatggggaggctgtctcagctgatgatgttcccacctagggactttagtttctttacaagaactggcttctactcttgaggagaggatgaatggtatctccaggccagcaggcctttgcatttctccagcctcccttctgctggcacttgaaagattacaccaggtcccagcgtgctcactgtggtgaactttaagctttgatgtggtccttgggtggtctggagctctaaaatgcctattgtggacactcccttgagcacagagaaggcagccgactctttttcctccaagtatattcccaatttactgtgatgctggaaataggcaaggaggagactgggaacttggagagctgagctggctgagtggggctggcctgagcattctgccaggggtttggtaactagtttttaaaatggggaaagtttgtaaatattgtgaccgtgtaaataacctctcagtgaaacctgaagttctgttagtgatagcagggcagcattttgcacaaaatgaagcatgcatacctctggacagaaggctgcttagagtttctttgcacaggagaagtttggggaggggctgtcagacccaccccccttctgtgcagccttctggaagggggcttcactctaggctggtggcgtgtaaggcctcagtcttacatgccaatggagaatggcaagttctccattcatccatctgggttgaaaaggcctagcgaccagttcaagcctctccctctcatctgtagttgctaacttttcttaaacatgttgtgggaagaggagaccccagcaagtgtttcttaagtgatttcaccagtgaaacccccaggagacttttgctgggaaggctggcagtggagctcactaggaagccttcttaccaaggaaaagccttgtgttcttaggctagacagctctcctagctggagcctccttgagagccacagcagtaactgtgggcctgggacatgcccacagagagcaggtctcttcaggcaacctgggagatctagggcctactggggagggagggagccaagtctaggcaaatggagaaagtgacatttcagcaaacttgttagcacttccatggagctgtgatcagttgtccttaggagtcgaggaggagaggaagccatcacgttcacctgacctagttttctgggagaagtttctctggcagaccttgtttttagataggctcatgtctctttctccctgaacaaaggttctggctctgttaaccaagtttgggttctatgttaacctccagatgatcctgagatcaattttcataaacagggataaagaggaagaggacttggagggactggtacagcaagacctacgtttcctgtctctgccttaccccaaagaaagaactgtcagtatctttgccgctggaaggtcccagtgaagcccagagcctctgcccccagctcttggctggacacctagagatcagtcatgggtaatagtgttgaagctcaggaagcctttagacctgtcttccaacttccccactttatagccaagaaaccagacccagggcatgaagggatttgcctcaagtcacacaaatgtcacacttggggctagaatcctggtctgagttccagcccagcattcaatctcttttttcagacccattctgcatcttgcttttcttagcatagaaagtttggttgatagtgtaaacaaaatggataccactgaagatgcagagtggcacagagctcctgcctgcccacggcatcaggaggcccagcttggcaaacccttgcctgttacctgttacaggctttggtgcgggcgaagggagcagctcgaggaaaggtggtggtttcttgtacagatcaaagtccacgtggtgcctgtcccagctccacctgtctcgatccaacacaggctccagtacattagcaaacagggagttttccttccactcctaaattgggggagtaagtaaatcaggaggagaaaggtccctatggacaccccacctgagaccctgctcttccctgtggacctcattcagctctttgatgggtggcagcttgagatcctgaaagctgctttcggtgtcgctctgaagacctgtcacttggaatcccctggctgtgagccaggcctggcgggatttcttctgggctttcttctcctcttccttcaagtccaggggctccaccatggctgagaggtaatcctgtgagtacgtgaatctctttcttggctcctagaaatgggggcagacaggttggggtggaagggctaatagcaatcttggatttatttccaagtaggaatcagaaacagctgggggcataatcatagttcctgacaatgtaaatagtgcattgagaggaaatgactgtgcagtagccctgtaagggacatattattgtcccctttgatgggagaagccgtttcctaaagttaatatgtgctggaagcctaaaccatggctttcccttctgttggtagctgccttgataagcagcaatcataaagtgttccccagaggtaaggatgctacagttgttctcctttatgtacatctgagcttacattgaggatcttgggcttaccctcaggtgtggaggattcacatttagtgtggaacagaacacctctcaacatctgagccttgtctacttcccctagctgattggctttcatctgtatagttgagatcccccactgacctccaggcaggcatggtcagaataaagaactcatg

SEQ ID NO: 1124 - DNA, 14949 bp, Homo sapiens
agcactgcctggaagtgtggggtgagagctcctcctaggacacccctttccccttggggaaagaattgtgcccccaggcccttccccgcggaggtccctctcctccttccccctcatctccccttcctgggacagaaagtgcctccacctgcatccccaggggcccggcctccagggcccgctggccccacagcaggcaagctgagatgacggtcaagctggatttcgaggagtgtctcaaggactcaccccgtttccggtaagtgtgaactggtctggggggctaaggaggggaaagtctaacacccccagcacacacacacctttccccaggccaggtctccttccagggagcaggcctctaagaggcaggagcgagcctgtgggccaaagtggtaccccagctgtgaaagcagggtactccaatgctctctgcccctgcatgctcctcctggcctctgcagtttccctcacccctagagctggcattccctctggcctctcagtgggacccctgcccctcccccagcacctgctctggggcggttagcaacttcctgccctggccacatccaccctccttctacccttcctgctctggcctgggctgtggtagctcccagactgcagagcgggcagagcacaagtaggtgggtggggggcgagcctctcaactctgcagctttctcctccgtacccaccgccctgcgactccatcccgcctgatgaggcagacagaccagatggacccaagctctcttcccatgaccccctctttcccagagcctctattgagctggtggaagccgaagtgtcagaattggagacccgtctggaaaaggtgaccctgacatggagaggtgacccaggagtggattaggttgagaggggtagggccagggagaaagctggagacacagaatgcatcccagggattattgaatactgtgtaggggagatattttggagactgcagagaagcaaaaaaggtggttctgtaccgacaagaagctcaggatcttggaaaacaagacttacttttgggccaggcatggtagctcatgcctgtaatcccagcactttgggaggccaaggtgaatggatcacctgaggtcaggagttctagaccagcctggctaacatggcgaaaccccatctctactaaaaatgcaaaaatcatccaggcttagtggcacccatctgtagctccagctactcaagaggctgaggcagaggaatcacttgaacctgggaggcggaggttgcagtgagccaagatcgcaccactgcactccaggctaggcgacagagcgagactctgtgtcaaaaaaaaaaagacttaattttggacttccttgttctgctcttgagctcctgcattgtgccaggccctgggcattcagggaggacaagatcatttctgctcccacggagcccaaaggctgactagaagacaaaccagtgaaacgtttcaattcaagacagtaaggtgtcccctgagcactctatcaaacagcatgttcacacaaatacacactcaaatgctctctcattccccttacttcgctttacttttctctgcaacatttacctctgacacattatgtatttgcttgctatatattagttctctattgctgtgtaacaaattgtcacaaatttagtgggcaacattgttttatgggcaacatggtgagacctcatctctacaaataataattttatttttatttttatttatttgagatggagtctcgctctgtcacccaggctggagtgcagtggtgcgatctcggcttactggaacctccacctcccaggttcaagtgattctcctacctcagcctcccaagtagctgggattacaggtgtgcaccaccacacctggataattttttttctttttgtatttttagtaaagacagggtctcaccatgttggctaagctggtcttgaactcctgacctcaaatgatctacctgccgcagcctcccaaagtgctggcattacaggcttaagccaccgcacccggcctacaaataataattttaaacaatggactggatggagtggccacagctgtgatcccagatgcttcaatactgggctcaagtgatcctccctcctcaacctccccagtagctgtgctacaggcacatgccaccacgcctggcttttttaaatttaaatttattttttgtagagatggggtctccctatgttacctaggctggtctggaactcctggcctcaagtaatcctcccacctcagcctcccaaagtgctggaattacaggtgtgagccaccacacctggcctgaattttttattttgagtaaattattgactcaggagactagtgaggagaggtctcatgtacccatcacccagcttcccccagtggtgacatcttatacaatactagtacattattaaaaccaggacattaatagtgtcacattacaattaacaataaactcggccaggtgtggtggctcacgcctgtaatcccagcactttgggaggccaaggtgggcggatcacgaggtcaggagatcgaaaccatcctggctaacactgtgaaaccccgtctctactaaaaatacaaaaaattattcgggtgtggcggcaggcgcctgtagtcccagctactcaggaggctgaggcaggagaatggcgcgaacccgggaggtggagcttgcagtgagtggaggtcgtgccactgcactccagcctgggcgacagagtgagactgtctcaataaacaaaaacaaacaaacaaaaaaccccaataaactctagccaagctcagtggctcacgcctgtaatcccagcactttggtaggctgcggcaggtggatcacgaggtcaggacttcgagaacagcctgaccaacatgatgaaacccccatctctactaaaaatacaaaaattagccaggcgtggtggcacgcacctgtaatcccagctactcaggaggctgaggcaggagaattgcttgaacccaggaggcggaggttgcagtgagccgagatcacgccaccacactccagcctgcggaggtcgcaatgagccgagatcgtgccactgcactccggcgtgggcgacagaccaagactctgtctctaaataaataaataaactctatagatcctactttgattttacattttgcatatactcttttttggtgtttttgtgtataattctatggtactttatcacgtgtatggattcctttaaccatcaccacacaccaatggacacaaggaattcctttacagtggtacccgacacccttcccacacttctttaatctgtggtaaccgctgatttgttctccatctctctacttttgtcatttccagaatgttccatatatagaatcatacactatgtgaccctttgagatttggcttccccctcccccctcactcagaataatgctgctgccgggtgtggtcgctcatgcctgtcatcccaactactcaggaggtcaaggtaggagggttgcttgaggccagaagctcgagaccagcctgggcaacatagcaagacccttgtctctaaataatgttctgttttgtttttaaattagccaggcatggtggtgtgtgcctgtagtctcagctactcaggaagctaagattggaggatcccttgaacccaggagttcaaggctgcagtgagctatgatcccaccactgcactccagcctgggcgacagagacctcaactctaaaaataatcataattttttaaaagatgaatgctcttgaagtttatccaagttgttgcacatatcaacagtttgttcctttttattgctgagtactgttctattgaacagatgtcccagtctgtcactagtccagtgttatgaaagtttcttactcatctaagggggaggggctgagatggtaaggaaaaaaactagacacagagtcctcagattcacacagtgatttgtgaacatccttgtaccttgtcacagacaacccatggtgatgtctgataagatttgatctcggtcaggccaggtgcagtggctcatgcctgtaatcccagcacttcgggaggccgaagcaggtggatcacctgaagtcaggagttcgagaccagcctggtcaacatggtgaaaccccgtctctactaaaaatacaaaaaattagctgggcgtggtggcgggcacctgtaatcccagctactctggaggctgaggcaggaggatcgcttgaacctgggaggtggaggttgtggtgagccaagatcatgccattgcactccagcttgggcaacggagcaaaactccgtctcaaaaatagaaaaataaaaagagatggggtttcactatgttggtcaggctgatatccaactcctgacctcaggtgatccacccacctcagcctcccaaagtgttgagattacaggtctgagccaccttgcctggcctatcaagtctctttgtcagtcaaaagagccagataggatgggccccaggagtaccccggcatttcctcttggccctgacccgtggtctagatgatggattaatatttatgagggaacgtgcagtgagcacagaatgggacaactcctagcagtaaatactatagattttatttatttatttatttttcgagacagagtctcggtctgtcacccaggctggagtgcagtagcgccatctcggctcactgcagccttgacctcccggattcaggcagtcctcctgccttagccccccaggtaactgggattataggcacttggtgccatctcagctcactacagcctcagcctcccgggttcaagcagtcctcctgccttagcctcccaagtagctgggattacaggcatgtgccaccatgcctggctaatttttgaatttttagtagagatgaggtttcaccatgttgcccaggctgctcttgaattcctgagctcaagcgactggcccgccttggcctcccaaagggttgggattacaggtgtgagccaccacgcccggccaatactgtagaatttaatagcaaccaggtagagcatccagaccatgcaggaatctccacggagctctggatctaagcaggtaggcagggcaggaagagatatgtgcgagtggacagggaaagatgttttggaggtaaggctgacagaggtgttggcgacaggctgagaggaatgggcaggaattgggtttcaggcccaaggcagtgggagcaaagacgcagcgataagaacacagcaggtatgtgttagatacagggagagctggatgagcctggagggcagtgaggccaggcaggaataggggagcgccgccctgggcaaggggagaggaagtggggcaggtgtgggggcatcaccaggtgtgaggatgatggcacagctccctgttaccctccttctttcccagctcctgaaactgggcactggtctcctggaaagtgggcgccattaccttgctgccagccgcgccttcgttgtcggcatttgtgacctggcccgcctgggtccaccagagcccatgatggcggtatgcggagggtctgcatctgggagggaaggggtctgggatgaggaggtgatgctgtggaagaggagggctggcctggggtctgcaggttccaggccacagcagggctgggctgctgtccatgacagccgtagcaggctgggtctcgagtcgggagggtgctgccaccccatgcctggtactctttctgtgcctcttcttgcctaggagtgtctggaaaaattcaccgtgagcctgaaccacaagctggacagccatgcggtaagtaggggaaggtaaggattgtcggggtggtggccaggtcacctgtggtcctgaccccagtctaccaacttctccttccctcaggagcttctagatgccacccaacacacactgcagcagcagatccagaccctggtcaaggagtgagatggggccgggcgcagtggctcatgcctgtaatcccaacactttggaaggccaaggcgggaggattgcttgagcccaggagttggacaccaacctagccaacatggcgaaactgtctccacaaaaaatacaaaaattaggccgggcacggtggctcatgcctatgatcccggcattttgggaggccaaggcgggcggatcacctgaggtcgggagttcgagaccagcctgtctaacatggcaaaaccccagctctactaaaaaatacgaaaaaaaaaaattagccgggcatggtggcaggtgcctgtaatcccagctactcaggaggccgaggcaggagaatcatttgaacccaggaggtggaggttgcagtgagccaagatcgcactacttcacttcagcctgggcaacagagtgagactctgcctcaaaaaaaaaaaaaaaaaaaaaaaaatagccgggcgtggtggcacatgtctgttgtcccagcttcttgggaggctgaggcaggagaattgcttgagcctggaggtcagggctgcggtgagccatgattgtgccactgtactccagcctgggtaacagagcaagacccggtctcaaaaacaaaaacaacaacaacaacaaaaattttttaaagggggagtgagatgggagagaagggggccttatttctcggaaaccagccctgctgccctcttcccatggccacaggagcctccccagtgacggagttgtgagattgggggtttctggtgtcctgacttccgtcccagggatcaccttgggtttcccacgttgcagagactaactgaaaggacatgagggctttaccctgggaatgctctgctggggcaggtgggtgttagctgcgattctgtgttattttcccatcctcagaggtctgcggggtttccgagaggctcgccgggatttctggcggggggctgagagcctggaggctgccctgacccacaacgcagaggttcccaggcgccgggcccaggaggcagaagaggcaggagctgctttgaggacggctcgagctgggtaccggggacgggcactggattatgccctgcaggtgcctgccccaatctgtcttcctggggtaccagagcctcaagtgtcacctcgaggcttgggggtctccagtgtgcagtgggaaggggtgctgtgtcttcaagactgatctggggttttttacgtcctcttttacgtcctcagatcaacgtgattgaggacaagaggaagtttgacatcatggagtttgtgagttgtggcgggggtgagggcagggtggagaagagcctgctgccagcacaagggaatggggagaggggttcttcctcagccttcccactgcccgccttgtcccccaggtgctgcgtttggtggaggcccaggctacccatttccagcagggccatgaggagctgagccggctgtcccagtatcgaaaggagctgggcgcccaggtggggccccagggcacagcaggtggtagagggaggttagggactcctaactggggggccttggacatctgagatgcccttcctgtgcccagttgcaccagctggtcttgaattcagcacgagagaagagggacatggagcagagacacgtgctgctgaaacagaaggtgaggggccaggtgcggtggcccacgaccgtcatcccaacatgttgggaggctgaggtgggaagattgcttgaggcctggagttcaagattagcctaggcatcgtagtgaaactccatctctacagaaaattttaaaattagctggtgtggtggcatgcacctctagttctagctactcaggaggctgaggtgggaggattgcttgagcccaggagttcaagactgcagtgagctatgatcacacaactgcacttaagcctgggtgaaagaacaagaccctgtctctaaaaataaattttaaaaagtatttcaaaaagcagaaagtaagggctagggctgtgggcaggaggcagatgcctatggccttggtgtctgcccatctcagttgccctttgatcctcttgtgcctccaggagctgggtggggaggagccagaaccaagcttaagagaggggcctggtggcctggtgatggaaggacatctcttcaaacgggccagcaacgcatttaagacctggagcaggtgaggagaggacacccccaatcagcccgccccacccaatgatgtattttcgagtggtaatagcacactaagcactgcaaggaaaaacagacgaacccccctgcctcagtagagtttcattccatcagcaaagacagaggataaacctagtatgtaaattacgtgctatgttagaaggtgatagtgcttgctataggagaaagatgataaagcaagggatgtggggagctgggtaggggttacagttctaaatagttgggcagtgtgggcttcatgagaaggtaacttttgaacaaagacttgaaggatatctgggggaagaaagttctagacagaagaaagagccagtgccaaggccctgagatagctggggagttggaagagcagggtggtggccctgggtctggacagagtgagggaggaggatgtgcaggagatgaaatcggagctaatgggggcatgagtcattatagggccctatagatttttgtagggatttggggtctactctgagagcaattgggagccgctatagggtttggaacaggatggtggcatgctgtgacttgactcctttcccttctagggccactgctagcccacatgggatctctgtacaaattagaaaatggagctgcttccccaagatactcttttttctttttcttttctttttttttttctgttttttttgagatggggtgtcactctgttgcccagcctgcagtgcagtggcgcagtctcggctcactgcaacctctatcccctgagttcaagtgatcctccctcctcagcatcctaaatagctgggaccacaggcgtgtgccatcacgctcggctaatttttgtatttttggtagaaacagggtttcaccatgttgcccaggctggttgcaaactcctgacatcaagcaatccacccgcctcggcctcccaacttgctgggattacaggcgtgagccactgtacctggcccccaagattctttcttttctttttttctttttctttttttttcttttttgatggagcctcgctatgttgcgcaggctgcagcacagtggtgcgatctcagctcactgcaacctcagcttcctgggttcaagcgattctcctgcctcagcctcccaagtaggtgggattatagccgcctgccaccacgcctggctaatttttgtatttttagtagagacggagtttcaccatattggtcagggtggtctcaaactcctgacctcgggtgatccaccacccccatcagcctcccaaagtgctgggattacaggtgtgagcccagcctaaatagtattttttaaattgtagcaatagacattttattagaaaaagaattttactgccatctgctggaaagttgtcttcataactatatgaaatctgggttgtccaagataggaatagcatcctttagatgttccaatctgcacaattgtccacccttctctggaatgtctcgtggaacagtcagcccaggtgtctgtcctctcagtaagatcctcatgggcaaaaagcacagcctctcttccgtccctcatcctaaagctgcctatgtctgtaatgatttccttctcttacagacgctggttcaccattcagagcaaccaactggtttaccagaagaagtacaaggtgagtggacctgggtcctggatgcctgggccccagggagactcagctcttgcctgcagctggacatctggccccttatcaccttatcctgccaggaccctgtgactgtggtggtggatgaccttcgtctctgcacagtgaaactctgccctgactcagaaaggcggttctgctttgaggtggtgtccaccagcaagtgagtgcaatccccaggggtgatactctaatatatctaaacaactgccaatctgaaaggcagggcccaccacaatggaggccccccatgcagctccagactttaatttaattctttggcggctggactggggggccattgtggaagagggtacagggtgatgggggatatttaggagaatattaccaactggtacagaagtctttcaatgcaactggaactggttgaatactggctgaatgtcagtctgcccatgctgccactttgcttcccaggcctcagacccctctgccatctccctcaccctcctacctaggtcctgcctcctccaggctgactcagagcgcctcctgcagctgtgggtcagtgctgtgcagagcagcattgcttctgccttcagtcaggctcgccttgatgacagcccccggggtccaggccaggtaccttaacctgggggtgcggagccaggctgcctgtggagatggggcaccctttaccctaggccccttggccaccctttcttcccctctctcccccagggctcaggacacctggccataggctctgctgccaccctgggctctggtggaatggccaggggaagggagcctgggggagtcgggcacgtggtggcccaggtccagagtgtggatggcaatgcccagtgctgcgactgccgggagccagccccggagtgggccagcatcaaccttggtgtcaccctctgcattcagtgttccggcatccacaggttactccacaaggcccatgcgggagccccactccttcgggccacagtgcggctccaatacagagcgcatcacaccggcccctcttccttccctgtcctggcttcctctcttagcttctggctttgtcactgggtaccaggcctgggcccaagcctctggggtgccagttggacccaggcgggcctagcccctctgtgtcctagtctggccagaattgggggatacccagaatttgttggcttggttggaagaagtgtggggtcaaggctgctgagggtgggggagccagtgaagactaggcagagaaacggtcatgaggccttagcaagtatctaaggccctcgccccccacctcagtgtggtggaagggaggtgacatgggagaggttgtccaggccaaagtgtcacaagtgtcactagagaagggaggtggctggagtgatgagggccttgaaatgaaacctaaggaagaaggaatggtgacgaggcagagtcctgccagggccaggtcaaggctacatggcggttacatggccgcagctgccctgcctcctgggccagcacctctgcacgggcccccatgccagccttgcctcccagtgtcttcaggagcagcagcagctccccaggccactgcccccctgcacagggcctgaccctccccctctggccctccaggagccttggtgttcacttctccaaagtccggtctctgacccttgactcatgggagccagaactagtgaaggtaacttagcgtattgtgaagattgggggcaagaacttggggtggggcaaggacatggcggtgcaggggcgtgatccctgaggagtcactcacccccaccttccctgtctctgcctctgcctgggcctcctgaagctcatgtgtgagctgggaaatgtcatcatcaaccagatctatgaggcccgcgtggaggccatggcagtgaagaaaccagggcccagctgctcccggtgagcttggggtttagcctcccaggggaatgggggacccctggagcagaagagggaagactgcgtgcttctcccctcccacaggcaggagaaggaggcctggattcacgctaaatacgtggagaagaagttcctgaccaagctgcctgagattcgagggcgaagaggtggccgggggcgcccaagggggcagcctcctgtgcccccaaagccttccatcaggccccggccagggagcttgagatccaagccaggtatagggttggttgggcattcattgagcatctgctgtgtgctcggcatcgtgccaggtagcgccgggaggcacagagtgtgaagcccaggccttccgctggacaatgtcggagggaccggactgccgtttcaggggttacggtggagtgtgacattaagaatgagaaggaatgtggggctgggcgtgggcagggagggtaaggggtgccaacagcacaagaaaaggagagagagagggggtgggtttggctggagcgtcaggggttgagagctgaggccaagtgtggttggaccagatgaggtgatgatgccgtctctcccccacaccctagggactcgtacacatgcatacgcatacttacacatacccacacttgcatcactctattccctccacagtcccaagctccccatcatttagaagagacctgtcccattatagcattgggacactgctgagggttttcttcccagactcggagctgcttccccctaacagaaccaaatcccccgaacagagcccccctctgaggacctgggaagcctgcaccctggggccctactgtttcgagcgtctgggcatcctccatctcttcccaccatggctgatgcccttgcccatggagctgatgtcaactgggtcaatgggggccaagataatgccacaccgctgatccaggccacagctgctgtaagagccctgctgacctctccaccccaccctagggctctgacacctactcctgactctgggccctgcccttacctcctttccccaccacctgttccctagggcttccacccatagggagagatcaacaatagagactggttgctaagagtgtgtgatttggaggcagagaacctgagtttgaacccaggctctcacctcttacaggagacttttttttttttttttgagacagtctcgctctgtcccccaggctggagtgcaatggtgcgatctcggctcactgcaagctccgcctcccgggttcacaccattctcctgcctcagctgcctgagtagctgggactacaggcgccagccagcatgcccggctaattttttgtattgttagtagagatagggtttcaccgtgttagccaggatggtctggatctcctgaccttgtgatccacccgcctcggcctcccaaagtgctgggattactggcgtgagccactgtgcccggcctacaggagacttttaacaagttattaacctctcagcctcatctgtaaaatagtaacatacctcaaaagcttgtactatggatttatatatgaatacatgcaaagagctagagccaagcctagcttggttacagttagctgtaaccccttccacactcctgattaccacactccaccctcccattctctgaactggcgccaccctaagacatcttgaaatccaccactagggatgccaccctcaaccccccttctcgacttctccatgcagaattctcttctggcctgtgagtttctcctccagaacggggcgaacgtgaaccaagcggacagtgcgggccggggcccgctgcaccacgcaaccattcttggccacacggggtagggatgatggcatggggaggaaggctgggagaagttgggcggccggctgaccctggctcttctctccaggctcgcctgcctgttcctgaaacggggagctgatctgggggctcgagactctgaaggcagggaccctctgaccatcgccatggaaacagccaacgctgacatcgtcaccctgtaagaatgcctgaaggggcggggctggcgctgggactccccccacccccgcccacccacgttcgggcgggcgggcggggctgacgccgaaacagaagcctgtgctgtggggcctcggaaaggggctgggccagcgccggggccaggctcgagaaaggctgcgcgaagtgtgcactgggacgtggagtagaaggcaggcgggagggcgggcagggtgcaaggatgcttggcccaccctgagaggcgtaattcgcccatcaacattgctgtcaggcatctttttagcactagacgtgaccccgggggtgggggcagatgaacggaacgcaacccagctcaaaggatgggaagttgtgggggaggtgaggatagtctttttttttttttttgagacggagtctcactctgtcgcccaggctagagtgcaggggcgcgatctcggctcactgcaacccccgcctcccgggttcaagcgattctcctgtctcagcctcccctgagtagctgggactacaggcgtgcgccaccacccccggctaattttttgtatttttagtagagacggggtttcaccatgttggccaggacggtctcgatctcctgacctcgtgatccgcctgcctcggcctcccaaagtgttgggattacaggcgtgagccaccgcgcccggccaaagatagtgtcgttcatttcttaattccctcctcttcaggctacgactggcaaagatgagggaggctgaagcggcccaggggcaggcaggtaaagaatacacccaccccaccccccaggcccaacacctgaactctgggcttctggtccacggtgacctctctccctagtgcccagctgcattcattccgttatttaacaaatgcgtattgggcgcatgcgacgtgccaggccctggcaaggcataggtgctggcgcagtgcccgcggcgcgcacgttcccacccaggctcggagcgcgaggtccccaggtgggccccaaccgccggatcctgcccttctgcactggggcccagccgcctcccggcctttcctccctcccccaggagatgagacgtatcttgacatcttccgcgacttctccctcatggcgtcagacgacccggagaagctgagccgtcgcagtcatgacctccacacgctgtgacccgaggcccacggggcccgcgcctgcctcccttccccgccaccgggccctctgccattaaagcctccgtgcttcgctcttc

(The sequence listing continues in the following parts.)

1-100. (canceled)

101. A method of modulating expression of a target protein by a cell having a pre-processed mRNA transcript (pre-mRNA) that encodes the target protein, wherein the pre-mRNA comprises:
a non-sense mediated RNA decay-inducing alternative exon (NSAE) comprising an alternative 3′ splice site upstream of the 3′ splice site of a canonical exon and within the canonical exon, or downstream of the 3′ splice site of the canonical exon and within an intron,
the method comprising contacting a NSAE-modulating agent to the cell, wherein the NSAE-modulating agent modulates processing of an mRNA transcript from the pre-mRNA transcript by modulating splicing of the pre-mRNA at the 3′ alternative splice site, and wherein the splicing of the pre-mRNA at the 3′ alternative splice site modulates the expression of the target protein.

102. The method of claim 101, wherein the target protein is selected from the group consisting of ABCA5, ABCA7, ABCD1, ABR, ACAD9, ACAP1, ACTN4, ADAMTS13, AKR1E2, ALG3, ANKRD29, AP3M1, ASAP3, ATRX, BBS4, CATSPER1, CCDC40, CCDC88B, CD4, CES2, COL5A3, CPSF1, CSPP1, CTH, DAB2IP, DBN1, DDX51, DEAF1, DGKE, DMKN, DOCK8, DOK5, EIF2B5, ELAC2, ELP1, ETHE1, FANCA, FASTK, FPGS, GAS8, GCK, GGA1, GON4L, HELQ, HPS1, IL17RC, INVS, IRF3, KLKB1, LAMC3, LDAH, LIMS2, MALT1, MAPK13, MCAT, MCEE, MPI, MSTO1, NLE1, NLRC5, NOM1, NPR1, OSGEP, PABPC4, PCOLCE, PLD2, PNPO, POLE, PON2, PYCR1, RAD52, RHBDF2, RMND1, ROBO3, RPGRIP1, RTTN, SIK3, SLC12A7, SLC22A3, SLC25A37, SLC27A5, SMPD1, SNRPB, SP140, STAMBP, SULF2, SYNJ2, TAZ, TDRD7, TFB1M, TM6SF1, TOR1B, TRAPPC6B, TRIP4, TRMU, TTC19, TYMP, UMPS, WDR11, WIPI1, YY1AP1 and ZC3H14.

103. The method of claim 101, wherein the splicing of the pre-mRNA at the 3′ alternative splice site increases the expression of the target protein in the cell.

104. The method of claim 101, wherein the NSAE comprises an alternative 3′ splice site upstream of the 3′ splice site of a canonical exon and within the canonical exon.

105. The method of claim 101, wherein the NSAE comprises an alternative 3′ splice site downstream of the 3′ splice site of the canonical exon and within the intron.

106. The method of claim 101, wherein the agent is a small molecule or a polypeptide.

107. The method of claim 101, wherein the agent is a nucleic acid binding protein.

108. The method of claim 107, wherein the nucleic acid binding protein contains a TAL-effector, zinc finger binding domain, a Cas family protein.

109. The method of claim 101, wherein the NSAE-modulating agent binds to a targeted region of the pre-processed mRNA transcript.

110. The method of claim 101, wherein the NSAE-modulating agent:
(a) binds to a factor involved in splicing of the NSAE;
(b) inhibits activity of a factor involved in splicing of the NSAE; or
(c) with binding of a factor involved in splicing of the NSAE to a region of the targeted portion of the pre-processed mRNA transcript.

111. The method of claim 109, wherein the agent is an antisense oligomer (ASO) complementary to the targeted region of the pre-mRNA, or a vector encoding the antisense oligomer.

112. The method of claim 111, wherein the antisense oligomer is at least 75% complementary to the targeted region of the pre-mRNA encoding the target protein.

113. The method of claim 111, wherein the agent is the antisense oligomer, and wherein the antisense oligomer comprises a backbone modification comprising a phosphorothioate linkage or a phosphorodiamidate linkage.

114. The method of claim 111, wherein the agent is the antisense oligomer, and wherein the antisense oligomer comprises a phosphorodiamidate morpholino, a locked nucleic acid, or a peptide nucleic acid.

115. The method of claim 111, wherein the agent is the antisense oligomer, and wherein the antisense oligomer comprises a 2′-O-methyl moiety, a 2′-Fluoro moiety, or a 2′-O-methoxyethyl moiety.

116. The method of claim 111, wherein the agent is the antisense oligomer, and wherein the antisense oligomer comprises at least one modified sugar moiety.

117. The method of claim 111, wherein the antisense oligomer consists of from 8 to 50 nucleobases.

118. The method of claim 101, wherein target protein is SYNGAP1 protein, and wherein the pre-mRNA comprises a sequence selected from the group consisting of premma_ENST00000293748.9, premma_ENST00000418600.7, premrna_ENST00000428982.4, premma_ENST00000449372.7, premma_ENST00000470232.1, premrna_ENST00000479510.2, premma_ENST00000628646.2, premma_ENST00000629380.3, premrna_ENST00000635885.1, premma_ENST00000636075.1, premma_ENST00000636116.1, premrna_ENST00000636146.1, premma_ENST00000636193.1, premma_ENST00000636436.1, premrna_ENST00000636443.1, premma_ENST00000636640.1, premma_ENST00000636731.1, premrna_ENST00000636905.1, premma_ENST00000637052.1, premma_ENST00000637194.1, premrna_ENST00000637490.1, premma_ENST00000637587.1, premma_ENST00000637671.1, premrna_ENST00000637721.1, premma_ENST00000637911.1, premma_ENST00000638127.1, premrna_ENST00000638142.2, premma_ENST00000644458.1, premma_ENST00000645250.1, and premma_ENST00000646630.1.

119. The method of claim 109, wherein target protein is SYNGAP1 protein, and wherein the targeted region of the pre-mRNA comprises a sequence with at least 80%, 85%, 90%, 95%, 97%, or 100% sequence identity to a region comprising at least 8 contiguous nucleic acids of a sequence selected from the group consisting of SEQ ID NOs: 166-169 and 980-983, and complements thereof.

120. The method of claim 109, wherein target protein is SYNGAP1 protein, and wherein the targeted region of the SYNGAP1 pre-mRNA comprises a sequence that is complementary to at least 8, 9, 10, 11, 12, 13, 14, 15, 16, 17, 18, 19 or 20 contiguous nucleic acids of a sequence selected from the group consisting of SEQ ID NOs: 1-165 and 4300-4352, and a complement thereof.

121. The method of claim 101, wherein the agent comprises a sequence that comprises has at least about 80% sequence identity to a sequence selected from the group consisting of SEQ ID NOs: 1-143 and 4300-4352.

122. A method of modulating expression of a target protein by a cell having a pre-processed mRNA transcript (pre-mRNA) that encodes the target protein, wherein the pre-mRNA comprises:
a non-sense mediated RNA decay-inducing alternative exon (NSAE) comprising an alternative 5′ splice site downstream of the 5′ splice site of a canonical exon and within the canonical exon, or upstream of the 5′ splice site of the canonical exon and within an intron;
the method comprising contacting a NSAE-modulating agent to the cell, wherein the NSAE-modulating agent modulates processing of an mRNA transcript from the pre-mRNA transcript by modulating splicing of the pre-mRNA at the 5′ alternative splice site, and wherein the splicing of the pre-mRNA at the 5′ alternative splice site modulates the expression of the target protein.

123. A method of treating or preventing a disease or condition in a subject in need thereof, the method comprising: administering to the subject a pharmaceutical composition comprising:
(a) a non-sense mediated RNA decay-inducing alternative exon (NSAE)-modulating agent that modulates expression of a target protein in a cell comprising a pre-processed mRNA transcript (pre-mRNA) that encodes the target protein, wherein the pre-mRNA comprises:
(1) a non-sense mediated RNA decay-inducing alternative exon (NSAE) comprising an alternative 5′ splice site downstream of the 5′ splice site of a canonical exon and within the canonical exon, or upstream of the 5′ splice site of the canonical exon and within an intron;
wherein the NSAE-modulating agent modulates processing of an mRNA transcript from the pre-processed mRNA transcript by modulating splicing of the pre-mRNA at the 5′ alternative splice site, wherein the splicing of the pre-mRNA at the 5′ alternative splice site modulates the expression of the target protein in the cell; or
(2) a non-sense mediated RNA decay-inducing alternative exon (NSAE) comprising an alternative 3′ splice site upstream of the 3′ splice site of a canonical exon and within the canonical exon, or downstream of the 3′ splice site of the canonical exon and within an intron,
wherein the NSAE-modulating agent modulates processing of an mRNA transcript from the pre-processed mRNA transcript by modulating splicing of the pre-mRNA at the 3′ alternative splice site, and wherein the splicing of the pre-mRNA at the 3′ alternative splice site modulates the expression of the target protein in the cell; and
(b) a pharmaceutically acceptable excipient and/or a delivery vehicle,
wherein the disease or condition is treated or prevented in the subject by the administration of the NSAE-modulating agent by a modulation in expression of the target protein.

124. A composition comprising a non-sense mediated RNA decay-inducing alternative exon (NSAE)-modulating agent that modulates expression of a target protein in a cell comprising a pre-processed mRNA transcript (pre-mRNA) that encodes the target protein, wherein the pre-mRNA comprises:
(1) a non-sense mediated RNA decay-inducing alternative exon (NSAE) comprising an alternative 5′ splice site downstream of the 5′ splice site of a canonical exon and within the canonical exon, or upstream of the 5′ splice site of the canonical exon and within an intron,
wherein the NSAE-modulating agent modulates processing of an mRNA transcript from the pre-processed mRNA transcript by modulating splicing of the pre-mRNA at the 5′ alternative splice site, wherein the splicing of the pre-mRNA at the 5′ alternative splice site modulates the expression of the target protein in the cell; or
(2) a non-sense mediated RNA decay-inducing alternative exon (NSAE) comprising an alternative 3′ splice site upstream of the 3′ splice site of a canonical exon and within the canonical exon, or downstream of the 3′ splice site of the canonical exon and within an intron,
wherein the NSAE-modulating agent modulates processing of an mRNA transcript from the pre-processed mRNA transcript by modulating splicing of the pre-mRNA at the 3′ alternative splice site, and wherein the splicing of the pre-mRNA at the 3′ alternative splice site modulates the expression of the target protein in the cell.

125. A composition comprising a modified antisense oligonucleotide sequence or a vector encoding a polynucleotide comprising an antisense oligonucleotide sequence, wherein the antisense oligomer sequence has at least about 80% sequence identity to a sequence selected from the group consisting of SEQ ID NOs: 1-165 and 1301-10225.
